United States Patent Application Publication US 2024/0327476 A1 - sequence listing, part 78

SEQ ID NO: 147439 - DNA, 1440 bp, synthetic construct
  misc_feature 1..1440: note = Description of Artificial Sequence: Synthetic coding sequence
  source 1..1440: mol_type = other DNA
atgaactggagccacagctgcatctccttctgctggatctactttgctgccagccggctgcgggctgctgagacagcagatggcaagtatgcccagaagctgttcaatgacctgtttgaggactacagcaatgccctgcggcctgtggaggacacagacaaggtgctgaatgtgaccctgcagatcaccctgagccagatcaaggacatggatgaaagaaaccagatcctgacagcctacctgtggatccggcagatctggcatgatgcctacctgacctgggaccgggaccagtatgatggcctggacagcatccgcatccccagcgacctggtgtggaggccagacatcgtgctgtacaacaaggcagatgatgagagcagcgagcctgtgaacaccaacgtggtgctgcgctatgatggcctcatcacctgggatgccccagccatcaccaagagcagctgtgtggtggatgtgacctacttcccctttgacaaccagcagtgcaacctgaccttcggctcctggacctacaatggaaaccaggtggacatcttcaatgccctggacagcggggacctgagtgacttcattgaagatgtggagtgggaggtgcacggcatgcctgctgtgaagaatgtcatctcctatggctgctgcagcgagccctacccagatgtgaccttcaccctgctgctgaagagaagaagcagcttctacatcgtgaacctgctgatcccctgtgtgctgatctccttcctggcccccctgtccttctacctgcctgctgccagcggggagaaggtgtccctgggcgtgaccatcctgctggccatgaccgtcttccagctgatggtggccgagatcatgcctgcctctgaaaatgtgcccctgattggcaagtactacatcgccaccatggccctgatcacagccagcacagccctgaccatcatggtgatgaacatccacttctgtggggctgaggcccggcctgtgccccactgggcccgggtggtgatcctgaagtacatgagccgggtgctgtttgtgtatgatgtgggggagagctgcctgagcccccaccacagccgggagcgggaccacctgaccaaggtgtacagcaagctgcctgagagcaacctgaaggccgccaggaacaaggacctgagcaggaagaaggacatgaacaagaggctgaagaatgacctgggctgccagggcaagaacccccaggaggccgagagctactgtgcccagtacaaggtgctgaccaggaacatcgagtacatcgccaagtgcctgaaggaccacaaggccaccaacagcaagggcagcgagtggaagaaggtggccaaggtgattgaccgcttcttcatgtggatcttcttcatcatggtgtttgtgatgaccatcctgatcatcgcccgggctgactag

SEQ ID NO: 147440 - DNA, 1506 bp, synthetic construct
  misc_feature 1..1506: note = Description of Artificial Sequence: Synthetic coding sequence
  source 1..1506: mol_type = other DNA
atgacccctggggccctgctgatgctgctgggcgccctgggcgcccccctggcccctggggtgcggggcagcgaggccgagggccgcctgcgggagaagctgttcagcggctatgacagctctgtgcggcctgcccgggaggtgggggacagagtgcgggtgtctgtgggcctcatcctggcccagctgatcagcctgaatgagaaggatgaggagatgagcaccaaggtgtacctggacctggagtggacagactaccgcctgtcctgggaccctgctgagcatgatggcatcgacagcctgcgcatcacagctgagagcgtgtggctgcctgatgtggtgctgctgaacaacaatgatggcaactttgatgtggccctggacatctctgtggtggtgtccagtgatggctctgtgcgctggcagcccccaggcatctaccgcagcagctgcagcatccaggtgacctacttcccctttgactggcagaactgcaccatggtgttcagcagctacagctatgacagcagcgaggtgtccctgcagacaggcctgggcccagatggccagggccaccaggagatccacatccacgagggcaccttcattgaaaatggccagtgggagatcatccacaagcccagccgcctcatccagcccccaggggacccccggggcggccgggagggccagaggcaggaggtgatcttctacctgatcatccggaggaagcccctcttctacctggtgaatgtgattgccccctgcatcctgatcaccctgctggccatctttgtgttctacctgcccccagatgctggggagaagatgggcctgagcatctttgccctgctgaccctgaccgtcttcctgctgctgctggccgacaaggtgcctgagaccagcctgtctgtgcccatcatcatcaagtacctgatgttcaccatggtgctggtgaccttcagcgtcatcctgtctgtggtggtgctgaacctgcaccacaggagcccccacacccaccagatgcccctgtgggtgcggcagatcttcatccacaagctgcccctgtacctgcggctgaagaggcccaagccagagcgggacctgatgcctgagcccccccactgcagcagccctggcagcggctggggccggggcacagatgagtacttcatcaggaagcccccaagtgacttcctgttccccaagcccaaccgcttccagcctgagctgagcgccccagacctgcggcgcttcattgatggccccaacagagctgtggccctgctgcctgagctgcgggaggtggtgagcagcatctcctacatcgcccggcagctgcaggagcaggaggaccatgatgccctgaaggaggactggcagtttgtggccatggtggtggacaggctcttcctgtggaccttcatcatcttcacctctgtgggcaccctggtgatcttcctggatgccacctaccacctgcccccaccagaccccttcccctag

SEQ ID NO: 147441 - DNA, 1290 bp, synthetic construct
  misc_feature 1..1290: note = Description of Artificial Sequence: Synthetic coding sequence
  source 1..1290: mol_type = other DNA
atgagcaccaaggtgtacctggacctggagtggacagactaccgcctgtcctgggaccctgctgagcatgatggcatcgacagcctgcgcatcacagctgagagcgtgtggctgcctgatgtggtgctgctgaacaacaatgatggcaactttgatgtggccctggacatctctgtggtggtgtccagtgatggctctgtgcgctggcagcccccaggcatctaccgcagcagctgcagcatccaggtgacctacttcccctttgactggcagaactgcaccatggtgttcagcagctacagctatgacagcagcgaggtgtccctgcagacaggcctgggcccagatggccagggccaccaggagatccacatccacgagggcaccttcattgaaaatggccagtgggagatcatccacaagcccagccgcctcatccagcccccaggggacccccggggcggccgggagggccagaggcaggaggtgatcttctacctgatcatccggaggaagcccctcttctacctggtgaatgtgattgccccctgcatcctgatcaccctgctggccatctttgtgttctacctgcccccagatgctggggagaagatgggcctgagcatctttgccctgctgaccctgaccgtcttcctgctgctgctggccgacaaggtgcctgagaccagcctgtctgtgcccatcatcatcaagtacctgatgttcaccatggtgctggtgaccttcagcgtcatcctgtctgtggtggtgctgaacctgcaccacaggagcccccacacccaccagatgcccctgtgggtgcggcagatcttcatccacaagctgcccctgtacctgcggctgaagaggcccaagccagagcgggacctgatgcctgagcccccccactgcagcagccctggcagcggctggggccggggcacagatgagtacttcatcaggaagcccccaagtgacttcctgttccccaagcccaaccgcttccagcctgagctgagcgccccagacctgcggcgcttcattgatggccccaacagagctgtggccctgctgcctgagctgcgggaggtggtgagcagcatctcctacatcgcccggcagctgcaggagcaggaggaccatgatgccctgaaggaggactggcagtttgtggccatggtggtggacaggctcttcctgtggaccttcatcatcttcacctctgtgggcaccctggtgatcttcctggatgccacctaccacctgcccccaccagaccccttcccctag

SEQ ID NO: 147442 - DNA, 1509 bp, synthetic construct
  misc_feature 1..1509: note = Description of Artificial Sequence: Synthetic coding sequence
  source 1..1509: mol_type = other DNA
atggcccggcgctgtggccctgtggccctgctgctgggcttcggcctgctgcggctgtgcagcggcgtgtggggcacagacacagaggagcggctggtggagcacctgctggaccccagccgctacaacaagctgatccggcctgccaccaatggaagtgagctggtgacagtgcagctgatggtgtccctggcccagctgatctctgtgcatgagcgggagcagatcatgaccaccaacgtgtggctgacccaggagtgggaggactaccgcctgacctggaagccagaggagtttgacaacatgaagaaggtgcggctgcccagcaagcacatctggctgcctgatgtggtgctgtacaacaatgctgatggcatgtatgaggtgtccttctacagcaatgctgtggtgtcctatgatggcagcatcttctggctgcccccagccatctacaagagcgcctgcaagattgaggtgaagcacttcccctttgaccagcagaactgcaccatgaagttccgctcctggacctatgacagaacagaaattgacctggtgctgaagtctgaggtggccagcctggatgacttcacccccagcggggagtgggacatcgtggccctgcctggaagaagaaatgaaaatccagatgacagcacctacgtggacatcacctatgacttcatcatccggaggaagcccctcttctacaccatcaacctgatcatcccctgtgtgctgatcaccagcctggccatcctggtgttctacctgcccagcgactgtggggagaagatgaccctgtgcatctctgtgctgctggccctgactgtgttcctgctgctgatcagcaagatcgtgccccccaccagcctggatgtgcccctggtgggcaagtacctgatgttcaccatggtgctggtgaccttcagcatcgtgacctctgtgtgtgtgctgaatgtgcaccacaggagccccaccacccacaccatggccccctgggtgaaggtggtgttcctggagaagctgcctgccctgctcttcatgcagcagcccaggcaccactgtgcccggcagaggctgcggctgcggcggcggcagcgggagcgggagggcgctggggccctcttcttccgggaggcccctggagctgacagctgcacctgctttgtgaacagagcctctgtgcagggcctggccggggcctttggagctgagcccgcccctgtggccggccctggccgcagcggggagccctgtggctgcggcctgcgggaggccgtggatggagtgcgcttcatcgctgaccacatgagaagtgaagatgatgaccagagcgtgtctgaggactggaagtatgtggccatggtgattgacaggctcttcctgtggatctttgtgtttgtgtgtgtgtttggcaccatcggcatgttcctgcagcccctcttccagaactacaccaccaccaccttcctgcacagcgaccacagcgcccccagcagcaagtag

SEQ ID NO: 147443 - DNA, 1377 bp, synthetic construct
  misc_feature 1..1377: note = Description of Artificial Sequence: Synthetic coding sequence
  source 1..1377: mol_type = other DNA
atgctgcctgacttcatgctggtgctgattgtgctgggcatccccagcagcgccaccaccggcttcaacagcattgctgaaaatgaagatgccctgctgcggcacctgttccagggctaccagaagtgggtgcggcctgtgctgcacagcaatgacaccatcaaggtgtacttcggcctgaagatcagccagctggtggatgtggatgagaagaaccagctgatgaccaccaacgtgtggctgaagcaggagtggacagaccacaagctgcgctggaacccagatgattatggaggcatccacagcatcaaggtgcccagcgagagcctgtggctgcctgacatcgtgctgtttgaaaatgctgatggccgctttgagggcagcctgatgaccaaggtgattgtgaagagcaatggcaccgtggtgtggaccccaccagccagctacaagagcagctgcaccatggatgtgaccttcttcccctttgaccggcagaactgcagcatgaagtttggctcctggacctatgatggcaccatggtggacctgatcctgatcaatgaaaatgtggacaggaaggacttctttgacaacggggagtgggagatcctgaatgccaagggcatgaagggcaacagaagagatggagtgtacagctaccccttcatcacctacagctttgtgctgcggcggctgcccctcttctacaccctcttcctgatcatcccctgcctgggcctgtccttcctgactgtgctggtgttctacctgcccagtgatgaaggagagaagctgagcctgagcacctctgtgctggtgtccctgaccgtcttcctgctggtgattgaggagatcatccccagcagcagcaaggtgatccccctcatcggggagtacctgctcttcatcatgatctttgtgaccctgagcatcatcgtgacagtgtttgtgatcaacgtgcaccacaggagcagcagcacctaccaccccatggccccctgggtgaagaggctcttcctgcagaagctgcccaagctgctgtgcatgaaggaccacgtggaccgctacagcagccctgagaaggaggagagccagcctgtggtgaagggcaaggtgctggagaagaagaagcagaagcagctgagtgatggagagaaggtgctggtggccttcctggagaaggctgctgacagcatccgctacatcagcagacatgtgaagaaggagcacttcatcagccaggtggtgcaggactggaagtttgtggcccaggtgctggaccgcatcttcctgtggctgttcctgattgtgtctgtgacaggctctgtgctgatcttcaccccagccctgaagatgtggctgcacagctaccactag

SEQ ID NO: 147444 - DNA, 1497 bp, synthetic construct
  misc_feature 1..1497: note = Description of Artificial Sequence: Synthetic coding sequence
  source 1..1497: mol_type = other DNA
atgaggcgggcccccagcctggtgctcttcttcctggtggccctgtgtggccggggcaactgccgggtggccaatgctgaggagaagctgatggatgacctgctgaacaagacccgctacaacaacctgatccggcctgccaccagcagcagccagctgatcagcatcaagctgcagctgagcctggcccagctgatctctgtgaatgaaagagagcagatcatgaccaccaacgtgtggctgaagcaggagtggacagactaccgcctgacctggaacagcagccgctatgaaggagtgaacatcctgcgcatcccagccaagaggatctggctgcctgacatcgtgctgtacaacaatgctgatggcacctatgaggtgtctgtgtacaccaacctgattgtgcgcagcaatggatctgtgctgtggctgcccccagccatctacaagagcgcctgcaagattgaggtgaagtacttcccctttgaccagcagaactgcaccctgaagttccgctcctggacctatgaccacacagaaattgacatggtgctgatgacccccacagcctccatggatgacttcacccccagcggggagtgggacatcgtggccctgcctggaagaagaacagtgaacccccaggaccccagctatgtggatgtgacctatgacttcatcatcaagaggaagcccctcttctacaccatcaacctgatcatcccctgtgtgctgaccaccctgctggccatcctggtgttctacctgcccagcgactgtggggagaagatgaccctgtgcatctctgtgctgctggccctgaccttcttcctgctgctgatcagcaagatcgtgccccccaccagcctggatgtgcccctgattggcaagtacctgatgttcaccatggtgctggtgaccttcagcatcgtgacctctgtgtgtgtgctgaatgtgcaccacaggagccccagcacccacaccatggccccctgggtgaagcgctgcttcctgcacaagctgcccaccttcctgttcatgaagaggcctggccctgacagcagccctgcccgggccttcccccccagcaagagctgtgtgaccaagccagaggccacagccaccagcaccagccccagcaacttctacggcaacagcatgtactttgtgaacccagccagcgctgccagcaagagccctgctggcagcacccctgtggccatcccccgggacttctggctgcggagcagcggccgcttccggcaggatgtgcaggaggccctggagggcgtgtccttcatcgcccagcacatgaagaatgatgatgaggaccagagcgtggtggaggactggaagtatgtggccatggtggtggacaggctcttcctgtgggtgttcatgtttgtgtgtgtgctgggcaccgtgggcctcttcctgcccccactcttccagacccatgctgccagcgagggcccctatgctgcccagagggactag

SEQ ID NO: 147445 - DNA, 696 bp, synthetic construct
  misc_feature 1..696: note = Description of Artificial Sequence: Synthetic coding sequence
  source 1..696: mol_type = other DNA
atgaggcgggcccccagcctggtgctcttcttcctggtggccctgtgtggccggggcaactgccgggtggccaatgctgaggagaagctgatggatgacctgctgaacaagacccgctacaacaacctgatccggcctgccaccagcagcagccagctgatcagcatcaagctgcagctgagcctggcccagctgatctctgtgaatgaaagagagcagatcatgaccaccaacgtgtggctgaagcaggagtggacagactaccgcctgacctggaacagcagccgctatgaaggagtgaacatcctgcgcatcccagccaagaggatctggctgcctgacatcgtgctgtacaacaagagcctgaggacaggcagcacctggctgtggtggtggacaggctgcagctgtggctgcagctgcctgtgtgcctcctgggccctgtggggcagcagctaccggcccagcagccggcccatgcagctgctgcggggccccaccctgcccagcgtgacagagggccccctgggctgcggcgtgcggggctgtgagtggccaggcggccactttgctgccagcttctgggtggtggctgatgaggccctgagcaaatatgtgtccatcggccaccagccccaccagaccagccacagccggggcaccgggaaggatggcggcctgggctgccccctgtag

SEQ ID NO: 147446 - DNA, 1554 bp, synthetic construct
  misc_feature 1..1554: note = Description of Artificial Sequence: Synthetic coding sequence
  source 1..1554: mol_type = other DNA
atggagggccctgtgctgaccctgggcctgctggccgccctggccgtgtgtggctcctggggcctgaatgaggaggagcggctcatccgccacctgttccaggagaagggctacaacaaggagctgcggcctgtggcccacaaggaggagagcgtggatgtggccctggccctgaccctgagcaacctgatcagcctgaaggaggtggaggagaccctgaccaccaacgtgtggattgaacatggctggacagacaaccggctgaagtggaatgctgaggagtttggaaacatctctgtgctgcggctgcccccagacatggtgtggctgcctgagatcgtgctggagaacaacaatgatggcagcttccagatctcctacagctgcaatgtgctggtgtaccactacggctttgtgtactggctgcccccagccatcttccgcagcagctgccccatctctgtgacctacttcccctttgactggcagaactgcagcctgaagttcagcagcctgaagtacacagccaaggagatcaccctgagcctgaagcaggatgccaaggaaaatagaacctaccctgtggagtggatcatcatcgaccctgagggcttcacagaaaatggagagtgggagatcgtgcacaggcctgcccgggtgaatgtggacccccgggcccccctggacagccccagccggcaggacatcaccttctacctgatcatccggaggaagcccctcttctacatcatcaacatcctggtgccctgtgtgctgatctccttcatggtgaacctggtgttctacctgcctgctgacagcggggagaagacctctgtggccatctctgtgctgctggcccagagcgtcttcctgctgctgatcagcaagaggctgcctgccacctccatggccatccccctgattggcaagttcctgctgtttggcatggtgctggtgaccatggtggtggtgatctgtgtgattgtgctgaacatccacttccgcacccccagcacccacgtgctgtctgagggcgtgaagaagctgttcctggagaccctgcctgagctgctgcacatgagcaggcctgcagaagatggccccagccctggggccctggtgcggcgcagcagcagcctgggctacatcagcaaggccgaggagtacttcctgctgaagagcagaagtgacctgatgtttgagaagcagagcgagcggcacggcctggcccggcggctgaccacagcccggcggcccccagccagcagcgagcaggcccagcaggagctgttcaatgagctgaagccagctgtggatggagccaacttcatcgtgaaccacatgagggaccagaacaactacaatgaggagaaggacagctggaacagagtggccaggacagtggaccggctgtgcctgtttgtggtgacccctgtgatggtggtgggcacagcctggatcttcctgcagggcgtgtacaaccagcccccaccccagcccttccctggggacccctacagctacaacgtgcaggacaagcgcttcatctag

SEQ ID NO: 147447 - DNA, 708 bp, synthetic construct
  misc_feature 1..708: note = Description of Artificial Sequence: Synthetic coding sequence
  source 1..708: mol_type = other DNA
atggagggccctgtgctgaccctgggcctgctggccgccctggccgtgtgtggctcctggggcctgaatgaggaggagcggctcatccgccacctgttccaggagaagggctacaacaaggagctgcggcctgtggcccacaaggaggagagcgtggatgtggccctggccctgaccctgagcaacctgatcagcctgaaggaggtggaggagaccctgaccaccaacgtgtggattgaacatggctggacagacaaccggctgaagtggaatgctgaggagtttggaaacatctctgtgctgcggctgcccccagacatggtgtggctgcctgagatcgtgctggagaacaacaatgatggcagcttccagatctcctacagctgcaatgtgctggtgtaccactacggctttgtgtactggctgcccccagccatcttccgcagcagctgccccatctctgtgacctacttcccctttgactggcagaactgcagcctgaagttccgggagcggggcgtgggggacagccccccagctggccagggccagaggggcccccagagccccagcggccagccccagcccccaggccaccacctgctgccccaccaccccccccaggcccccctgctgcaccaccagcaccctggggccctgcgggcccacctgctgcacggccagcccggcctgctgcccaccggctag

SEQ ID NO: 147448 - DNA, 972 bp, synthetic construct
  misc_feature 1..972: note = Description of Artificial Sequence: Synthetic coding sequence
  source 1..972: mol_type = other DNA
atgctgaagaacctggagacctctgtgtcctgtgccagccccaggacctggtgtggcagccagaggctgtgctggaggaccaccatgacagcccccagccgcagccccaccccagccacctgcctgagcaccaccacagccagctgcaccggctgccacctgcccagcagcgcccccccagcccccagcctgagccccatcagccccagcactggaagaacagcccccagcagcagtggaggagagaagacctctgtggccatctctgtgctgctggcccagagcgtcttcctgctgctgatcagcaagaggctgcctgccacctccatggccatccccctgattggcaagttcctgctgtttggcatggtgctggtgaccatggtggtggtgatctgtgtgattgtgctgaacatccacttccgcacccccagcacccacgtgctgtctgagggcgtgaagaagctgttcctggagaccctgcctgagctgctgcacatgagcaggcctgcagaagatggccccagccctggggccctggtgcggcgcagcagcagcctgggctacatcagcaaggccgaggagtacttcctgctgaagagcagaagtgacctgatgtttgagaagcagagcgagcggcacggcctggcccggcggctgaccacagcccggcggcccccagccagcagcgagcaggcccagcaggagctgttcaatgagctgaagccagctgtggatggagccaacttcatcgtgaaccacatgagggaccagaacaactacaatgaggagaaggacagctggaacagagtggccaggacagtggaccggctgtgcctgtttgtggtgacccctgtgatggtggtgggcacagcctggatcttcctgcagggcgtgtacaaccagcccccaccccagcccttccctggggacccctacagctacaacgtgcaggacaagcgcttcatctag

SEQ ID NO: 147449 - DNA, 708 bp, synthetic construct; identical to SEQ ID NO: 147447
  misc_feature 1..708: note = Description of Artificial Sequence: Synthetic coding sequence
  source 1..708: mol_type = other DNA

SEQ ID NO: 147450 - DNA, 1509 bp, synthetic construct
  misc_feature 1..1509: note = Description of Artificial Sequence: Synthetic coding sequence
  source 1..1509: mol_type = other DNA
atggagggccctgtgctgaccctgggcctgctggccgccctggccgtgtgtggctcctggggcctgaatgaggaggagcggctcatccgccacctgttccaggagaagggctacaacaaggagctgcggcctgtggcccacaaggaggagagcgtggatgtggccctggccctgaccctgagcaacctgatcagcctgggctggacagacaaccggctgaagtggaatgctgaggagtttggaaacatctctgtgctgcggctgcccccagacatggtgtggctgcctgagatcgtgctggagaacaacaatgatggcagcttccagatctcctacagctgcaatgtgctggtgtaccactacggctttgtgtactggctgcccccagccatcttccgcagcagctgccccatctctgtgacctacttcccctttgactggcagaactgcagcctgaagttcagcagcctgaagtacacagccaaggagatcaccctgagcctgaagcaggatgccaaggagaacagaacctaccctgtggagtggatcatcattgatcctgagggcttcacagaaaatggagagtgggagatcgtgcacaggcctgcccgggtgaatgtggacccccgggcccccctggacagccccagccggcaggacatcaccttctacctgatcatccggaggaagcccctcttctacatcatcaacatcctggtgccctgtgtgctgatctccttcatggtgaacctggtgttctacctgcctgctgacagcggggagaagacctctgtggccatctctgtgctgctggcccagagcgtcttcctgctgctgatcagcaagaggctgcctgccacctccatggccatccccctcatcggcaagttcctgctgtttggcatggtgctggtgaccatggtggtggtgatctgtgtgattgtgctgaacatccacttccgcacccccagcacccacgtgctgtctgaaggagtgaagaagctgttcctggagaccctgcctgagctgctgcacatgagcaggcctgcagaagatggccccagccctggggccctggtgagaagaagcagcagcctgggctacatcagcaaggccgaggagtacttcctgctgaagagcagaagtgacctgatgtttgagaagcagagcgagagacatggcctggcccggcggctgaccacagcccggcggcccccagccagcagcgagcaggcccagcaggagctgttcaatgagctgaagccagctgtggatggagccaacttcatcgtgaaccacatgagggaccagaacaactacaatgaggagaaggacagctggaacagagtggccaggacagtggaccggctgtgcctgtttgtggtgacccctgtgatggtggtgggcacagcctggatcttcctgcagggcgtgtacaaccagcccccaccccagcccttccctggggacccctacagctacaacgtgcaggacaagcgcttcatctag

SEQ ID NO: 147451 - DNA, 1482 bp, synthetic construct
  misc_feature 1..1482: note = Description of Artificial Sequence: Synthetic coding sequence
  source 1..1482: mol_type = other DNA
atggcccgggcccccctgggcgtgctgctgctgctgggcctgctgggccggggcgtgggcaagaatgaggagctgcggctgtaccaccacctgttcaacaactatgaccccggcagcaggcctgtgcgggagcctgaggacacagtgaccatcagcctgaaggtgaccctgaccaacctgatcagcctgaatgagaaggaggagaccctgaccacctctgtgtggattggcatcgactggcaggactaccgcctgaactacagcaaggatgactttggaggcatcgagaccctgcgggtgcccagcgagctggtgtggctgcctgagatcgtgctggagaacaacattgatggccagtttggagtggcctatgatgccaacgtgctggtgtatgaaggaggctctgtgacctggctgcccccagccatctacagatctgtgtgtgctgtggaggtgacctacttcccctttgactggcagaactgcagcctcatcttccgcagccagacctacaatgctgaggaggtggagttcacctttgctgtggacaatgatggcaagaccatcaacaagattgacatcgacacagaggcctacacagaaaatggagagtgggccatcgacttctgccctggggtcatcagaagacaccacggcggggccacagatggccctggagaaacagatgtgatctacagcctcatcatccggaggaagcccctcttctacgtgatcaacatcatcgtgccctgtgtgctgatcagcggcctggtgctgctggcctacttcctgcctgcccaggccggcggccagaagtgcaccgtgtccatcaacgtgctgctggcccagaccgtcttcctgttcctgattgcccagaagatccctgagaccagcctgtctgtgcccctgctgggccgcttcctgatctttgtgatggtggtggccaccctcatcgtgatgaactgtgtgattgtgctgaatgtgtcccagaggacccccaccacccacgccatgagcccccggctgcggcacgtgctgctggagctgctgccccggctgctgggcagccccccacctcctgaggcccccagggctgccagccccccccggcgggccagctctgtgggcctgctgctgcgggcagaggagctgatcctgaagaagcccaggtctgagctggtgtttgagggccagaggcaccggcagggcacctggacagctgccttctgccagagcctgggcgccgccgcccctgaggtgcgctgctgcgtggatgctgtgaactttgtggccgagagcacccgggaccaggaggccaccggggaggaggtgtctgactgggtgaggatgggaaatgccctggacaacatctgcttctgggccgccctggtgctcttctctgtgggcagcagcctcatcttcctgggcgcctacttcaacagagtgcctgacctgccctatgccccctgcatccagccctag

SEQ ID NO: 147452 - DNA, 1554 bp, synthetic construct
  misc_feature 1..1554: note = Description of Artificial Sequence: Synthetic coding sequence
  source 1..1554: mol_type = other DNA
atgcacggcggccagggccccctgctgctgctgctgctgctggccgtgtgcctgggcgcccagggcaggaaccaggaggagcggctgctggccgacctgatgcagaactatgaccccaacctgcggcctgctgagcgggacagtgatgtggtgaatgtgtccctgaagctgaccctgaccaacctgatcagcctgaatgaaagagaggaggccctgaccaccaacgtgtggattgagatgcagtggtgtgactaccgcctgcgctgggacccccgggactatgagggcctgtgggtgctgcgggtgcccagcaccatggtgtggaggccagacatcgtgctggagaacaacgtggatggagtgtttgaggtggccctgtactgcaatgtgctggtgtccccagatggctgcatctactggctgcccccagccatcttccgcagcgcctgcagcatctctgtgacctacttcccctttgactggcagaactgcagcctcatcttccagagccagacctacagcaccaatgaaattgacctgcagctgagccaggaggatggccagaccatcgagtggatcttcattgatcctgaggccttcacagaaaatggagagtgggccatccagcacaggcctgccaagatgctgctggaccctgctgccccagcccaggaggccggccaccagaaggtggtgttctacctgctgatccagaggaagcccctcttctacgtgatcaacatcatcgccccctgtgtgctgatcagctctgtggccatcctgatccacttcctgcctgccaaggccggcggccagaagtgcaccgtggccatcaacgtgctgctggcccagacagtgttcctgttcctggtggccaagaaggtgcctgagaccagccaggccgtgcccctcatcagcaagtacctgaccttcctgctggtggtgaccatcctgattgtggtgaatgctgtggtggtgctgaatgtgtccctgcggagcccccacacccacagcatggcccggggcgtgaggaaggtgttcctgcggctgctgccccagctgctgaggatgcacgtgcggcccctggccccagctgctgtgcaggacacccagagccggctgcagaatggcagcagcggctggagcatcaccactggagaggaggtggccctgtgcctgcccaggtctgagctgctcttccagcagtggcagaggcagggcctggtggccgccgccctggagaagctggagaagggccctgagctgggcctgagccagttctgtggcagcctgaagcaggccgccccagccatccaggcctgtgtggaggcctgcaacctgattgcctgtgcccggcaccagcagagccactttgacaatggaaatgaggagtggttcctggtgggccgggtgctggacagagtgtgcttcctggccatgctgagcctcttcatctgtggcacagctggcatcttcctgatggcccactacaacagagtgcctgccctgcccttccctggggacccccggccctacctgcccagcccagactag

SEQ ID NO: 147453 - DNA, 1554 bp, synthetic construct; identical to SEQ ID NO: 147452
  misc_feature 1..1554: note = Description of Artificial Sequence: Synthetic coding sequence
  source 1..1554: mol_type = other DNA

SEQ ID NO: 147454 - DNA, 1080 bp, synthetic construct
  misc_feature 1..1080: note = Description of Artificial Sequence: Synthetic coding sequence
  source 1..1080: mol_type = other DNA
atggtgcggcccatgctgctgctgagcctgggcctgctggccggcctgctgcctgccctggccgcctgcccccagaactgccactgccacagcgacctgcagcacgtgatctgtgacaaggtgggcctgcagaagatccccaaggtgtctgagaagaccaagctgctgaacctgcagaggaacaacttccctgtgctggccgccaacagcttccgggccatgcccaacctggtgtccctgcacctgcagcactgccagatccgggaggtggccgccggggccttccggggcctgaagcagctgatctacctgtacctgagccacaatgacatccgggtgctgcgggccggggcctttgatgacctgacagagctgacctacctgtacctggaccacaacaaggtgacagagctgccccggggcctgctgagccccctggtgaacctcttcatcctgcagctgaacaacaacaagatccgggagctgcgggccggggccttccagggcgccaaggacctgcgctggctgtacctgtctgaaaatgccctgagcagcctgcagcccggggccctggatgatgtggagaacctggccaagttccacgtggacaggaaccagctgagcagctaccccagcgctgccctgagcaagctgcgggtggtggaggagctgaagctgagccacaaccccctgaagagcatcccagacaatgccttccagagctttggccgctacctggagaccctgtggctggacaacaccaacctggagaagttcagtgatggagccttcctgggcgtgaccaccctgaagcacgtgcacctggagaacaaccggctgaaccagctgcccagcaacttcccctttgacagcctggagaccctggccctgaccaacaacccctggaagtgcacctgccagctgcggggcctgcggcgctggctggaggccaaggccagcaggccagatgccacctgtgccagccctgccaagttcaagggccagcacatccgggacacagatgccttccgcagctgcaagttccccaccaagaggagcaagaaggccggccgccactag

SEQ ID NO: 147455 - DNA, 129 bp, synthetic construct
  misc_feature 1..129: note = Description of Artificial Sequence: Synthetic coding sequence
  source 1..129: mol_type = other DNA
tgagccagcaggccagatgccacctgtgccagccctgccaagttcaagggccagcacatccgggacacagatgccttccgcagctgcaagttccccaccaagaggagcaagaaggccggccgccactag

SEQ ID NO: 147456 - DNA, 1080 bp, synthetic construct; identical to SEQ ID NO: 147454
  misc_feature 1..1080: note = Description of Artificial Sequence: Synthetic coding sequence
  source 1..1080: mol_type = other DNA

SEQ ID NO: 147457 - DNA, 2328 bp, synthetic construct
  misc_feature 1..2328: note = Description of Artificial Sequence: Synthetic coding sequence
  source 1..2328: mol_type = other DNA
atgagggccagcctgctgctgtctgtgctgcggcctgctggccctgtggccgtgggcatcagcctgggcttcaccctgagcctgctgtctgtgacctgggtggaggagccctgtggccctggccccccccagcccggggacagcgagctgcccccccggggcaacaccaatgctgcccggcggcccaacagcgtgcagcctggagctgagcgggagaagccaggggccggggagggcgctggggagaactgggagccccgggtgctgccctaccacccagcccagcccggccaggccgccaagaaggctgtgaggacccgctacatcagcacagagctgggcatccggcagaggctgctggtggccgtgctgaccagccagaccaccctgcccaccctgggcgtggccgtgaacagaaccctgggccaccggctggagcgggtggtgttcctgaccggggcccggggcagaagagcccctcctggcatggctgtggtgaccctgggggaggagcggcccatcggccacctgcacctggccctgcggcacctgctggagcagcacggagatgactttgactggttcttcctggtgcctgacaccacctacacagaggcccacggcctggcccggctgaccggccacctgagcctggccagcgctgcccacctgtacctgggccggccccaggacttcatcggcggggagcccaccccaggccgctactgccacggcggctttggagtgctgctgagcaggatgctgctgcagcagctgcggccccacctggagggctgcagaaatgacatcgtgtctgcccggccagatgagtggctgggccgctgcatcctggatgccactggagtgggctgcaccggggaccatgaaggagtgcactacagccacctggagctgagccctggagagcctgtgcaggagggggacccccacttccgcagcgccctgacagcccaccctgtgcgggaccctgtgcacatgtaccagctgcacaaggcctttgcccgggcagagctggagaggacctaccaggagatccaggagctgcagtgggagatccagaacaccagccacctggccgtggatggagaccaggccgccgcctggcctgtgggcatcccagcccccagcaggcctgccagcagatttgaggtgctgcgctgggactacttcacagagcagcacgccttcagctgtgctgatggcagcccccgctgccccctgcggggagctgacagagcagatgtggctgatgtgctgggcacagccctggaggagctgaacagacgctaccacccagccctgcggctgcagaagcagcagctggtgaatggctacagaagatttgatcctgcccggggcatggagtacaccctggacctgcagctggaggccctgaccccccagggcggccggcggcccctgaccaggagagtgcagctgctgcggcccctgagccgggtggagatcctgcctgtgccctacgtgacagaggccagccggctgactgtgctgctgcccctggccgctgctgagcgggacctggcccctggcttcctggaggcctttgccacagctgccctggagcctggagatgctgctgctgccctgaccctgctgctgctgtatgagccccggcaggcccagagggtggcccacgcagatgtgtttgcccctgtgaaggcccacgtggccgagctggagcggcgcttccctggggcccgggtgccctggctgtctgtgcagacagctgcccccagccccctgcggctgatggacctgctgagcaagaagcaccccctggacaccctcttcctgctggccggccctgacacagtgctgaccccagacttcctgaaccgctgcaggatgcacgccatcagcggctggcaggccttcttccccatgcacttccaggccttccaccctgctgtggccccaccccagggccctggccccccagagctgggccgggacaccggccgctttgaccggcaggccgccagcgaggcctgcttctacaacagcgactatgtggccgcccggggccgcctggccgccgccagcgagcaggaggaggagctgctggagagcctggatgtgtatgagctgttcctgcacttcagcagcctgcacgtgctgcgggctgtggagcccgccctgctgcagcgctaccgggcccagacctgcagcgcccggctgtctgaggacctgtaccaccgctgcctgcagagcgtgctggagggcctgggcagcaggacccagctggccatgctgctgtttgagcaggagcagggcaacagcacctag

SEQ ID NO: 147458 - DNA, 1842 bp, synthetic construct
  misc_feature 1..1842: note = Description of Artificial Sequence: Synthetic coding sequence
  source 1..1842: mol_type = other DNA
atggctgtggtgaccctgggggaggagcggcccatcggccacctgcacctggccctgcggcacctgctggagcagcacggagatgactttgactggttcttcctggtgcctgacaccacctacacagaggcccacggcctggcccggctgaccggccacctgagcctggccagcgctgcccacctgtacctgggccggccccaggacttcatcggcggggagcccaccccaggccgctactgccacggcggctttggagtgctgctgagcaggatgctgctgcagcagctgcggccccacctggagggctgcagaaatgacatcgtgtctgcccggccagatgagtggctgggccgctgcatcctggatgccactggagtgggctgcaccggggaccatgaaggagtgcactacagccacctggagctgagccctggagagcctgtgcaggagggggacccccacttccgcagcgccctgacagcccaccctgtgcgggaccctgtgcacatgtaccagctgcacaaggcctttgcccgggcagagctggagaggacctaccaggagatccaggagctgcagtgggagatccagaacaccagccacctggccgtggatggagaccaggccgccgcctggcctgtgggcatcccagcccccagcaggcctgccagcagatttgaggtgctgcgctgggactacttcacagagcagcacgccttcagctgtgctgatggcagcccccgctgccccctgcggggagctgacagagcagatgtggctgatgtgctgggcacagccctggaggagctgaacagacgctaccacccagccctgcggctgcagaagcagcagctggtgaatggctacagaagatttgatcctgcccggggcatggagtacaccctggacctgcagctggaggccctgaccccccagggcggccggcggcccctgaccaggagagtgcagctgctgcggcccctgagccgggtggagatcctgcctgtgccctacgtgacagaggccagccggctgactgtgctgctgcccctggccgctgctgagcgggacctggcccctggcttcctggaggcctttgccacagctgccctggagcctggagatgctgctgctgccctgaccctgctgctgctgtatgagccccggcaggcccagagggtggcccacgcagatgtgtttgcccctgtgaaggcccacgtggccgagctggagcggcgcttccctggggcccgggtgccctggctgtctgtgcagacagctgcccccagccccctgcggctgatggacctgctgagcaagaagcaccccctggacaccctcttcctgctggccggccctgacacagtgctgaccccagacttcctgaaccgctgcaggatgcacgccatcagcggctggcaggccttcttccccatgcacttccaggccttccaccctgctgtggccccaccccagggccctggccccccagagctgggccgggacaccggccgctttgaccggcaggccgccagcgaggcctgcttctacaacagcgactatgtggccgcccggggccgcctggccgccgccagcgagcaggaggaggagctgctggagagcctggatgtgtatgagctgttcctgcacttcagcagcctgcacgtgctgcgggctgtggagcccgccctgctgcagcgctaccgggcccagacctgcagcgcccggctgtctgaggacctgtaccaccgctgcctgcagagcgtgctggagggcctgggcagcaggacccagctggccatgctgctgtttgagcaggagcagggcaacagcacctag

SEQ ID NO: 147459 - DNA, 2319 bp, synthetic construct
  misc_feature 1..2319: note = Description of Artificial Sequence: Synthetic coding sequence
  source 1..2319: mol_type = other DNA
atgaggctgagcagcctgctggccctgctgcggcctgccctgcccctcatcctgggcctgagcctgggctgcagcctgagcctgctgcgggtgtcctggatccagggcgagggggaggacccctgtgtggaggccgtgggggagcggggcggcccccagaacccagacagccgggcccggctggaccagagtgatgaggacttcaagccccgcatcgtgccctactacagagaccccaacaagccctacaagaaggtgctgcggacccgctacatccagacagagctgggcagccgggagcggctgctggtggccgtgctgaccagccgggccaccctgagcaccctggccgtggccgtgaacagaacagtggcccaccacttcccccggctgctgtacttcaccggccagagaggagcccgggccccagctggcatgcaggtggtgtcccatggagatgagaggcctgcctggctgatgtctgagaccctgcggcacctgcacacccactttggagctgactatgactggttcttcatcatgcaggatgacacctacgtgcaggccccccggctggccgccctggccggccacctgagcatcaaccaggacctgtacctgggccgggcagaggagttcatcggggccggggagcaggcccgctactgccacggcggcttcggctacctgctgagccgcagcctgctgctgcggctgcggccccacctggatggctgccgcggggacatcctgagcgcccggccagatgagtggctgggccgctgcctgattgacagcctgggcgtgggctgtgtgtcccagcaccagggccagcagtaccgcagctttgagctggccaagaacagagatcctgagaaggagggcagcagcgccttcctgagcgcctttgctgtgcaccctgtgtctgagggcaccctgatgtaccgcctgcacaagcgcttcagcgccctggagctggagcgggcctacagcgagattgagcagctgcaggcccagatccggaacctgactgtgctgaccccagagggggaggccggcctgtcctggcctgtgggcctgcctgcccccttcaccccccacagcagatttgaggtgctgggctgggactacttcacagagcagcacaccttcagctgtgctgatggagcccccaagtgccccctgcagggcgccagcagagcagatgtgggagatgccctggagacagccctggagcagctgaacagacgctaccagccccggctgcgcttccagaagcagaggctgctgaatggctaccgccgctttgatcctgcccggggcatggagtacaccctggacctgctgctggagtgtgtgacccagaggggccacagaagagccctggcccggcgggtgtccctgctgcggcccctgagccgggtggagatcctgcccatgccctacgtgacagaggccaccagggtgcagctggtgctgcccctgctggtggccgaggccgccgccgccccagccttcctggaggcctttgctgccaacgtgctggagccccgggagcacgccctgctgaccctgctgctggtgtatggcccccgggagggcggccgcggggccccagaccccttcctgggcgtgaaggctgctgctgctgagctggagcggcgctacccaggcacccggctggcctggctggccgtgcgggcagaggcccccagccaggtgcggctgatggatgtggtgtccaagaagcaccctgtggacaccctcttcttcctgaccaccgtgtggaccaggcctggccctgaggtgctgaaccgctgcaggatgaatgccatcagcggctggcaggccttcttccctgtgcacttccaggagttcaacccagccctgagcccccagaggagccccccaggccccccaggggccggccctgacccccccagccccccaggagctgaccccagcagaggagcccccatcggcggccgctttgaccggcaggccagcgctgagggctgcttctacaatgctgactacctggccgcccgggcccggctggccggggagctggccggccaggaggaggaggaggccctggagggcctggaggtgatggatgtgttcctgcgcttcagcggcctgcacctgttccgggctgtggagcccggcctggtgcagaagttcagcctgcgggactgcagcccccggctgtctgaggagctgtaccaccgctgccgcctgagcaacctggagggcctgggcggccgggcccagctggccatggccctgtttgagcaggagcaggccaacagcacctag

SEQ ID NO: 147460 - DNA, 2004 bp, synthetic construct
  misc_feature 1..2004: note = Description of Artificial Sequence: Synthetic coding sequence
  source 1..2004: mol_type = other DNA
atgaggctgagcagcctgctggccctgctgcggcctgccctgcccctcatcctgggcctgagcctgggctgcagcctgagcctgctgcgggtgtcctggatccagggcgagggggaggacccctgtgtggaggccgtgggggagcggggcggcccccagaacccagacagccgggcccggctggaccagagtgatgaggacttcaagccccgcatcgtgccctactacagagaccccaacaagccctacaagaaggtgctgcggacccgctacatccagacagagctgggcagccgggagcggctgctggtggccgtgctgaccagccgggccaccctgagcaccctggccgtggccgtgaacagaacagtggcccaccacttcccccggctgctgtacttcaccggccagagaggagcccgggccccagctggcatgcaggtggtgtcccatggagatgagaggcctgcctggctgatgtctgagaccctgcggcacctgcacacccactttggagctgactatgactggttcttcatcatgcaggatgacacctacgtgcaggccccccggctggccgccctggccggccacctgagcatcaaccaggacctgtacctgggccgggcagaggagttcatcggggccggggagcaggcccgctactgccacggcggcttcggctacctgctgagccgcagcctgctgctgcggctgcggccccacctggatggctgccgcggggacatcctgagcgcccggccagatgagtggctgggccgctgcctgattgacagcctgggcgtgggctgtgtgtcccagcaccagggccagcagtaccgcagctttgagctggccaagaacagagatcctgagaaggagggcagcagcgccttcctgagcgcctttgctgtgcaccctgtgtctgagggcaccctgatgtaccgcctgcacaagcgcttcagcgccctggagctggagcgggcctacagcgagattgagcagctgcaggcccagatccggaacctgactgtgctgaccccagagggggaggccggcctgtcctggcctgtgggcctgcctgcccccttcaccccccacagcagatttgaggtgctgggctgggactacttcacagagcagcacaccttcagctgtgctgatggagcccccaagtgccccctgcagggcgccagcagagcagatgtgggagatgccctggagacagccctggagcagctgaacagacgctaccagccccggctgcgcttccagaagcagaggctgctgaatggctaccgccgctttgatcctgcccggggcatggagtacaccctggacctgctgctggagtgtgtgacccagaggggccacagaagagccctggcccggcgggtgtccctgctgcggcccctgagccgggtggagatcctgcccatgccctacgtgacagaggccaccagggtgcagctggtgctgcccctgctggtggccgaggccgccgccgccccagccttcctggaggcctttgctgccaacgtgctggagccccgggagcacgccctgctgaccctgctgctggtgtatggcccccgggagggcggccgcggggccccagaccccttcctgggcgtgaaggctgctgctgctgagctggagcggcgctacccaggcacccggctggcctggctggccgtgcgggcagaggcccccagccaggtgcggctgatggatgtggtgtccaagaagcaccctgtggacaccctcttcttcctgaccaccgtgtggaccaggcctggccctgaggtgctgaaccgctgcaggatgaatgccatcagcggctggcaggccttcttccctgtgcacttccaggagttcaacccagccctgagcccccagaggagccccccacccaacctgatcaccttccccctgagcgccagcgcccctggccgggcccggcaggacggcggccagatcgagaactgctgctgcatcttctag

SEQ ID NO: 147461 - DNA, 6969 bp, synthetic construct
  misc_feature 1..6969: note = Description of Artificial Sequence: Synthetic coding sequence
  source 1..6969: mol_type = other DNA
atgcagagcggccccaggcctcccctgcctgcccctggcctggccctggccctgaccctgaccatgctggcccggctggccagcgctgccagcttctttggagagaaccacctggaggtgcctgtggccacagccctgacagacatcgacctgcagctgcagttcagcaccagccagcctgaggccctgctgctgctggccgccggccctgctgaccacctgctgctgcagctgtacagcggccgcctgcaggtgcggctggtgctgggccaggaggagctgcggctgcagaccccagctgagaccctgctgagtgacagcatcccccacacagtggtgctgactgtggtggagggctgggccaccctgtctgtggatggcttcctgaatgccagcagcgctgtgcctggggcccccctggaggtgccctacggcctgtttgtgggcggcaccggcaccctgggcctgccctacctgcggggcaccagccggcccctgcggggctgcctgcacgccgccaccctgaatggccgcagcctgctgcggcccctgaccccagatgtgcatgagggctgtgccgaggagttcagcgccagtgatgatgtggccctgggcttcagcggcccccacagcctggccgccttccctgcctggggcacccaggatgagggcaccctggagttcaccctgaccacccagagccggcaggcccccctggccttccaggccggcggccggcggggggacttcatctacgtggacatctttgagggccacctgcgggctgtggtggagaagggccagggcaccgtgctgctgcacaacagcgtgcctgtggctgatggccagccccatgaggtgtctgtgcacatcaatgcccaccggctggagatctctgtggaccagtaccccacccacaccagcaacagaggagtgctgagctacctggagccccggggcagcctgctgctgggcggcctggatgctgaggccagccgccacctgcaggagcaccggctgggcctgaccccagaggccaccaatgccagcctgctgggctgcatggaggacctgtctgtgaatggccagaggcggggcctgcgggaggccctgctgaccaggaacatggccgccggctgccgcctggaggaggaggagtatgaagatgatgcctacggccactatgaggccttcagcaccctggcccctgaggcctggccagccatggagctgcctgagccctgtgtgcctgagcccggcctgccccctgtgtttgccaacttcacccagctgctgaccatcagccccctggtggtggccgagggcggcacagcctggctggagtggaggcatgtgcagcccaccctggacctgatggaggccgagctgaggaagagccaggtgctcttctctgtgaccaggggggcccggcacggggagctggagctggacatccctggggcccaggccaggaagatgttcaccctgctggatgtggtgaacaggaaggcccgcttcatccatgatggcagcgaggacaccagtgaccagctggtgctggaggtgtctgtgacagcccgggtgcccatgcccagctgcctgcggcggggccagacctacctgctgcccatccaggtgaaccctgtgaatgaccccccccacatcatcttcccccacggcagcctgatggtgatcctggagcacacccagaagcccctgggccctgaggtgttccaggcctatgaccctgattctgcctgtgagggcctgaccttccaggtgctgggcaccagcagcggcctgcctgtggagcggcgggaccagcctggagagcccgccacagagttcagctgccgggagctggaggccggcagcctggtgtatgtgcaccggggcggccctgcccaggacctgaccttccgggtgtctgatggcctgcaggccagccccccagccaccctgaaggtggtggccatccggcctgccatccagatccacaggagcacaggcctgcggctggcccagggcagcgccatgcccatcctgcctgccaacctgtctgtggagaccaatgctgtgggccaggatgtgtctgtgctcttccgggtgactggagccctgcagtttggagagctgcagaagcagggcgctgggggcgtggagggcgctgagtggtgggccacccaggccttccaccagagagatgtggagcagggccgggtgcgctacctgagcacagacccccagcaccacgcctatgacacagtggagaacctggccctggaggtgcaggtgggccaggagatcctgagcaacctgtccttccctgtgaccatccagagggccaccgtgtggatgctgcggctggagcccctgcacacccagaacacccagcaggagaccctgaccacagcccacctggaggccaccctggaggaggccggccccagcccccccaccttccactatgaggtggtgcaggcccccaggaaaggaaacctgcagctgcagggcacccggctgagtgatggccagggcttcacccaggatgacatccaggccggccgggtgacctatggagccacagcccgggccagcgaggccgtggaggacaccttccgcttccgggtgacagccccaccctacttcagccccctgtacaccttccccatccacatcggcggggaccctgatgcccctgtgctgaccaacgtgctgctggtggtgcctgagggcggggagggcgtgctgtctgctgaccacctgtttgtgaagagcctgaacagcgccagctacctgtatgaggtgatggagcggcccaggcatggccgcctggcctggaggggcacccaggacaagaccaccatggtgaccagcttcaccaatgaagacctgctgcggggccgcctggtgtaccagcatgatgattctgagaccacagaagatgacatcccctttgtggccacccggcagggcgagagcagcggggacatggcctgggaggaggtgcggggcgtcttccgggtggccatccagcctgtgaatgaccacgcccctgtgcagaccatcagccgcatcttccacgtggcccggggcggccggcggctgctgaccacagatgatgtggccttcagtgatgctgacagcggctttgctgatgcccagctggtgctgaccaggaaggacctgctgtttggcagcatcgtggccgtggatgagcccacccggcccatctaccgcttcacccaggaggacctgaggaagagaagagtgctgtttgtgcacagcggggctgaccggggctggatccagctgcaggtgtctgatggccagcaccaggccacagccctgctggaggtgcaggccagcgagccctacctgcgggtggccaacggcagcagcctggtggtgccccagggcggccagggcaccatcgacacagctgtgctgcacctggacaccaacctggacatccgctctggagatgaggtgcactaccacgtgacagctggcccccgctggggccagctggtgcgggccggccagcctgccacagccttcagccagcaggacctgctggatggagctgtgctgtacagccacaacggcagcctgagcccccgggacaccatggccttctctgtggaggccggccctgtgcacacagatgccaccctgcaggtgaccatcgccctggagggccccctggcccccctgaagctggtgcgccacaagaagatctacgtgttccagggcgaggccgctgagatccggcgggaccagctggaggccgcccaggaggccgtgcccccagctgacatcgtgttttctgtgaagagccccccatctgctggctacctggtgatggtgtccagaggagccctggctgatgagccccccagcctggaccctgtgcagagcttcagccaggaggccgtggacaccggccgggtgctgtacctgcacagcaggcctgaggcctggagcgatgccttcagcctggatgtggccagcggcctgggcgcccccctggagggcgtgctggtggagctggaggtgctgcctgctgccatccccctggaggcccagaacttctctgtgcctgagggcggcagcctgaccctggccccacccctgctgcgggtgtctggcccctacttccccaccctgctgggcctgagcctgcaggtgctggagcccccccagcacggggccctgcagaaggaggatggcccccaggcccggaccctgagcgccttctcctggaggatggtggaggagcagctgatccgctacgtgcatgatggcagcgagaccctgacagacagctttgtgctgatggccaatgccagcgagatggaccggcagagccaccctgtggccttcaccgtgacagtgctgcctgtgaatgaccagccccccatcctgaccaccaacacaggcctgcagatgtgggagggcgccacagcccccatcccagctgaggccctgcggagcacagatggagacagcggcagcgaggacctggtgtacaccatcgagcagcccagcaatggccgggtggtgctgcggggggcccctggaacagaggtgcgctccttcacccaggcccagctggatggcggcctggtgctcttcagccaccggggcaccctggatggcggcttccgcttccggctgagtgatggagagcacaccagccctggccacttcttccgggtgacagcccagaagcaggtgctgctgagcctgaagggcagccagaccctgactgtgtgccccggctctgtgcagcccctgagcagccagaccctgcgggccagcagcagcgctggaacagacccccagctgctgctgtacagagtggtgcggggcccccagctgggccgcctcttccacgcccagcaggacagcactggagaggccctggtgaacttcacccaggccgaggtgtatgccggcaacatcctgtatgagcacgagatgcctcctgagcccttctgggaggcccatgacaccctggagctgcagctgagcagccccccagccagagatgtggccgccaccctggccgtggccgtgtcctttgaggccgcctgcccccagaggcccagccacctgtggaagaacaagggcctgtgggtgcctgagggccagagggcccgcatcaccgtggccgccctggatgccagcaacctgctggcctctgtgcccagcccccagaggagtgaacatgatgtgctcttccaggtgacccagttccccagccggggccagctgctggtgtctgaggagcccctgcatgctggccagccccacttcctgcagagccagctggccgccggccagctggtgtatgcccacggcggcggcggcacccagcaggacggcttccacttccgggcccacctgcagggccctgctggggcctctgtggccggcccccagaccagcgaggcctttgccatcaccgtgagagatgtgaatgaaagaccaccccagccccaggcctctgtgcccctgcggctgacccggggcagccgggcccccatcagccgggcccagctgtctgtggtggaccctgattctgcccctggagaaattgaatatgaggtgcagagggccccccacaacggcttcctgagcctggtgggcggcggcctgggccctgtgacccgcttcacccaggctgatgtggacagcggccgcctggcctttgtggccaacggcagctctgtggccggcatcttccagctgtccatgtctgatggagccagcccccccctgcccatgagcctggccgtggacatcctgcccagcgccatcgaggtgcagctgcgggcccccctggaggtgccccaggccctgggccgcagcagcctgagccagcagcagctgcgggtggtgtctgaccgggaggagcctgaggccgcctaccgcctcatccagggcccccagtatggccacctgctggtgggcggccggcccaccagcgccttcagccagttccagattgaccagggcgaggtggtgtttgccttcaccaacttcagcagcagccatgaccacttccgggtgctggccctggcccggggcgtgaatgccagcgctgtggtgaatgtgacagtgcgggccctgctgcacgtgtgggccggcggcccctggccccagggcgccaccctgcggctggaccccaccgtgctggatgctggggagctggccaacagaactggatctgtgccccgcttccggctgctggagggccccaggcatggccgggtggtgcgggtgccccgggccaggacagagcccggcggcagccagctggtggagcagttcacccagcaggacctggaggatggccgcctgggcctggaggtgggccggcctgagggccgggcccctggccctgctggggacagcctgaccctggagctgtgggcccagggcgtgcccccagctgtggccagcctggactttgccacagagccctacaatgctgcccggccctacagcgtggccctgctgtctgtgcctgaggccgccaggacagaggccggcaagccagagagcagcacccccactggagagcccggccccatggccagcagccctgagcctgctgtggccaagggcggcttcctgtccttcctggaggccaacatgttcagcgtcatcatccccatgtgcctggtgctgctgctgctggccctgatcctgcccctgctcttctacctgaggaagaggaacaagacaggcaagcatgatgtgcaggtgctgacagccaagcccagaaatggcctggccggggacacagagaccttcaggaaggtggagcccggccaggccatccccctgacagctgtgcccggccagggccccccacctgggggccagcctgaccctgagctgctgcagttctgcaggacccccaacccagccctgaagaatggccagtactgggtgtag

SEQ ID NO: 147462 - DNA, 984 bp, synthetic construct
  misc_feature 1..984: note = Description of Artificial Sequence: Synthetic coding sequence
  source 1..984: mol_type = other DNA
gagcagcaccgggaggagcctgaggccgcctaccgcctcatccagggcccccagtatggccacctgctggtgggcggccggcccaccagcgccttcagccagttccagattgaccagggcgaggtggtgtttgccttcaccaacttcagcagcagccatgaccacttccgggtgctggccctggcccggggcgtgaatgccagcgctgtggtgaatgtgacagtgcgggccctgctgcacgtgtgggccggcggcccctggccccagggcgccaccctgcggctggaccccaccgtgctggatgctggggagctggccaacagaactggatctgtgccccgcttccggctgctggagggccccaggcatggccgggtggtgcgggtgccccgggccaggacagagcccggcggcagccagctggtggagcagttcacccagcaggacctggaggatggccgcctgggcctggaggtgggccggcctgagggccgggcccctggccctgctggggacagcctgaccctggagctgtgggcccagggcgtgcccccagctgtggccagcctggactttgccacagagccctacaatgctgcccggccctacagcgtggccctgctgtctgtgcctgaggccgccaggacagaggccggcaagccagagagcagcacccccactggagagcccggccccatggccagcagccctgagcctgctgtggccaagggcggcttcctgtccttcctggaggccaacatgttcagcgtcatcatccccatgtgcctggtgctgctgctgctggccctgatcctgcccctgctcttctacctgaggaagaggaacaagacaggcaagcatgatgtgcaggtgctgacagccaagcccagaaatggcctggccggggacacagagaccttcaggaaggtggagcccggccaggccatccccctgacagctgtgcccggccagggccccccatag

SEQ ID NO: 147463 - DNA, 2409 bp, synthetic construct
  misc_feature 1..2409: note = Description of Artificial Sequence: Synthetic coding sequence
  source 1..2409: mol_type = other DNA
atggccgcccggggccggcgggcctggctgtctgtgctgctgggcctggtgctgggctttgtgctggccagccggctggtgctgccccgggccagcgagctgaagagagctggccccaggagaagagccagccctgagggctgccgcagcggccaggccgccgccagccaggccggcggggcccggggagatgcccggggggcccagctgtggcccccaggcagtgaccctgatggcggcccccgggacaggaacttcctgtttgtgggcgtgatgacagcccagaagtacctgcagaccagggctgtggccgcctaccgcacctggagcaagaccatccctgggaaggtgcagttcttcagcagcgagggcagtgacacctctgtgcccatccctgtggtgcccctgcggggcgtggatgacagctacccaccccagaagaagagcttcatgatgctgaagtacatgcatgaccactacctggacaagtatgagtggttcatgagagcagatgatgatgtgtacatcaagggggaccggctggagaacttcctgcggagcctgaacagcagcgagcccctcttcctgggccagacaggcctgggcaccacagaggagatgggcaagctggccctggagcccggggagaacttctgcatgggcggccctggggtcatcatgagccgggaggtgctgcggaggatggtgccccacatcggcaagtgcctgcgggagatgtacaccacccatgaagatgtggaggtgggccgctgtgtgagaagatttgctggggtgcagtgtgtgtggagctatgagatgcagcagctgttctatgaaaattatgagcagaacaagaagggctacatccgggacctgcacaacagcaagatccaccaggccatcaccctgcaccccaacaagaaccccccctaccagtaccgcctgcacagctacatgctgagcaggaagatcagcgagctgcggcacaggaccatccagctgcaccgggagatcgtgctgatgagcaagtacagcaacacagagatccacaaggaggacctgcagctgggcatccccccatccttcatgaggttccagccccggcagcgggaggagatcctggagtgggagttcctgaccgggaagtacctgtacagcgctgtggatggccagcccccccggcggggcatggattctgcccagcgggaggccctggatgacatcgtgatgcaggtgatggagatgatcaatgccaatgccaagacccggggccgcatcatcgacttcaaggagatccagtatggctacagaagagtgaaccccatgtatggagctgagtacatcctggacctgctgctgctgtacaagaagcacaagggcaagaagatgacagtgcctgtgagaagacatgcctacctgcagcagaccttcagcaagatccagtttgtggagcacgaggagctggatgcccaggagctggccaagaggatcaaccaggagagcggcagcctgtccttcctgagcaacagcctgaagaagctggtgcccttccagctgcccggcagcaagtctgagcacaaggagcccaaggacaagaagatcaacatcctgatccccctgagcggccgctttgacatgtttgtgcgcttcatgggcaactttgagaagacctgcctgatccccaaccagaatgtgaagctggtggtgctgctcttcaacagcgacagcaacccagacaaggccaagcaggtggagctgatgagggactaccgcatcaagtaccccaaggctgacatgcagatcctgcctgtgtctggagagttcagccgggccctggccctggaggtgggcagcagccagttcaacaatgaaagcctgctcttcttctgtgatgtggacctggtgttcaccacagagttcctgcagcgctgccgggccaacacagtgctgggccagcagatctacttccccatcatcttcagccagtatgaccccaagatcgtgtacagcggcaaggtgcccagcgacaaccactttgccttcacccagaagacaggcttctggagaaattatggcttcggcatcacctgcatctacaagggggacctggtgcgggtgggcggctttgatgtgtccatccagggctggggcctggaggatgtggacctcttcaacaaggtggtgcaggccggcctgaagaccttccgcagccaggaggtgggcgtggtgcacgtgcaccaccctgtgttctgtgaccccaacctggaccccaagcagtacaagatgtgcctgggcagcaaggccagcacctacggcagcacccagcagctggccgagatgtggctggagaagaatgaccccagctacagcaagagcagcaacaacaacggctctgtgaggacagcctag

SEQ ID NO: 147464 - DNA, 2649 bp, synthetic construct
  misc_feature 1..2649: note = Description of Artificial Sequence: Synthetic coding sequence
  source 1..2649: mol_type = other DNA
atggctgtgcgcagccggcggccctggatgtctgtggccctgggcctggtgctgggcttcaccgctgcctcctggctgattgccccccgggtggccgagctgtctgagaggaagagaagaggcagcagcctgtgcagctactacggccgctctgctgctggccccagggctggggcccagcagcccctgccccagccccagagccggccccggcaggagcagagccccccaccagcccggcaggacctgcagggcccccccctgcctgaggccgcccctggcatcaccagcttccgcagcagcccctggcagcagcccccacccctgcagcagaggagaagaggccgggagcctgagggcgccaccggcctgcccggggccccagctgctgagggggagcctgaggaggaggatggaggagctgctggccagaggagagatggccggcccggcagcagccacaatggaagtggagatggaggagctgctgcccccagcgcccggccccgggacttcctgtatgtgggcgtgatgacagcccagaagtacctgggcagccgggccctggccgcccagaggacctgggcccgcttcatccctggccgggtggagttcttcagcagccagcagcccccaaatgccggccagcccccaccacccctgcccgtcatcgccctgcccggggtggatgacagctacccaccccagaagaagagcttcatgatgatcaagtacatgcatgaccactacctggacaagtatgagtggttcatgagagcagatgatgatgtgtacatcaagggggacaagctggaggagttcctgcggagcctgaacagcagcaagcccctgtacctgggccagacaggcctgggcaacatcgaggagctgggcaagctgggcctggagcccggggagaacttctgcatgggcggccctggcatgatcttcagccgggaggtgctgcggaggatggtgccccacatcggagaatgtctgcgggagatgtacaccacccatgaagatgtggaggtgggccgctgtgtgagaagatttggaggcacccagtgtgtgtggagctatgagatgcagcagctgttccatgaaaattatgagcacaacaggaagggctacatccaggacctgcacaacagcaagatccatgctgccatcaccctgcaccccaacaagaggcctgcctaccagtaccgcctgcacaactacatgctgagcaggaagatcagcgagctgcgctaccgcaccatccagctgcaccgggagagcgccctgatgagcaagctgagcaacacagaggtgtccaaggaggaccagcagctgggcgtcatccccagcttcaaccacttccagccccgggagagaaatgaagtcatcgagtgggagttcctgaccgggaagctgctgtacagcgctgctgagaaccagcccccccggcagagcctgagcagcatcctgaggacagccctggatgacacagtgctgcaggtgatggagatgatcaatgaaaatgccaagagccggggccgcctgattgacttcaaggagatccagtatggctacagaagagtgaaccccatgcatggagtggagtacatcctggacctgctgctgctgtacaagaggcacaagggcaggaagctgactgtgcctgtgagaagacatgcctacctgcagcagctgttcagcaagcccttcttccgggagacagaggagctggatgtgaacagcctggtggagagcatcaacagcgagacccagagcttctccttcatcagcaacagcctgaagatcctgagcagcttccagggcgccaaggagatgggcggccacaatgagaagaaggtgcacatcctggtgcccctcatcggccgctatgacatcttcctgcgcttcatggagaactttgagaacatgtgcctgatccccaagcagaatgtgaagctggtgatcatcctcttcagccgggacagcggccaggacagcagcaagcacatcgagctgatcaagggctaccagaacaagtaccccaaggccgagatgaccctcatccccatgaagggggagttcagccggggcctgggcctggagatggccagcgcccagtttgacaatgacaccctgctgctcttctgtgatgtggacctgatcttccgggaggacttcctgcagcgctgccgggacaacaccatccagggccagcaggtgtactaccccatcatcttcagccagtatgaccccaaggtgaccaacggcggcaaccccccaacagatgactacttcatcttcagcaagaagacaggcttctggagggactatggctacggcatcacctgcatctacaagagtgacctgctgggcgccggcggctttgacaccagcatccagggctggggcctggaggatgtggacctgtacaacaaggtgatcctgagcggcctgcggcccttccgcagccaggaggtgggcgtggtgcacatcttccaccctgtgcactgtgaccccaacctggaccccaagcagtacaagatgtgcctgggcagcaaggccagcacctttgccagcaccatgcagctggccgagctgtggctggagaagcacctgggcgtgcgctacaacagaaccctgtcctag

SEQ ID NO: 147465 - DNA, 2868 bp, synthetic construct
  misc_feature 1..2868: note = Description of Artificial Sequence: Synthetic coding sequence
  source 1..2868: mol_type = other DNA
atgcccagcctgcctgcccccccagcccccctgctgctgctgggcctgctgctgctgggcagcaggcctgcccggggagctggccctgagccccctgtgctgcccatccgctctgagaaggagcccctgcctgtgagaggagctgctggctgcacctttggaggcaaggtgtatgccctggatgagacctggcacccagacctgggggagcccttcggcgtgatgagatgtgtgctgtgtgcctgtgaggccccccagtggggccgccgcacccggggccctggccgggtgtcctgcaagaacatcaagccagaatgtcccaccccagcctgtggccagccccggcagctgcccggccactgctgccagacctgcccccaggagaggagcagcagcgagcggcagcccagcggcctgagctttgagtacccccgggaccctgagcacaggagctacagcgacagaggagagcccggggctgaggagcgggcccggggagatggccacacagactttgtggccctgctgaccggccccaggagccaggccgtggcccgggcccgggtgtccctgctgcggagcagcctgcgcttcagcatctcctacagaaggctggaccggcccacccgcatccgcttcagtgacagcaatggatctgtgctgtttgagcaccctgctgcccccacccaggacggcctggtgtgtggggtgtggagggctgtgccccggctgagcctgcggctgctgcgggcagagcagctgcacgtggccctggtgaccctgacccaccccagcggggaggtgtggggccccctcatccgccaccgggccctggccgctgagaccttcagcgccatcctgaccctggagggccccccccagcagggcgtgggcggcatcaccctgctgaccctgagtgacacagaggacagcctgcacttcctgctgctcttccggggcctgctggagcccaggtctgggggcctgacccaggtgcccctgcggctgcagatcctgcaccagggccagctgctgcgggagctgcaggccaacgtgtctgcccaggagcccggctttgctgaggtgctgcccaacctgactgtgcaggagatggactggctggtgctgggggagctgcagatggccctggagtgggccggccggcccggcctgcgcatcagcggccacatcgccgccaggaagagctgtgatgtgctgcagagcgtgctgtgtggggctgatgccctgatccctgtgcagacaggagctgctggcagcgccagcctgaccctgctgggcaatggcagcctcatctaccaggtgcaggtggtgggcaccagcagcgaggtggtggccatgaccctggagaccaagccccagaggcgggaccagaggacagtgctgtgccacatggccggcctgcagcccggcggccacacagctgtgggcatctgccccggcctgggcgcccggggggcccacatgctgctgcagaatgaactcttcctgaatgtgggcaccaaggacttcccagatggagagctgcggggccacgtggccgccctgccctactgcggccacagcgcccggcatgacaccctgcctgtgcccctggccggggccctggtgctgccccctgtgaagagccaggccgccggccacgcctggctgagcctggacacccactgccacctgcactatgaggtgctgctggccggcctgggcggcagcgagcagggcaccgtgacagcccacctgctgggccccccaggcaccccaggcccccggcggctgctgaagggcttctacggcagcgaggcccagggcgtggtgaaggacctggagcctgagctgctgcggcacctggccaagggcatggccagcctgatgatcaccaccaagggcagccccagaggagagctgcggggccaggtgcacatcgccaaccagtgtgaggtgggcggcctgcggctggaggccgccggggctgagggcgtgcgggccctgggcgccccagacacagccagcgctgcccctcctgtggtgcccggcctgcctgccctggccccagccaagccaggcggccctggccggccccgggaccccaacacctgcttctttgagggccagcagaggccccacggggcccgctgggcccccaactatgaccccctgtgcagcctgtgcacctgccagaggagaactgtcatctgtgaccctgtggtgtgccccccacccagctgcccccaccctgtgcaggccccagaccagtgctgccctgtgtgcccagagaagcaggatgtgcgggacctgcccggcctgcccaggagccgggaccccggggagggctgctactttgatggagaccgctcctggagggctgctggcacccgctggcaccctgtggtgccccccttcggcctcatcaagtgtgctgtgtgcacctgcaagggcggcaccggggaggtgcactgtgagaaggtgcagtgcccccggctggcctgtgcccagcctgtgcgggtgaaccccacagactgctgcaagcagtgccctgtgggcagcggggcccacccccagctgggggaccccatgcaggctgatggcccccggggctgccgctttgctggccagtggttccctgagagccagagctggcaccccagcgtgcccccatttggagagatgagctgcatcacctgccgctgtggggccggcgtgccccactgtgaaagagatgactgcagcctgcccctgagctgtggcagcggcaaggagagccgctgctgcagccgctgcacagcccaccggcggcctgcccctgagaccaggacagatcctgagctggagaaggaggccgagggcagctag

SEQ ID NO: 147466 - DNA, 285 bp, synthetic construct
  misc_feature 1..285: note = Description of Artificial Sequence: Synthetic coding sequence
  source 1..285: mol_type = other DNA
atgcccagcctgcctgcccccccagcccccctgctgctgctgggcctgctgctgctgggcagcaggcctgcccggggagctggccctgagccccctgtgctgcccatccgctctgagaaggagcccctgcctgtgagaggagctgctggctgcacctttggaggcaaggtgtatgccctggatgagacctggcacccagacctgggggagcccttcggcgtgatgagatgtgtgctgtgtgcctgtgaggccaccggcaccctgcggccccgggagatgaagtag

SEQ ID NO: 147467 - DNA, 1512 bp, synthetic construct
  misc_feature 1..1512: note = Description of Artificial Sequence: Synthetic coding sequence
  source 1..1512: mol_type = other DNA
ggggagcacctgagccagaagggcccccacgtgcggccctgcaggaccaaccctggcagcctggaggccccagacagcacccctggggccgccacagcccggaccagcggccagtgcctgagccctggagagtggggcagcggcagccgctgccacctgtcctggcccctggccatcgcccaccacaccctgctgtgcccccaggagcccggctttgctgaggtgctgcccaacctgactgtgcaggagatggactggctggtgctgggggagctgcagatggccctggagtgggccggccggcccggcctgcgcatcagcggccacatcgccgccaggaagagctgtgatgtgctgcagagcgtgctgtgtggggctgatgccctgatccctgtgcagacaggagctgctggcagcgccagcctgaccctgctgggcaatggcagcctcatctaccaggtgcaggtggtgggcaccagcagcgaggtggtggccatgaccctggagaccaagccccagaggcgggaccagaggacagtgctgtgccacatggccggcctgcagcccggcggccacacagctgtgggcatctgccccggcctgggcgcccggggggcccacatgctgctgcagaatgagctgttcctgaatgtgggcaccaaggacttcccagatggagagctgcggggccacgtggccgccctgccctactgcggccacagcgcccggcatgacaccctgcctgtgcccctggccggggccctggtgctgccccctgtgaagagccaggccgccggccacgcctggctgagcctggacacccactgccacctgcactatgaggtgctgctggccggcctgggcggcagcgagcagggcaccgtgacagcccacctgctgggccccccaggcaccccaggcccccggcggctgctgaagggcttctacggcagcgaggcccagggcgtggtgaaggacctggagcctgagctgctgcggcacctggccaagggcatggccagcctgatgatcaccaccaagggcagccccagaggagagctgcggggccaggtgcacatcgccaaccagtgtgaggtgggcggcctgcggctggaggccgccggggctgagggcgtgcgggccctgggcgccccagacacagccagcgctgcccctcctgtggtgcccggcctgcctgccctggccccagccaagccaggcggccctggccggccccgggaccccaacacctgcttctttgagggccagcagaggcctcatggagcccgctgggcccccaactatgaccccctgtgcagcctgtgcacctgccagaggagaactgtcatctgtgaccctgtggtgtgccccccacccagctgcccccaccctgtgcaggccccagaccagtgctgccctgtgtgcccagagaagcaggatgtgcgggacctgcccggcctgcccaggagccgggaccctggagagggcggccactggaggggggccctgtag

SEQ ID NO: 147468 - DNA, 2748 bp, synthetic construct
  misc_feature 1..2748: note = Description of Artificial Sequence: Synthetic coding sequence
  source 1..2748: mol_type = other DNA
atgcccagcctgcctgcccccccagcccccctgctgctgctgggcctgctgctgctgggcagcaggcctgcccggggagctggccctgagccccctgtgctgcccatccgctctgagaaggagcccctgcctgtgagaggagctgctggctgcacctttggaggcaaggtgtatgccctggatgagacctggcacccagacctgggggagcccttcggcgtgatgagatgtgtgctgtgtgcctgtgaggccccccagtggggccgccgcacccggggccctggccgggtgtcctgcaagaacatcaagccagaatgtcccaccccagcctgtggccagccccggcagctgcccggccactgctgccagacctgcccccaggagaggagcagcagcgagcggcagcccagcggcctgagctttgagtacccccgggaccctgagcacaggagctacagcgacagaggagagcccggggctgaggagcgggcccggggagatggccacacagactttgtggccctgctgaccggccccaggagccaggccgtggcccgggcccgggtgtccctgctgcggagcagcctgcgcttcagcatctcctacagaaggctggaccggcccacccgcatccgcttcagtgacagcaatggatctgtgctgtttgagcaccctgctgcccccacccaggacggcctggtgtgtggggtgtggagggctgtgccccggctgagcctgcggctgctgcgggcagagcagctgcacgtggccctggtgaccctgacccaccccagcggggaggtgtggggccccctcatccgccaccgggccctggccgctgagaccttcagcgccatcctgaccctggagggccccccccagcagggcgtgggcggcatcaccctgctgaccctgagtgacacagaggacagcctgcacttcctgctgctcttccggggcctgctggagcccaggtctgggggcctgacccaggtgcccctgcggctgcagatcctgcaccagggccagctgctgcgggagctgcaggccaacgtgtctgcccaggagcccggctttgctgaggtgctgcccaacctgactgtgcaggagatggactggctggtgctgggggagctgcagatggccctggagtgggccggccggcccggcctgcgcatcagcggccacatcgccgccaggaagagctgtgatgtgctgcagagcgtgctgtgtggggctgatgccctgatccctgtgcagacaggagctgctggcagcgccagcctgaccctgctgggcaatggcagcctcatctaccaggccgtgggcatctgccccggcctgggcgcccggggggcccacatgctgctgcagaatgaactcttcctgaatgtgggcaccaaggacttcccagatggagagctgcggggccacgtggccgccctgccctactgcggccacagcgcccggcatgacaccctgcctgtgcccctggccggggccctggtgctgccccctgtgaagagccaggccgccggccacgcctggctgagcctggacacccactgccacctgcactatgaggtgctgctggccggcctgggcggcagcgagcagggcaccgtgacagcccacctgctgggccccccaggcaccccaggcccccggcggctgctgaagggcttctacggcagcgaggcccagggcgtggtgaaggacctggagcctgagctgctgcggcacctggccaagggcatggccagcctgatgatcaccaccaagggcagccccagaggagagctgcggggccaggtgcacatcgccaaccagtgtgaggtgggcggcctgcggctggaggccgccggggctgagggcgtgcgggccctgggcgccccagacacagccagcgctgcccctcctgtggtgcccggcctgcctgccctggccccagccaagccaggcggccctggccggccccgggaccccaacacctgcttctttgagggccagcagaggccccacggggcccgctgggcccccaactatgaccccctgtgcagcctgtgcacctgccagaggagaactgtcatctgtgaccctgtggtgtgccccccacccagctgcccccaccctgtgcaggccccagaccagtgctgccctgtgtgcccagagaagcaggatgtgcgggacctgcccggcctgcccaggagccgggaccccggggagggctgctactttgatggagaccgctcctggagggctgctggcacccgctggcaccctgtggtgccccccttcggcctcatcaagtgtgctgtgtgcacctgcaagggcggcaccggggaggtgcactgtgagaaggtgcagtgcccccggctggcctgtgcccagcctgtgcgggtgaaccccacagactgctgcaagcagtgccctgtgggcagcggggcccacccccagctgggggaccccatgcaggctgatggcccccggggctgccgctttgctggccagtggttccctgagagccagagctggcaccccagcgtgcccccatttggagagatgagctgcatcacctgccgctgtggggccggcgtgccccactgtgaaagagatgactgcagcctgcccctgagctgtggcagcggcaaggagagccgctgctgcagccgctgcacagcccaccggcggcctgcccctgagaccaggacagatcctgagctggagaaggaggccgagggcagctag

SEQ ID NO: 147469 - DNA, 1494 bp, synthetic construct
  misc_feature 1..1494: note = Description of Artificial Sequence: Synthetic coding sequence
  source 1..1494: mol_type = other DNA
atggactggctggtgctgggggagctgcagatggccctggagtgggccggccggcccggcctgcgcatcagcggccacatcgccgccaggaagagctgtgatgtgctgcagagcgtgctgtgtggggctgatgccctgatccctgtgcagacaggagctgctggcagcgccagcctgaccctgctgggcaatggcagcctcatctaccaggtgcaggtggtgggcaccagcagcgaggtggtggccatgaccctggagaccaagccccagaggcgggaccagaggacagtgctgtgccacatggccggcctgcagcccggcggccacacagctgtgggcatctgccccggcctgggcgcccggggggcccacatgctgctgcagaatgaactcttcctgaatgtgggcaccaaggacttcccagatggagagctgcggggccacgtggccgccctgccctactgcggccacagcgcccggcatgacaccctgcctgtgcccctggccggggccctggtgctgccccctgtgaagagccaggccgccggccacgcctggctgagcctggacacccactgccacctgcactatgaggtgctgctggccggcctgggcggcagcgagcagggcaccgtgacagcccacctgctgggccccccaggcaccccaggcccccggcggctgctgaagggcttctacggcagcgaggcccagggcgtggtgaaggacctggagcctgagctgctgcggcacctggccaagggcatggccagcctgatgatcaccaccaagggcagccccagaggagagctgcggggccagaggagaactgtcatctgtgaccctgtggtgtgccccccacccagctgcccccaccctgtgcaggccccagaccagtgctgccctgtgtgcccagagaagcaggatgtgcgggacctgcccggcctgcccaggagccgggaccccggggagggctgctactttgatggagaccgctcctggagggctgctggcacccgctggcaccctgtggtgccccccttcggcctcatcaagtgtgctgtgtgcacctgcaagggcggcaccggggaggtgcactgtgagaaggtgcagtgcccccggctggcctgtgcccagcctgtgcgggtgaaccccacagactgctgcaagcagtgccctgtgggcagcggggcccacccccagctgggggaccccatgcaggctgatggcccccggggctgccgctttgctggccagtggttccctgagagccagagctggcaccccagcgtgcccccatttggagagatgagctgcatcacctgccgctgtggggccggcgtgccccactgtgaaagagatgactgcagcctgcccctgagctgtggcagcggcaaggagagccgctgctgcagccgctgcacagcccaccggcggcctgcccctgagaccaggacagatcctgagctggagaaggaggccgagggcagctag

SEQ ID NO: 147470 - DNA, 3126 bp, synthetic construct
  misc_feature 1..3126: note = Description of Artificial Sequence: Synthetic coding sequence
  source 1..3126: mol_type = other DNA
atggagaacatgttcctgcagagctccatgctgacctgcatcttcctgctgatcagcggcagctgtgagctgtgtgccgaggagaacttcagccgcagctacccctgtgatgagaagaagcagaatgacagcgtgattgctgagtgcagcaacagaaggctgcaggaggtgccccagacagtgggcaagtatgtgacagagctggacctgagtgacaacttcatcacccacatcaccaatgaaagcttccagggcctgcagaacctgaccaagatcaacctgaaccacaaccccaacgtgcagcaccagaatggaaatcctggcatccagagcaatggcctgaacatcacagatggagccttcctgaacctgaagaacctgcgggagctgctgctggaggacaaccagctgccccagatccccagcggcctgcctgagagcctgacagagctgagcctcatccagaacaacatctacaacatcaccaaggagggcatcagccgcctcatcaacctgaagaacctgtacctggcctggaactgctacttcaacaaggtgtgtgagaagaccaacattgaagatggagtgtttgagaccctgaccaacctggagctgctgagcctgtccttcaacagcctgagccacgtgccccccaagctgcccagcagcctgaggaagctgttcctgagcaacacccagatcaagtacatcagcgaggaggacttcaagggcctcatcaacctgaccctgctggacctgagcggcaactgcccccgctgcttcaatgcccccttcccctgtgtgccctgtgatggaggagccagcatcaacatcgacagatttgccttccagaacctgacccagctgcgctacctgaacctgagcagcaccagcctgaggaagatcaatgctgcctggttcaagaacatgccccacctgaaggtgctggacctggagttcaactacctggtgggggagatcgccagcggggccttcctgaccatgctgccccggctggagatcctggacctgtccttcaactacatcaagggcagctacccccagcacatcaacatcagcaggaacttcagcaagctgctgagcctgcgggccctgcacctgcggggctacgtgttccaggagctgcgggaggatgacttccagcccctgatgcagctgcccaacctgagcaccatcaacctgggcatcaacttcatcaagcagattgacttcaagctgttccagaacttcagcaacctggagatcatctacctgtctgaaaatcgcatcagccccctggtgaaggacacccggcagagctatgccaacagcagcagcttccagaggcacatcaggaagaggaggagcacagactttgaatttgacccccacagcaacttctaccacttcacccggcccctcatcaagccccagtgtgccgcctacggcaaggccctggacctgagcctgaacagcatcttcttcatcggccccaaccagtttgagaacctgcctgacatcgcctgcctgaacctgagcgccaacagcaatgcccaggtgctgagcggcacagagttcagcgccatcccccacgtgaagtacctggacctgaccaacaaccggctggactttgacaatgccagcgccctgacagagctgagtgacctggaggtgctggacctgagctacaacagccactacttcagaattgctggggtgacccaccacctggagttcatccagaacttcaccaacctgaaggtgctgaacctgagccacaacaacatctacaccctgacagacaagtacaacctggagagcaagagcctggtggagctggtgttcagcggcaaccggctggacatcctgtggaatgatgatgacaaccgctacatcagcatcttcaagggcctgaagaacctgacccggctggacctgagcctgaaccggctgaagcacatccccaatgaggccttcctgaacctgcctgccagcctgacagagctgcacatcaatgacaacatgctgaagttcttcaactggaccctgctgcagcagttcccccggctggagctgctggacctgcggggcaacaagctgctcttcctgacagacagcctgagtgacttcaccagcagcctgcggaccctgctgctgagccacaaccgcatcagccacctgcccagcggcttcctgtctgaggtgagcagcctgaagcacctggacctgagcagcaacctgctgaagaccatcaacaagagcgccctggagaccaagaccaccaccaagctgtccatgctggagctgcacggcaacccctttgaatgtacctgtgacatcggggacttccgccgctggatggatgagcacctgaatgtgaagatcccccggctggtggatgtgatctgtgccagccctggggaccagaggggcaagagcatcgtgtccctggagctgaccacctgtgtgtctgatgtgacagctgtgatcctcttcttcttcaccttcttcatcaccaccatggtgatgctggccgccctggcccaccacctgttctactgggatgtgtggttcatctacaacgtgtgcctggccaaggtgaagggctaccgcagcctgagcaccagccagaccttctatgatgcctacatctcctatgacaccaaggatgcctctgtgacagactgggtgatcaatgagctgcgctaccacctggaggagagccgggacaagaatgtgctgctgtgcctggaggagcgggactgggaccccggcctggccatcatcgacaacctgatgcagagcatcaaccagagcaagaagacagtgtttgtgctgaccaagaagtatgccaagtcctggaacttcaagacagccttctacctggccctgcagaggctgatggatgagaacatggatgtgatcatcttcatcctgctggagcctgtgctgcagcacagccagtacctgcggctgcggcagaggatctgcaagagcagcatcctgcagtggccagacaaccccaaggccgagggcctcttctggcagaccctgagaaatgtggtgctgacagaaaatgacagccgctacaacaacatgtatgtggacagcatcaagcagtactag

SEQ ID NO: 147471 - DNA, 1377 bp, synthetic construct
  misc_feature 1..1377: note = Description of Artificial Sequence: Synthetic coding sequence
  source 1..1377: mol_type = other DNA
atgaggaagaagtggaagatgggcggcatgaagtacatcttcagcctgctcttcttcctgctgctggagggcggcaagacagagcaggtgaagcacagcgagacctactgcatgttccaggacaagaagtacagagtgggggagcgctggcacccctacctggagccctacggcctggtgtactgtgtgaactgcatctgcagtgaaaatggaaatgtgctgtgcagccgggtgcgctgccccaacgtgcactgcctgagccctgtgcacatcccccacctgtgctgcccccgctgcccagaggacagcctgccccctgtgaacaacaaggtgaccagcaagagctgtgagtacaacggcaccacctaccagcacggggagctgtttgtggccgagggcctcttccagaaccggcagcccaaccagtgcacccagtgcagctgcagcgagggcaatgtgtactgcggcctgaagacctgccccaagctgacctgtgccttccctgtgtctgtgcctgacagctgctgccgggtgtgcagaggagatggagagctgtcctgggagcacagtgatggagacatcttccggcagcctgccaaccgggaggcccggcacagctaccacaggagccactatgaccccccacccagccggcaggccggcggcctgagccgcttccctggggcccggagccacagaggagccctgatggacagccagcaggccagcggcaccatcgtgcagatcgtcatcaacaacaagcacaagcacggccaggtgtgtgtgtccaatggcaagacctacagccacggggagagctggcaccccaacctgcgggcctttggaattgtggagtgtgtgctgtgcacctgcaatgtgaccaagcaggagtgcaagaagatccactgccccaaccgctacccctgcaagtacccccagaagattgatggcaagtgctgcaaggtgtgccctgggaagaaggccaaggaggagctgcccggccagagctttgacaacaagggctacttctgtggggaggagaccatgcctgtgtatgagagcgtcttcatggaggatggagagaccaccaggaagatcgccctggagacagagaggcctccccaggtggaggtgcacgtgtggaccatcaggaagggcatcctgcagcacttccacatcgagaagatcagcaagaggatgtttgaggagctgccccacttcaagctggtgaccaggaccaccctgagccagtggaagatcttcacagaaggagaggcccagatcagccagatgtgcagcagccgggtgtgcaggacagagctggaggacctggtgaaggtgctgtacctggagaggtctgagaagggccactgctag

SEQ ID NO: 147472 - DNA, 1353 bp, synthetic construct
  misc_feature 1..1353: note = Description of Artificial Sequence: Synthetic coding sequence
  source 1..1353: mol_type = other DNA
atgggcggcatgaagtacatcttcagcctgctcttcttcctgctgctggagggcggcaagacagagcaggtgaagcacagcgagacctactgcatgttccaggacaagaagtacagagtgggggagcgctggcacccctacctggagccctacggcctggtgtactgtgtgaactgcatctgcagtgaaaatggaaatgtgctgtgcagccgggtgcgctgccccaacgtgcactgcctgagccctgtgcacatcccccacctgtgctgcccccgctgcccagacagcctgccccctgtgaacaacaaggtgaccagcaagagctgtgagtacaacggcaccacctaccagcacggggagctgtttgtggccgagggcctcttccagaaccggcagcccaaccagtgcacccagtgcagctgcagcgagggcaatgtgtactgcggcctgaagacctgccccaagctgacctgtgccttccctgtgtctgtgcctgacagctgctgccgggtgtgcagaggagatggagagctgtcctgggagcacagtgatggagacatcttccggcagcctgccaaccgggaggcccggcacagctaccacaggagccactatgaccccccacccagccggcaggccggcggcctgagccgcttccctggggcccggagccacagaggagccctgatggacagccagcaggccagcggcaccatcgtgcagatcgtcatcaacaacaagcacaagcacggccaggtgtgtgtgtccaatggcaagacctacagccatggagagagctggcaccccaacctgcgggccttcggcatcgtggagtgtgtgctgtgcacctgcaatgtgaccaagcaggagtgcaagaagatccactgccccaaccgctacccctgcaagtacccccagaagattgatggcaagtgctgcaaggtgtgccctgggaagaaggccaaggagctgcccggccagagctttgacaacaagggctacttctgtggggaggagaccatgcctgtgtatgagagcgtcttcatggaggatggagagaccaccaggaagatcgccctggagacagagaggcctccccaggtggaggtgcacgtgtggaccatcaggaagggcatcctgcagcacttccacatcgagaagatcagcaagaggatgtttgaggagctgccccacttcaagctggtgaccaggaccaccctgagccagtggaagatcttcacagaaggagaggcccagatcagccagatgtgcagcagccgggtgtgcaggacagagctggaggacctggtgaaggtgctgtacctggagaggtctgagaagggccactgctag

SEQ ID NO: 147473 - DNA, 1371 bp, synthetic construct
  misc_feature 1..1371: note = Description of Artificial Sequence: Synthetic coding sequence
  source 1..1371: mol_type = other DNA
atgaggaagaagtggaagatgggcggcatgaagtacatcttcagcctgctcttcttcctgctgctggagggcggcaagacagagcaggtgaagcacagcgagacctactgcatgttccaggacaagaagtacagagtgggggagcgctggcacccctacctggagccctacggcctggtgtactgtgtgaactgcatctgcagtgaaaatggaaatgtgctgtgcagccgggtgcgctgccccaacgtgcactgcctgagccctgtgcacatcccccacctgtgctgcccccgctgcccagacagcctgccccctgtgaacaacaaggtgaccagcaagagctgtgagtacaacggcaccacctaccagcacggggagctgtttgtggccgagggcctcttccagaaccggcagcccaaccagtgcacccagtgcagctgcagcgagggcaatgtgtactgcggcctgaagacctgccccaagctgacctgtgccttccctgtgtctgtgcctgacagctgctgccgggtgtgcagaggagatggagagctgtcctgggagcacagtgatggagacatcttccggcagcctgccaaccgggaggcccggcacagctaccacaggagccactatgaccccccacccagccggcaggccggcggcctgagccgcttccctggggcccggagccacagaggagccctgatggacagccagcaggccagcggcaccatcgtgcagatcgtcatcaacaacaagcacaagcacggccaggtgtgtgtgtccaatggcaagacctacagccatggagagagctggcaccccaacctgcgggccttcggcatcgtggagtgtgtgctgtgcacctgcaatgtgaccaagcaggagtgcaagaagatccactgccccaaccgctacccctgcaagtacccccagaagattgatggcaagtgctgcaaggtgtgccctgggaagaaggccaaggagctgcccggccagagctttgacaacaagggctacttctgtggggaggagaccatgcctgtgtatgagagcgtcttcatggaggatggagagaccaccaggaagatcgccctggagacagagaggcctccccaggtggaggtgcacgtgtggaccatcaggaagggcatcctgcagcacttccacatcgagaagatcagcaagaggatgtttgaggagctgccccacttcaagctggtgaccaggaccaccctgagccagtggaagatcttcacagaaggagaggcccagatcagccagatgtgcagcagccgggtgtgcaggacagagctggaggacctggtgaaggtgctgtacctggagaggtctgagaagggccactgctag

SEQ ID NO: 147474 - DNA, 1134 bp, synthetic construct
  misc_feature 1..1134: note = Description of Artificial Sequence: Synthetic coding sequence
  source 1..1134: mol_type = other DNA
atgaggaagaagtggaagatgggcggcatgaagtacatcttcagcctgctcttcttcctgctgctggagggcggcaagacagagcaggtgaagcacagcgagacctactgcatgttccaggacaagaagtacagagtgggggagcgctggcacccctacctggagccctacggcctggtgtactgtgtgaactgcatctgcagtgaaaatggaaatgtgctgtgcagccgggtgcgctgccccaacgtgcactgcctgagccctgtgcacatcccccacctgtgctgcccccgctgccctggagatggagagctgtcctgggagcacagtgatggagacatcttccggcagcctgccaaccgggaggcccggcacagctaccacaggagccactatgaccccccacccagccggcaggccggcggcctgagccgcttccctggggcccggagccacagaggagccctgatggacagccagcaggccagcggcaccatcgtgcagatcgtcatcaacaacaagcacaagcacggccaggtgtgtgtgtccaatggcaagacctacagccacggggagagctggcaccccaacctgcgggcctttggaattgtggagtgtgtgctgtgcacctgcaatgtgaccaagcaggagtgcaagaagatccactgccccaaccgctacccctgcaagtacccccagaagattgatggcaagtgctgcaaggtgtgccctgggaagaaggccaaggagctgcccggccagagctttgacaacaagggctacttctgtggggaggagaccatgcctgtgtatgaatctgtgttcatggaggatggagagaccaccaggaagatcgccctggagacagagcggcccccccaggtggaggtgcacgtgtggaccatcaggaagggcatcctgcagcacttccacatcgagaagatcagcaagaggatgtttgaggagctgccccacttcaagctggtgaccaggaccaccctgagccagtggaagatcttcacagaaggagaggcccagatcagccagatgtgcagcagccgggtgtgcaggacagagctggaggacctggtgaaggtgctgtacctggagaggtctgagaagggccactgctag

SEQ ID NO: 147475 - DNA, 1374 bp, synthetic construct
  misc_feature 1..1374: note = Description of Artificial Sequence: Synthetic coding sequence
  source 1..1374: mol_type = other DNA
atgaggaagaagtggaagatgggcggcatgaagtacatcttcagcctgctcttcttcctgctgctggagggcggcaagacagagcaggtgaagcacagcgagacctactgcatgttccaggacaagaagtacagagtgggggagcgctggcacccctacctggagccctacggcctggtgtactgtgtgaactgcatctgcagtgaaaatggaaatgtgctgtgcagccgggtgcgctgccccaacgtgcactgcctgagccctgtgcacatcccccacctgtgctgcccccgctgcccagacagcctgccccctgtgaacaacaaggtgaccagcaagagctgtgagtacaacggcaccacctaccagcacggggagctgtttgtggccgagggcctcttccagaaccggcagcccaaccagtgcacccagtgcagctgcagcgagggcaatgtgtactgcggcctgaagacctgccccaagctgacctgtgccttccctgtgtctgtgcctgacagctgctgccgggtgtgcagaggagatggagagctgtcctgggagcacagtgatggagacatcttccggcagcctgccaaccgggaggcccggcacagctaccacaggagccactatgaccccccacccagccggcaggccggcggcctgagccgcttccctggggcccggagccacagaggagccctgatggacagccagcaggccagcggcaccatcgtgcagatcgtcatcaacaacaagcacaagcacggccaggtgtgtgtgtccaatggcaagacctacagccatggagagagctggcaccccaacctgcgggccttcggcatcgtggagtgtgtgctgtgcacctgcaatgtgaccaagcaggagtgcaagaagatccactgccccaaccgctacccctgcaagtacccccagaagattgatggcaagtgctgcaaggtgtgccctgggaagaaggccaaggaggagctgcccggccagagctttgacaacaagggctacttctgtggggaggagaccatgcctgtgtatgaatctgtgttcatggaggatggagagaccaccaggaagatcgccctggagacagagcggcccccccaggtggaggtgcacgtgtggaccatcaggaagggcatcctgcagcacttccacatcgagaagatcagcaagaggatgtttgaggagctgccccacttcaagctggtgaccaggaccaccctgagccagtggaagatcttcacagaaggagaggcccagatcagccagatgtgcagcagccgggtgtgcaggacagagctggaggacctggtgaaggtgctgtacctggagaggtctgagaagggccactgctag

SEQ ID NO: 147476 - DNA, 1137 bp, synthetic construct
  misc_feature 1..1137: note = Description of Artificial Sequence: Synthetic coding sequence
  source 1..1137: mol_type = other DNA
atgaggaagaagtggaagatgggcggcatgaagtacatcttcagcctgctcttcttcctgctgctggagggcggcaagacagagcaggtgaagcacagcgagacctactgcatgttccaggacaagaagtacagagtgggggagcgctggcacccctacctggagccctacggcctggtgtactgtgtgaactgcatctgcagtgaaaatggaaatgtgctgtgcagccgggtgcgctgccccaacgtgcactgcctgagccctgtgcacatcccccacctgtgctgcccccgctgccctggagatggagagctgtcctgggagcacagtgatggagacatcttccggcagcctgccaaccgggaggcccggcacagctaccacaggagccactatgaccccccacccagccggcaggccggcggcctgagccgcttccctggggcccggagccacagaggagccctgatggacagccagcaggccagcggcaccatcgtgcagatcgtcatcaacaacaagcacaagcacggccaggtgtgtgtgtccaatggcaagacctacagccacggggagagctggcaccccaacctgcgggcctttggaattgtggagtgtgtgctgtgcacctgcaatgtgaccaagcaggagtgcaagaagatccactgccccaaccgctacccctgcaagtacccccagaagattgatggcaagtgctgcaaggtgtgccctgggaagaaggccaaggaggagctgcccggccagagctttgacaacaagggctacttctgtggggaggagaccatgcctgtgtatgagagcgtcttcatggaggatggagagaccaccaggaagatcgccctggagacagagaggcctccccaggtggaggtgcacgtgtggaccatcaggaagggcatcctgcagcacttccacatcgagaagatcagcaagaggatgtttgaggagctgccccacttcaagctggtgaccaggaccaccctgagccagtggaagatcttcacagaaggagaggcccagatcagccagatgtgcagcagccgggtgtgcaggacagagctggaggacctggtgaaggtgctgtacctggagaggtctgagaagggccactgctag

SEQ ID NO: 147477 - DNA, 1356 bp, synthetic construct
  misc_feature 1..1356: note = Description of Artificial Sequence: Synthetic coding sequence
  source 1..1356: mol_type = other DNA
atggtgcctgaggtgcgggtgctgagcagcctgctgggcctggccctgctgtggttccccctggacagccacgcccgggcccggccagacatgttctgcctcttccacggcaagcgctacagccctggagagagctggcacccctacctggagccccagggcctgatgtactgcctgcgctgcacctgcagcgagggcgcccacgtgtcctgctaccgcctgcactgcccccctgtgcactgcccccagcctgtgacagagccccagcagtgctgccccaagtgtgtggagccccacacccccagcggcctgcgggccccacccaagagctgccagcacaacggcaccatgtaccagcacggggagatcttcagcgcccacgagctgttccccagccggctgcccaaccagtgtgtgctgtgcagctgcacagagggccagatctactgcggcctgaccacctgcccagagcccggctgcccagcccccctgcccctgcctgacagctgctgccaggcctgcaaggatgaggccagcgagcagagtgatgaagaagattctgtgcagagcctgcacggcgtgcgccacccccaggacccctgcagcagtgatgctggcaggaagaggggccctggcaccccagcccccaccggcctgagcgcccccctgtccttcatccccaggcacttccggcccaagggagctggcagcaccaccgtgaagatcgtgctgaaggagaagcacaagaaggcctgtgtgcacggcggcaagacctacagccatggagaggtgtggcacccagccttccgggccttcggccccctgccctgcatcctgtgcacctgtgaagatggccggcaggactgccagagggtgacctgccccacagagtacccctgccgccaccctgagaaggtggccggcaagtgctgcaagatctgcccagaggacaaggctgaccccggccacagcgagatcagcagcacccgctgccccaaggcccctggccgggtgctggtgcacacctctgtgagccccagcccagacaacctgcggagatttgccctggagcacgaggccagtgacctggtggagatctacctgtggaagctggtgaaggatgaggagacagaggcccagagaggagaggtgcccggcccccggccccacagccagaacctgcccctggacagcgaccaggagagccaggaggcccggctgcctgagcggggcacagccctgcccacagcccgctggccaccccggcgcagcctggagcggctgcccagcccagaccctggagctgagggccacggccagagccggcagagcgaccaggacatcaccaagacctag

SEQ ID NO: 147478 - DNA, 846 bp, synthetic construct
  misc_feature 1..846: note = Description of Artificial Sequence: Synthetic coding sequence
  source 1..846: mol_type = other DNA
atgtaccagcacggggagatcttcagcgcccacgagctgttccccagccggctgcccaaccagtgtgtgctgtgcagctgcacagagggccagatctactgcggcctgaccacctgcccagagcccggctgcccagcccccctgcccctgcctgacagctgctgccaggcctgcaaggccggcagctcctggggcctgctgtgcagcgtgtctgacttccaccccagctgccacctgcagaggcacccccaggacccctgcagcagtgatgctggcaggaagaggggccctggcaccccagcccccaccggcctgagcgcccccctgtccttcatccccaggcacttccggcccaagggagctggcagcaccaccgtgaagatcgtgctgaaggagaagcacaagaaggcctgtgtgcacggcggcaagacctacagccatggagaggtgtggcacccagccttccgggccttcggccccctgccctgcatcctgtgcacctgtgaagatggccggcaggactgccagagggtgacctgccccacagagtacccctgccgccaccctgagaaggtggccggcaagtgctgcaagatctgcccagaggacaaggctgaccccggccacagcgagatcagcagcacccgctgccccaaggcccctggccgggtgctggtgcacacctctgtgagccccagcccagacaacctgcggagatttgccctggagcacgaggccagtgacctggtggagatctacctgtggaagctggtgaagggcgtcttcctggcccagaccctggagctgaaggtgacagccagcccagacaaggtgaccaagacctag

SEQ ID NO: 147479 - DNA, 1290 bp, synthetic construct
  misc_feature 1..1290: note = Description of Artificial Sequence: Synthetic coding sequence
  source 1..1290: mol_type = other DNA
atggtgcctgaggtgcgggtgctgagcagcctgctgggcctggccctgctgtggttccccctggacagccacgcccgggcccggccagacatgttctgcctcttccacggcaagcgctacagccctggagagagctggcacccctacctggagccccagggcctgatgtactgcctgcgctgcacctgcagcgagggcgcccacgtgtcctgctaccgcctgcactgcccccctgtgcactgcccccagcctgtgacagagccccagcagtgctgccccaagtgtgtggagccccacacccccagcggcctgcgggccccacccaagagctgccagcacaacggcaccatgtaccagcacggggagatcttcagcgcccacgagctgttccccagccggctgcccaaccagtgtgtgctgtgcagctgcacagagggccagatctactgcggcctgaccacctgcccagagcccggctgcccagcccccctgcccctgcctgacagctgctgccaggcctgcaaggatgaggccagcgagcagagtgatgaagaagattctgtgcagagcctgcacggcgtgcgccacccccaggacccctgcagcagtgatgctggcaggaagaggggccctggcaccccagcccccaccggcctgagcgcccccctgtccttcatccccaggcacttccggcccaagggagctggcagcaccaccgtgaagatcgtgctgaaggagaagcacaagaaggcctgtgtgcacggcggcaagacctacagccatggagaggtgtggcacccagccttccgggccttcggccccctgccctgcatcctgtgcacctgtgaagatggccggcaggactgccagagggtgacctgccccacagagtacccctgccgccaccctgagaaggtggccggcaagtgctgcaagatctgcccagaggacaaggctgaccccggccacagcgagatcagcagcacccgctgccccaaggcccctggccgggtgctggtgcacacctctgtgagccccagcccagacaacctgcggagatttgccctggagcacgaggccagtgacctggtggagatctacctgtggaagctggtgaagggcatcttccacctgacccagatcaagaaggtgaggaagcaggacttccagaaggaggcccagcacttccggctgctggccggcccccatgagggccactggaatgtgttcctggcccagaccctggagctgaaggtgacagccagcccagacaaggtgaccaagacctag

SEQ ID NO: 147480 - DNA, 840 bp, synthetic construct
  misc_feature 1..840: note = Description of Artificial Sequence: Synthetic coding sequence
  source 1..840: mol_type = other DNA
atgtaccagcacggggagatcttcagcgcccacgagctgttccccagccggctgcccaaccagtgtgtgctgtgcagctgcacagagggccagatctactgcggcctgaccacctgcccagagcccggctgcccagcccccctgcccctgcctgacagctgctgccaggcctgcaaggatgaggccagcgagcagagtgatgaagaagattctgtgcagagcctgcacggcgtgcgccacccccaggacccctgcagcagtgatgctggcaggaagaggggccctggcaccccagcccccaccggcctgagcgcccccctgtccttcatccccaggcacttccggcccaagggagctggcagcaccaccgtgaagatcgtgctgaaggagaagcacaagaaggcctgtgtgcacggcggcaagacctacagccatggagaggtgtggcacccagccttccgggccttcggccccctgccctgcatcctgtgcacctgtgaagatggccggcaggactgccagagggtgacctgccccacagagtacccctgccgccaccctgagaaggtggccggcaagtgctgcaagatctgcccagaggacaaggctgaccccggccacagcgagatcagcagcacccgctgccccaaggcccctggccgggtgctggtgcacacctctgtgagccccagcccagacaacctgcggagatttgccctggagcacgaggccagtgacctggtggagatctacctgtggaagctggtgaaggatgtgttcctggcccagaccctggagctgaaggtgacagccagcccagacaaggtgaccaagacctag

SEQ ID NO: 147481 - DNA, 498 bp, synthetic construct
  misc_feature 1..498: note = Description of Artificial Sequence: Synthetic coding sequence
  source 1..498: mol_type = other DNA
atggagatgttccagggcctgctgctgctgctgctgctgtccatgggcggcacctgggccagcaaggagcccctgcggccccgctgccggcccatcaatgccaccctggccgtggagaaggagggctgccctgtgtgcatcaccgtgaacaccaccatctgtgccggctactgccccaccatgaccagggtgctgcagggcgtgctgcctgccctgccccaggtggtgtgcaactacagagatgtgcgctttgagagcatccggctgcccggctgcccccggggcgtgaaccctgtggtgtcctatgctgtggccctgagctgccagtgtgccctgtgccgccgcagcaccacagactgtggcggccccaaggaccaccccctgacctgtgatgacccccgcttccaggacagcagcagcagcaaggcccccccacccagcctgcccagccccagccggctgcccggccccagcgacacccccatcctgccccagtag

SEQ ID NO: 147482 - DNA, 507 bp, synthetic construct
  misc_feature 1..507: note = Description of Artificial Sequence: Synthetic coding sequence
  source 1..507: mol_type = other DNA
gcccccaggatggagatgttccagggcctgctgctgctgctgctgctgtccatgggcggcacctgggccagcaaggagcccctgcggccccgctgccggcccatcaatgccaccctggccgtggagaaggagggctgccctgtgtgcatcaccgtgaacaccaccatctgtgccggctactgccccaccatgaccagggtgctgcagggcgtgctgcctgccctgccccaggtggtgtgcaactacagagatgtgcgctttgagagcatccggctgcccggctgcccccggggcgtgaaccctgtggtgtcctatgctgtggccctgagctgccagtgtgccctgtgcagaagaagcaccacagactgtggcggccccaaggaccaccccctgacctgtgatgacccccgcttccaggacagcagcagcagcaaggcccccccacccagcctgcccagccccagccggctgcccggccccagcgacacccccatcctgccccagtag

SEQ ID NO: 147483 - DNA, 654 bp, synthetic construct
  misc_feature 1..654: note = Description of Artificial Sequence: Synthetic coding sequence
  source 1..654: mol_type = other DNA
atggcccctggcagcaggaccagcctgctgctggcctttgccctgctgtgcctgccctggctgcaggaggccggggctgtgcagacagtgcccctgagccggctgtttgaccacgccatgctgcaggcccaccgggcccaccagctggccatcgacacctaccaggagtttgaggagacctacatccccaaggaccagaagtacagcttcctgcatgacagccagaccagcttctgcttcagtgacagcatccccacccccagcaacatggaggagacccagcagaagagcaacctggagctgctgcgcatcagcctgctgctgattgaatcctggctggagcctgtgcgcttcctgcgctccatgtttgccaacaacctggtgtatgacaccagtgacagtgatgactaccacctgctgaaggacctggaggagggcatccagaccctgatgggccgcctggaggatggcagcagaagaacaggccagatcctgaagcagacctacagcaagtttgacaccaacagccacaaccatgatgccctgctgaagaactacggcctgctgtactgcttcaggaaggacatggacaaggtggagaccttcctgaggatggtgcagtgccgctctgtggagggcagctgtggcttctag

SEQ ID NO: 147484 - DNA, 771 bp, synthetic construct
  misc_feature 1..771: note = Description of Artificial Sequence: Synthetic coding sequence
  source 1..771: mol_type = other DNA
atggcccctggcagcaggaccagcctgctgctggcctttgccctgctgtgcctgccctggctgcaggaggccggggctgtgcagacagtgcccctgagccggctgtttgaccacgccatgctgcaggcccaccgggcccaccagctggccatcgacacctaccaggagtttgaggagacctacatccccaaggaccagaagtacagcttcctgcatgacagccagaccagcttctgcttcagtgacagcatccccacccccagcaacatggaggagacccagcagaagagcaacctggagctgctgcgcatcagcctgctgctgattgaatcctggctggagcctgtgcgcttcctgcgctccatgtttgccaacaacctggtgtatgacaccagtgacagtgatgactaccacctgctgaaggacctggaggagggcatccagaccctgatgggcgtgcgggtggcccctggggtgaccaaccctggcacccccctggccagccgggccggcggggagaagtactgctgccccctcttcagcagcaaggccctgacccaggagaacagcccctacagcagcttccggctggtgaaccccccaggcctgagcctgcaccctgagggggagggcggcaagtggatcaatgaaagaggccgggagcagtgccccagcgcctggcccctgctgctcttcctgcactttgctgaggccggccggcggcagcccccagactgggccgacccccaggccgacctgcagcaggtgtag

SEQ ID NO: 147485 - DNA, 369 bp, synthetic construct
  misc_feature 1..369: note = Description of Artificial Sequence: Synthetic coding sequence
  source 1..369: mol_type = other DNA
atggcccctggcagcaggaccagcctgctgctggcctttgccctgctgtgcctgccctggctgcaggaggccggggctgtgcagacagtgcccctgagccggctgtttgaccacgccatgctgcaggcccaccgggcccaccagctggccatcgacacctaccaggagttccggctggaggatggcagcagaagaacaggccagatcctgaagcagacctacagcaagtttgacaccaacagccacaaccatgatgccctgctgaagaactacggcctgctgtactgcttcaggaaggacatggacaaggtggagaccttcctgaggatggtgcagtgccgctctgtggagggcagctgtggcttctag

SEQ ID NO: 147486 - DNA, 552 bp, synthetic construct
  misc_feature 1..552: note = Description of Artificial Sequence: Synthetic coding sequence
  source 1..552: mol_type = other DNA
atggcccctggcagcaggaccagcctgctgctggcctttgccctgctgtgcctgccctggctgcaggaggccgagacctacatccccaaggaccagaagtacagcttcctgcatgacagccagaccagcttctgcttcagtgacagcatccccacccccagcaacatggaggagacccagcagaagagcaacctggagctgctgcgcatcagcctgctgctgattgaatcctggctggagcctgtgcgcttcctgcgctccatgtttgccaacaacctggtgtatgacaccagtgacagtgatgactaccacctgctgaaggacctggaggagggcatccagaccctgatgggccgcctggaggatggcagcagaagaacaggccagatcctgaagcagacctacagcaagtttgacaccaacagccacaaccatgatgccctgctgaagaactacggcctgctgtactgcttcaggaaggacatggacaaggtggagaccttcctgaggatggtgcagtgccgctctgtggagggcagctgtggcttctag

SEQ ID NO: 147487 - DNA, 504 bp, synthetic construct
  misc_feature 1..504: note = Description of Artificial Sequence: Synthetic coding sequence
  source 1..504: mol_type = other DNA
atggctgctggcagcaggaccagcctgctgctggcctttgccctgctgtgcctgccctggctgcaggaggccggggctgtgcagacagtgcccctgagccggctgtttgaccacgccatgctgcaggcccaccgggcccaccagctggccatcgacacctaccaggagtttgaggagacctacatccccaaggaccagaagtacagcttcctgcatgacagccagaccagcttctgcttcagtgacagcatccccacccccagcaacatggaggagacccagcagaagagcaacctggagctgctgcgcatcagcctgctgctgattgaatcctggctggagcctgtgcgcttcctgcgctccatgtttgccaacaacctggtgtatgacaccagtgacagtgatgactaccacctgctgaaggacctggaggagggcatccagaccctgatgggcgtgcgggtggcccctggggtggccaaccctggcacccccctggcctag

SEQ ID NO: 147488 - DNA, 369 bp, synthetic construct
  misc_feature 1..369: note = Description of Artificial Sequence: Synthetic coding sequence
  source 1..369: mol_type = other DNA
atggctgctggcagcaggaccagcctgctgctggcctttgccctgctgtgcctgccctggctgcaggaggccggggctgtgcagacagtgcccctgagccggctgtttgaccacgccatgctgcaggcccaccgggcccaccagctggccatcgacacctaccaggagttccggctggaggatggcagcagaagaacaggccagatcctgaagcagacctacagcaagtttgacaccaacagccacaaccatgatgccctgctgaagaactacggcctgctgtactgcttcaggaaggacatggacaaggtggagaccttcctgaggatggtgcagtgccgctctgtggagggcagctgtggcttctag

SEQ ID NO: 147489 - DNA, 654 bp, synthetic construct
  misc_feature 1..654: note = Description of Artificial Sequence: Synthetic coding sequence
  source 1..654: mol_type = other DNA
atggctgctggcagcaggaccagcctgctgctggcctttgccctgctgtgcctgccctggctgcaggaggccggggctgtgcagacagtgcccctgagccggctgtttgaccacgccatgctgcaggcccaccgggcccaccagctggccatcgacacctaccaggagtttgaggagacctacatccccaaggaccagaagtacagcttcctgcatgacagccagaccagcttctgcttcagtgacagcatccccacccccagcaacatggaggagacccagcagaagagcaacctggagctgctgcgcatcagcctgctgctgattgaatcctggctggagcctgtgcgcttcctgcgctccatgtttgccaacaacctggtgtatgacaccagtgacagtgatgactaccacctgctgaaggacctggaggagggcatccagaccctgatgggccgcctggaggatggcagcagaagaacaggccagatcctgaagcagacctacagcaagtttgacaccaacagccacaaccatgatgccctgctgaagaactacggcctgctgtactgcttcaggaaggacatggacaaggtggagaccttcctgaggatggtgcagtgccgctctgtggagggcagctgtggcttctag

SEQ ID NO: 147490 - DNA, 483 bp, synthetic construct
  misc_feature 1..483: note = Description of Artificial Sequence: Synthetic coding sequence
  source 1..483: mol_type = other DNA
atggctgctggcagcaggaccagcctgctgctggcctttgccctgctgtgcctgccctggctgcaggaggccgacagcatccccacccccagcaacatggaggagacccagcagaagagcaacctggagctgctgcgcatcagcctgctgctgattgagagctggctggagcctgtgcgcttcctgcgctccatgtttgccaacaacctggtgtatgacaccagtgacagtgatgactaccacctgctgaaggacctggaggagggcatccagaccctgatgggccgcctggaggatggcagcagaagaacaggccagatcctgaagcagacctacagcaagtttgacaccaacagccacaaccatgatgccctgctgaagaactacggcctgctgtactgcttcaggaaggacatggacaaggtggagaccttcctgaggatggtgcagtgccgctctgtggagggcagctgtggcttctag

SEQ ID NO: 147491 - DNA, 498 bp, synthetic construct
  misc_feature 1..498: note = Description of Artificial Sequence: Synthetic coding sequence
  source 1..498: mol_type = other DNA
tgaggaagcaggaccagcctgctgctggcctttgccctgctgtgcctgccctggctgcaggaggccggggctgtgcagacagtgcccctgagccggctgtttgaccacgccatgctgcaggcccaccgggcccaccagctggccatcgacacctaccaggagtttgaggagacctacatccccaaggaccagaagtacagcttcctgcatgacagccagaccagcttctgcttcagtgacagcatccccacccccagcaacatggaggagacccagcagaagagcaacctggagctgctgcgcatcagcctgctgctgattgaatcctggctggagcctgtgcgcttcctgcgctccatgtttgccaacaacctggtgtatgacaccagtgacagtgatgactaccacctgctgaaggacctggaggagggcatccagaccctgatgggcgtgcgggtggcccctggggtggccaaccctggcacccccctggcctag

SEQ ID NO: 147492 - DNA, 669 bp, synthetic construct
  misc_feature 1..669: note = Description of Artificial Sequence: Synthetic coding sequence
  source 1..669: mol_type = other DNA
atggctgctggcagcaggaccagcctgctgctggcctttgccctgctgtgcctgccctggctgcaggaggccggggctgtgcagacagtgcccctgagccgcctcttcaaggaggccatgctgcaggcccaccgggcccaccagctggccatcgacacctaccaggagttcatcagctcctggggcatggaggcctacatcaccaaggagcagaagtacagcttcctgcatgacagccagaccagcttctgcttcagtgacagcatccccaccagcagcaacatggaggagacccagcagaagagcaacctggagctgctgcacatcagcctgctgctgattgagagccggctggagcctgtgcgcttcctgcggagcaccttcaccaacaacctggtgtatgacaccagtgacagtgatgactaccacctgctgaaggacctggaggagggcatccagatgctgatgggccgcctggaggatggcagccacctgaccggccagaccctgaagcagacctacagcaagtttgacaccaacagccacaaccatgatgccctgctgaagaactacggcctgctgcactgcttcaggaaggacatggacaaggtggagaccttcctgaggatggtgcagtgccgctctgtggagggcagctgtggcttctag

SEQ ID NO: 147493 - DNA, 387 bp, synthetic construct
  misc_feature 1..387: note = Description of Artificial Sequence: Synthetic coding sequence
  source 1..387: mol_type = other DNA
atggaggagacccagcagaagagcaacctggagctgctgcacatcagcctgctgctgattgagagccggctggagcctgtgcgcttcctgcggagcaccttcaccaacaacctggtgtatgacaccagtgacagtgatgactaccacctgctgaaggacctggaggagggcatccagatgctgatgggccgcctggaggatggcagccacctgaccggccagaccctgaagcagacctacagcaagtttgacaccaacagccacaaccatgatgccctgctgaagaactacggcctgctgcactgcttcaggaaggacatggacaaggtggagaccttcctgaggatggtgcagtgccgctctgtggagggcagctgtggcttctag

SEQ ID NO: 147494 - DNA, 522 bp, synthetic construct
  misc_feature 1..522: note = Description of Artificial Sequence: Synthetic coding sequence
  source 1..522: mol_type = other DNA
atggccaccggcagcaggaccagcctgctgctggcctttgccctgctgtgcctgccctggctgcaggaggccggggctgtgcagacagtgcccctgagccgcctcttcaaggaggccatgctgcaggcccaccgggcccaccagctggccatcgacacctaccaggagttcatcagctcctggggcatgggcgccggccagggctggcaggagggcgtgaccttcccccactggggcagcaatggaagaaggctgcggagcagcggcctcttcagcgaggccaagatgcaggctgatgagcaccggctgagccaggtgccccggcgggtgacagtgggcgccggcctgcagcacaggaagcagtggagcttcctggtgggcggccccagccccaggaagaagcccatcagccagaggaacagaagcatccacagctgcatgacccccaggcctccttctgccagccagaccctcttccgccacccccccacctggaggaagaggagcaggaaccccacctag

SEQ ID NO: 147495 - DNA, 420 bp, synthetic construct
  misc_feature 1..420: note = Description of Artificial Sequence: Synthetic coding sequence
  source 1..420: mol_type = other DNA
atggctgctgacagcatccccaccagcagcaacatggaggagacccagcagaagagcaacctggagctgctgcacatcagcctgctgctgattgagagccggctggagcctgtgcgcttcctgcggagcaccttcaccaacaacctggtgtatgacaccagtgacagtgatgactaccacctgctgaaggacctggaggagggcatccagatgctgatgggccgcctggaggatggcagccacctgaccggccagaccctgaagcagacctacagcaagtttgacaccaacagccacaaccatgatgccctgctgaagaactacggcctgctgcactgcttcaggaaggacatggacaaggtggagaccttcctgaggatggtgcagtgccgctctgtggagggcagctgtggcttctag

SEQ ID NO: 147496 - DNA, 1962 bp, synthetic construct
  misc_feature 1..1962: note = Description of Artificial Sequence: Synthetic coding sequence
  source 1..1962: mol_type = other DNA
atggctgacaccctgcccagcgagtttgatgtgattgtcatcggcaccggcctgcctgagagcatcatcgctgctgcctgcagccgcagcggccggcgggtgctgcacgtggacagccgcagctactatggaggcaactgggccagcttctccttcagcggcctgctgtcctggctgaaggagtaccaggagaacagcgacatcgtgtctgacagccctgtgtggcaggaccagatcctggagaatgaggaggccatcgccctgagcaggaaggacaagaccatccagcacgtggaggtgttctgctacgccagccaggacctgcatgaagatgtggaggaggccggggccctgcagaagaaccacgccctggtgaccagcgccaacagcacagaagctgctgacagcgccttcctgcccacagaagatgagagcctgagcaccatgagctgtgagatgctgacagagcagacccccagcagtgaccctgaaaatgccctggaggtgaatggagctgaggtgactggagagaaggagaaccactgtgatgacaagacctgtgtgcccagcaccagcgctgaggacatgtctgaaaatgtgcccatcgccgaggacaccacagagcagcccaagaagaaccgcatcacctacagccagatcatcaaggagggccgccgcttcaacatcgacctggtgtccaagctgctgtacagccggggcctgctgattgacctgctgatcaagagcaatgtgagccgctatgcagagttcaagaacatcacccgcatcctggccttccgggagggccgggtggagcaggtgccctgcagcagagcagatgtgttcaacagcaagcagctgaccatggtggagaagaggatgctgatgaagttcctgaccttctgcatggagtatgagaagtacccagatgagtacaagggctatgaggagatcaccttctatgagtacctgaagacccagaagctgacccccaacctgcagtacatcgtgatgcacagcatcgccatgaccagcgagacagccagcagcaccattgatggcctgaaggccaccaagaacttcctgcactgcctgggccgctatggcaacacccccttcctgttccccctgtatggccagggcgagctgccccagtgcttctgcaggatgtgtgctgtgtttggaggcatctactgcctgcggcacagcgtgcagtgcctggtggtggacaaggagagcaggaagtgcaaggccatcatcgaccagtttggccagaggatcatcagcgagcacttcctggtggaggacagctacttccctgagaacatgtgcagccgggtgcagtaccggcagatcagcagagctgtgctgatcacagacagatctgtgctgaagacagacagcgaccagcagatcagcatcctgactgtgcctgctgaggagcccggcacctttgctgtgcgggtcatcgagctgtgcagcagcaccatgacctgcatgaagggcacctacctggtgcacctgacctgcaccagcagcaagacagcccgggaggacctggagagcgtggtgcagaagctgtttgtgccctacacagagatggagattgaaaatgagcaggtggagaagccccgcatcctgtgggccctgtacttcaacatgagggacagcagtgacatcagccgcagctgctacaatgacctgcccagcaatgtgtatgtgtgcagcggccctgactgtggcctgggcaatgacaatgctgtgaagcaggccgagaccctcttccaggagatctgccccaatgaagacttctgccccccaccacccaaccctgaggacatcatcctggatggagacagcctgcagcctgaggccagcgagagcagcgccatccctgaggccaacagcgagaccttcaaggagagcaccaacctgggcaacctggaggagagcagcgagtag

SEQ ID NO: 147497 - DNA, 333 bp, synthetic construct
  misc_feature 1..333: note = Description of Artificial Sequence: Synthetic coding sequence
  source 1..333: mol_type = other DNA
atggctgacaccctgcccagcgagtttgatgtgattgtcatcggcaccggcctgcctgagagcatcatcgctgctgcctgcagccgcagcggccggcgggtgctgcacgtggacagccgcagctactatggaggcaactgggccagcttctccttcagcggcctgctgtcctggctgaaggagtaccaggagaacagcgacatcgtgtctgacagccctgtgtggcaggaccagatcctggagaatgaggaggccatcgccctgagcaggaaggacaagaccatccagcacgtggaggtgttctgctacgcccggagcaccctgctgctgtag

SEQ ID NO: 147498 - DNA, 1518 bp, synthetic construct
  misc_feature 1..1518: note = Description of Artificial Sequence: Synthetic coding sequence
  source 1..1518: mol_type = other DNA
atgagctgtgagatgctgacagagcagacccccagcagtgaccctgaaaatgccctggaggtgaatggagctgaggtgactggagagaaggagaaccactgtgatgacaagacctgtgtgcccagcaccagcgctgaggacatgtctgaaaatgtgcccatcgccgaggacaccacagagcagcccaagaagaaccgcatcacctacagccagatcatcaaggagggccgccgcttcaacatcgacctggtgtccaagctgctgtacagccggggcctgctgattgacctgctgatcaagagcaatgtgagccgctatgcagagttcaagaacatcacccgcatcctggccttccgggagggccgggtggagcaggtgccctgcagcagagcagatgtgttcaacagcaagcagctgaccatggtggagaagaggatgctgatgaagttcctgaccttctgcatggagtatgagaagtacccagatgagtacaagggctatgaggagatcaccttctatgagtacctgaagacccagaagctgacccccaacctgcagtacatcgtgatgcacagcatcgccatgaccagcgagacagccagcagcaccattgatggcctgaaggccaccaagaacttcctgcactgcctgggccgctatggcaacacccccttcctgttccccctgtatggccagggcgagctgccccagtgcttctgcaggatgtgtgctgtgtttggaggcatctactgcctgcggcacagcgtgcagtgcctggtggtggacaaggagagcaggaagtgcaaggccatcatcgaccagtttggccagaggatcatcagcgagcacttcctggtggaggacagctacttccctgagaacatgtgcagccgggtgcagtaccggcagatcagcagagctgtgctgatcacagacagatctgtgctgaagacagacagcgaccagcagatcagcatcctgactgtgcctgctgaggagcccggcacctttgctgtgcgggtcatcgagctgtgcagcagcaccatgacctgcatgaagggcacctacctggtgcacctgacctgcaccagcagcaagacagcccgggaggacctggagagcgtggtgcagaagctgtttgtgccctacacagagatggagattgaaaatgagcaggtggagaagccccgcatcctgtgggccctgtacttcaacatgagggacagcagtgacatcagccgcagctgctacaatgacctgcccagcaatgtgtatgtgtgcagcggccctgactgtggcctgggcaatgacaatgctgtgaagcaggccgagaccctcttccaggagatctgccccaatgaagacttctgccccccaccacccaaccctgaggacatcatcctggatggagacagcctgcagcctgaggccagcgagagcagcgccatccctgaggccaacagcgagaccttcaaggagagcaccaacctgggcaacctggaggagagcagcgagtag

SEQ ID NO: 147499 - DNA, 1971 bp, synthetic construct
  misc_feature 1..1971: note = Description of Artificial Sequence: Synthetic coding sequence
  source 1..1971: mol_type = other DNA
atggctgacaacctgcccacagaatttgatgtggtgatcatcggcaccggcctgcctgagagcatcctggccgccgcctgcagccgcagcggccagagggtgctgcacatcgacagccgcagctactatggaggcaactgggccagcttctccttcagcggcctgctgtcctggctgaaggagtaccagcagaacaatgacatcggggaggagagcacagtggtgtggcaggacctgattcatgaaacagaggaggccatcaccctgaggaagaaggatgagaccatccagcacacagaggccttctgctacgccagccaggacatggaggacaacgtggaggagatcggggccctgcagaagaaccccagcctgggcgtgagcaacaccttcacagaggtgctggacagcgccctgcctgaggagagccagctgagctacttcaacagtgatgagatgcctgccaagcacacccagaagagtgacacagagatcagcctggaggtgacagatgtggaggagagcgtggagaaggagaagtactgtggggacaagacctgcatgcacacagtgtctgacaaggatggagacaaggatgagagcaagagcacagtggaggacaaggcagatgagcccatccggaaccgcatcacctacagccagatcgtgaaggagggccgccgcttcaacatcgacctggtgtccaagctgctgtacagccagggcctgctgattgacctgctgatcaagagtgatgtgagccgctacgtggagttcaagaatgtgacccgcatcctggccttccgggagggcaaggtggagcaggtgccctgcagcagagcagatgtgttcaacagcaaggagctgaccatggtggagaagaggatgctgatgaagttcctgaccttctgcctggagtatgagcagcacccagatgagtaccaggccttccggcagtgcagcttcagcgagtacctgaagaccaagaagctgacccccaacctgcagcactttgtgctgcacagcatcgccatgaccagcgagagcagctgcaccaccattgatggcctgaatgccaccaagaacttcctgcagtgcctgggccgcttcggcaacacccccttcctgttccccctgtatggccagggcgagatcccccagggcttctgcaggatgtgtgctgtgtttggaggcatctactgcctgcggcacaaggtgcagtgctttgtggtggacaaggagagcggccgctgcaaggccatcatcgaccacttcggccagaggatcaatgccaagtacttcatcgtggaggacagctacctgtctgaggagacctgcagcaatgtgcagtacaagcagatcagcagagctgtgctgatcacagaccagagcatcctgaagacagacctggaccagcagaccagcatcctgattgtgcccccagctgagcccggggcctgtgctgtgcgggtgacagagctgtgcagcagcaccatgacctgcatgaaggacacctacctggtgcacctgacctgcagcagcagcaagacagcccgggaggacctggagagcgtggtgaagaagctgttcaccccctacacagaaacagagatcaatgaggaggagctgaccaagccccggctgctgtgggccctgtacttcaacatgagggacagcagcggcatcagccgcagcagctacaacggcctgcccagcaatgtgtatgtgtgcagcggccctgactgtggcctgggcaatgagcacgctgtgaagcaggccgagaccctcttccaggagatcttccccacagaggagttctgccccccaccacccaaccctgaggacatcatctttgatggagatgacaagcagcctgaggcccctggcaccaacaacgtggtgatggccaagctggagagcagcgaggagagcaagaacctggagagccctgagaagcacctgcagaactag

SEQ ID NO: 147500 - DNA, 1641 bp, synthetic construct
  misc_feature 1..1641: note = Description of Artificial Sequence: Synthetic coding sequence
  source 1..1641: mol_type = other DNA
atggagcagaggagagtgacagacttctttgccaggagaagacctggccccccacgcatcgccccacccaagctggcctgcaggacccccagccctgcccggcctgccctgcgggccccagccagcgccaccagcggcagcaggaagagggcccggcccccagctgcccctggccgggaccaggcccggcccccagcccggcggcggctgcggctgtctgtggatgaggtgagcagccccagcaccccagaggccccagacatcccagcctgccccagccctggccagaagatcaagaagagcaccccagctgctggccagcccccccacctgaccagcgcccaggaccaggacaccatcagcgagctggccagctgcctgcagagggcccgggagctgggcgcccgggtgcgggccctgaaggccagcgcccaggatgctggggagagctgcaccccagaggccgagggccggcctgaggagccctgtggggagaaggccccagcctaccagcgcttccacgccctggcccagcccggcctgcccggcctggtgctgccctacaagtaccaggtgctggccgagatgttccgctccatggacaccatcgtgggcatgctgcacaacagaagtgagacccccacctttgccaaggtgcagaggggcgtgcaggacatgatgagaagaagatttgaagaatgtaatgtgggccagatcaagacagtgtacccagccagctaccgcttccggcaggagaggtctgtgcccaccttcaaggatggcaccaggagaagtgactaccagctgaccatcgagcccctgctggagcaggaggctgatggagctgccccccagctgacagccagccggctgctgcagaggcggcagatcttcagccagaagctggtggagcacgtgaaggagcaccacaaggccttcctggccagcctgagccctgccatggtggtgcctgaggaccagctgacccgctggcacccccgcttcaacgtggatgaggtgcctgacatcgagcctgctgccctgccccagcccccagccacagagaagctgaccacagcccaggaggtgctggcccgggccaggaacctgatcagccccaggatggagaaggccctgagccagctggccctgcggtctgctgcccccagcagccctggcagccccaggcctgccctgcctgccaccccaccagccaccccacctgctgccagccccagcgccctgaagggcgtgtcccaggacctgctggagcgcatccgggccaaggaggcccagaagcagctggcccagatgacccgctgcccagagcaggagcagaggctgcagaggctggagcggctgcctgagctggcccgggtgctgcggtctgtgtttgtgtctgagaggaagccagccctgtccatggaggtggcctgtgccaggatggtgggcagctgctgcaccatcatgagccctggagagatggagaagcacctgctgctgctgtctgagctgctgcctgactggctgagcctgcaccgcatcagaacagacacctacgtgaagctggacaaggctgctgacctggcccacatcacagcccggctggcccaccagaccagggctgaggagggcctgtag

SEQ ID NO: 147501 - DNA, 306 bp, synthetic construct
  misc_feature 1..306: note = Description of Artificial Sequence: Synthetic coding sequence
  source 1..306: mol_type = other DNA
atgcagcagcagcagcagctggccagcgccaggaacagaaggctggcccagcagatggagaaccggcccagcgtgcaggccgccctgaagctgaagcagaagagcctgaagcagaggctgggcaagagcaacatccaggcccggctgggccggcccatcggggccctggcccggggggccatcggcggccggggcctgcccatcatccagaggggcctgccccggggcggcctgcggggcggccgggccaccaggaccctgctgcggggcggcatgagcctgcggggccagtgctgcgtgccctag

SEQ ID NO: 147502 - DNA, 672 bp, synthetic construct
  misc_feature 1..672: note = Description of Artificial Sequence: Synthetic coding sequence
  source 1..672: mol_type = other DNA
atgctgaagaacaagcagcccacccctgtgaacatccgggcctccatgcagcagcagcagcagctggccagcgccaggaacagaaggctggcccagcagatggagaaccggcccagcgtgcaggccgccctgaagctgaagcagagcctgaagcagaggctgggcaagagcaacatccaggcccggctgggccggcccatcggggccctggcccggggggccatcggcggccggggcctgcccatcatccagaggggcctgccccggggcggcctgcggggcggccgggccaccaggaccctgctgcggggcggcatgagcctgcggggccagaacctgctgcggggcggccgggctgtggcccccaggatgggcctgcggcggggcggcgtgcggggccggggcggccctggccggggcggcctgggccgcggggccatgggccggggcggcatcggcggccggggccggggcatgattggccggggccggggcggctttggaggccggggccggggccggggccggggccgcggggccctggcccggcctgtgctgaccaaggagcagctggacaaccagctggatgcctacatgagcaagaccaagggccacctggatgctgagctggatgcctacatggcccagacagatcctgagaccaatgactag

SEQ ID NO: 147503 - DNA, 609 bp, synthetic construct
  misc_feature 1..609: note = Description of Artificial Sequence: Synthetic coding sequence
  source 1..609: mol_type = other DNA
atggccgcccagagcgcccccaaggtggtgctgaagagcaccaccaagatgagcctgaatgaacgcttcaccaacatgctgaagaacaagcagcccacccctgtgaacatccgggcctccatgcagcagcagcagcagctggccagcgccaggaacagaaggctggcccagcagatggagaaccggcccagcgtgcaggccgccctgaagctgaagcagagcctgaagcagaggctgggcaagagcaacatccaggcccggctgggccggcccatcggggccctggcccggggggccatcggcggccggggcctgcccatcatccagaggggcctgccccggggcggcctgcggggcggccgggccaccaggaccctgctgcggggcggcatgagcctgcggggccggggcatgattggccggggccggggcggctttggaggccggggccggggccggggccggggccgcggggccctggcccggcctgtgctgaccaaggagcagctggacaaccagctggatgcctacatgagcaagaccaagggccacctggatgctgagctggatgcctacatggcccagacagatcctgagaccaatgactag

SEQ ID NO: 147504 - DNA, 747 bp, synthetic construct
  misc_feature 1..747: note = Description of Artificial Sequence: Synthetic coding sequence
  source 1..747: mol_type = other DNA
atggccgcccagagcgcccccaaggtggtgctgaagagcaccaccaagatgagcctgaatgaacgcttcaccaacatgctgaagaacaagcagcccacccctgtgaacatccgggcctccatgcagcagcagcagcagctggccagcgccaggaacagaaggctggcccagcagatggagaaccggcccagcgtgcaggccgccctgaagctgaagcagagcctgaagcagaggctgggcaagagcaacatccaggcccggctgggccggcccatcggggccctggcccggggggccatcggcggccggggcctgcccatcatccagaggggcctgccccggggcggcctgcggggcggccgggccaccaggaccctgctgcggggcggcatgagcctgcggggccagaacctgctgcggggcggccgggctgtggcccccaggatgggcctgcggcggggcggcgtgcggggccggggcggccctggccggggcggcctgggccgcggggccatgggccggggcggcattggaggccggggccggggcatgattggccggggccggggcggctttggaggccggggccggggccggggccggggccgcggggccctggcccggcctgtgctgaccaaggagcagctggacaaccagctggatgcctacatgagcaagaccaagggccacctggatgctgagctggatgcctacatggcccagacagatcctgagaccaatgactag

SEQ ID NO: 147505 - DNA, 609 bp, synthetic construct; identical to SEQ ID NO: 147503
  misc_feature 1..609: note = Description of Artificial Sequence: Synthetic coding sequence
  source 1..609: mol_type = other DNA

SEQ ID NO: 147506 - DNA, 636 bp, synthetic construct
  misc_feature 1..636: note = Description of Artificial Sequence: Synthetic coding sequence
  source 1..636: mol_type = other DNA
atggaggagctgagctctgtgggggagcaggtgtttgctgctgagtgcatcctgagcaagaggctgaggaagggcaagctggagtacctggtgaagtggaggggctggagcagcaagcacaacagctgggagcctgaggagaacatcctggacccccggctgctgctggccttccagaagaaggagcacgagaaggaggtgcagaacaggaagaggggcaagaggccccggggccggcccaggaagctgacagccatgagcagctgcagcagaagaagcaagctgaaggtgggcggctgtgccggctacgccgaccccaccagccagcaccccctgggcgtgggcggccggcagcgggagggcctgggccccagcggccggggctggcacttctgccagcagagcgtgcccctgctgggcaagcaggagccccccttcttcctgagcctgtccttctgctgccagggcccccagcctgctgagagcagcagcccccccctgcccggggccagctgcttcagcctgagctgcacccccctgtgctgggtggccggcagcaactgctgccggcaggccctcttccccccccggggcagcctgggagatggcaaggagcaggaggcctgtgtgcagtag

SEQ ID NO: 147507 - DNA, 1599 bp, synthetic construct
  misc_feature 1..1599: note = Description of Artificial Sequence: Synthetic coding sequence
  source 1..1599: mol_type = other DNA
atggaggagctgagctctgtgggggagcaggtgtttgctgctgagtgcatcctgagcaagaggctgaggaagggcaagctggagtacctggtgaagtggaggggctggagcagcaagcacaacagctgggagcctgaggagaacatcctggacccccggctgctgctggccttccagaagaaggagcacgagaaggaggtgcagaacaggaagaggggcaagaggccccggggccggcccaggaagctgacagccatgagcagctgcagcagaagaagcaagctgaaggagccagatgcccccagcaagagcaagagcagcagcagcagcagcagcagcaccagcagcagcagcagcagtgatgaagaagatgacagcgacctggatgccaagaggggcccccggggccgggagacccaccctgtgccccagaagaaggcccagatcctggtggccaagccagagctgaaggaccccatcaggaagaagaggggcaggaagcccctgcccccagagcagaaggccaccaggaggcctgtgtccctggccaaggtgctgaagacagccaggaaggacctgggcgccccagccagcaagctgcccccacccctgagcgcccctgtggccggcctggccgccctgaaggcccacgccaaggaggcctgtggcggccccagcgccatggccaccccagagaacctggccagcctgatgaagggcatggccagcagccctggccggggcggcatctcctggcagagcagcatcgtgcactacatgaacaggatgacccagagccaggcccaggccgccagccggctggccctgaaggcccaggccaccaacaagtgtggcctgggcctggacctgaaggtgaggacccagaagggggagctgggcatgagccccccaggcagcaagatccccaaggcccccagcggcggcgctgtggagcagaaggtgggcaacacaggaggccccccccacacccatggagccagccgggtgcctgctggctgccccggcccccagcctgcccccacccaggagctgagcctgcaggtgctggacctgcagagcgtgaagaatggcatgcctggggtgggcctgctggcccggcatgccacagccaccaagggcgtgcctgccaccaacccagcccctgggaagggcaccggcagcggcctgattggagccagcggggccaccatgcccacagacaccagcaagtctgagaagctggccagcagagctgtggccccacccaccccagccagcaagagggactgtgtgaagggcagcgccacccccagcggccaggagagcaggacagcccctggagaggccaggaaggccgccaccctgcctgagatgtctgctggggaggagagcagcagcagtgacagcgaccctgattctgccagcccccccagcacaggccagaaccccagcgtgtctgtgcagaccagccaggactggaagcccaccaggagcctcatcgagcacgtgtttgtgacagatgtgacagccaacctgatcaccgtgacagtgaaggagagccccacctctgtgggcttcttcaacctgcggcactactag

SEQ ID NO: 147508 - DNA, 1935 bp, synthetic construct
  misc_feature 1..1935: note = Description of Artificial Sequence: Synthetic coding sequence
  source 1..1935: mol_type = other DNA
atggaggccgagcggggccctgagaggaggcctgctgagaggagcagccctggccagaccccagaggagggcgcccaggccctggccgagtttgctgccctgcacggccctgccctgcgggccagcggcgtgcctgagcgctactggggccgcctgctgcacaagctggagcacgaggtgtttgatgctggggaggtgtttggcatcatgcaggtggaggaggtggaggaggaggaggatgaggccgcccgggaggtgaggaagcagcagcccaaccctggaaatgagctgtgctacaaggtgattgtgacccgggagagcggcctgcaggccgcccaccccaacagcatcttcctgattgaccacgcctggacctgccgggtggagcacgcccggcagcagctgcagcaggtgcccggcctgctgcacaggatggccaacctgatgggcatcgagttccacggggagctgcccagcacagaggccgtggccctggtgctggaggagatgtggaagttcaaccagacctaccagctggcccatggaacagctgaggagaagatgcctgtgtggtacatcatggatgaatttggcagccgcatccagcacgcagatgtgcccagctttgccacagcccccttcttctacatgccccagcaggtggcctacaccctgctgtggcccctgcgggacctggacaccggggaggaggtgacccgggactttgcctacggggagacagaccccctcatcaggaagtgcatgctgctgccctgggcccccacagacatgctggacctgagcagctgcaccccagagcccccagctgagcactaccaggccatcctggaggagaacaaggagaagctgcccctggacatcaaccctgtggtgcacccccacggccacatcttcaaggtgtacacagatgtgcagcaggtggccagcagcctgacccacccccgcttcaccctgacccagagcgaggctgatgctgacatcctcttcaacttcagccacttcaaggactacaggaagctgagccaggagaggcctggggtgctgctgaaccagttcccctgtgagaacctgctgactgtgaaggactgcctggccagcatcgcccggcgggccggcggccctgagggccccccctggctgcccaggaccttcaacctgaggacagagctgccccagtttgtgtcctacttccagcagcgggagcgctggggcgaggacaaccactggatctgcaagccctggaacctggcccggagcctggacacccacgtgaccaagagcctgcacagcatcatccgccaccgggagagcacccccaaggtggtgtccaagtacatcgagagccctgtgctcttcctgcgggaggatgtgggcaaggtgaagtttgacatccgctacatcgtgctgctgcggtctgtgcggcccctgcggctgtttgtgtatgatgtgttctggctgcgcttcagcaacagagcctttgccctgaatgacctggatgattatgagaagcacttcaccgtgatgaactatgaccctgatgtggtgctgaagcaggtgcactgtgaggagttcatccctgagtttgagaagcagtacccagagttcccctggacagatgtgcaggccgagatcttccgggccttcacagagctgttccaggtggcctgtgccaagcccccacccctgggcctgtgtgactaccccagcagccgggccatgtatgctgtggacctgatgctgaagtgggacaatggaccagatggccggcgggtgatgcagccccagatcctggaggtgaacttcaacccagactgtgagcgggcctgccgctaccaccccaccttcttcaatgatgtgttcagcaccctcttcctggaccagcccggcggctgccacgtgacctgcctggtgtag

SEQ ID NO: 147509 - DNA, 477 bp, synthetic construct
  misc_feature 1..477: note = Description of Artificial Sequence: Synthetic coding sequence
  source 1..477: mol_type = other DNA
atggagctgagcgccatcggggagcaggtgtttgctgtggagagcatcaggaagaagagggtgaggaagggcaaggtggagtacctggtgaagtggaagggctggccacccaagtacagcacctgggagcctgaggagcacatcctggacccccggctggtgatggcctatgaggagaaggaggagcgggaccgggccagcggctacaggaagaggggccccaagcccaagaggctgctgctgcaggagcccccagccccagatgtgctgcaggccgccggggagtgggagcctgctgcccagcccccagaggaggaggctgatgctgacctggccgagggccccccaccctggaccccagccctgcccagcagcgaggtgacagtgacagacatcacagccaacagcatcaccgtgaccttccgggaggcccaggccgctgagggcttcttccgggacagaagtggcaagttctag

SEQ ID NO: 147510 - DNA, 366 bp, synthetic construct
  misc_feature 1..366: note = Description of Artificial Sequence: Synthetic coding sequence
  source 1..366: mol_type = other DNA
atggagctgagcgccatcggggagcaggtgtttgctgtggagagcatcaggaagaagagggtgaggaagggcaaggtggagtacctggtgaagtggaagggctggccacccaaggaggagcgggaccgggccagcggctacaggaagaggggccccaagcccaagaggctgctgctgcagaggctgtacagcatggacctgcggagcagccacaaggccaagggcaaggagaagctgtgcttcagcctgacctgccccctgggcagcggcagccctgagggcgtggtgaaggccggggcccctgagctggtggacaagggccccctggtgcccaccctgcccttccccctgaggaagcccaggtag

SEQ ID NO: 147511 - DNA, 5133 bp, synthetic construct
  misc_feature 1..5133: note = Description of Artificial Sequence: Synthetic coding sequence
  source 1..5133: mol_type = other DNA
atgaatggccacagtgatgaggagagcgtgaggaacagcagcggggagagcagccagagtgatgatgacagcggcagcgccagcggcagcggcagcggcagcagcagcggcagcagcagtgatggcagcagcagccagagcggcagcagtgacagcgacagcggcagcgagagcggcagccagagcgagagcgagagtgacaccagccgggagaacaaggtgcaggccaagccacccaaggtggatggagctgagttctggaagagcagccccagcatcctggccgtgcagaggtctgccatcctgaagaagcagcagcagcagcagcagcagcagcagcaccaggccagcagcaacagcggcagcgaggaggacagcagcagcagcgaggacagtgatgacagcagcagcgaggtgaagaggaagaagcacaaggatgaggactggcagatgagcggcagcggcagccccagccagagcggcagtgacagcgagagcgaggaggagcgggagaagagcagctgtgatgaaacagaaagtgactatgagcccaagaacaaggtgaagagcaggaagccccagaacagaagcaagagcaagaatggcaagaagatcctgggccagaagaagaggcagattgacagcagcgaggaggatgatgatgaagaagattatgacaatgacaagaggagcagccggcggcaggccaccgtgaatgtgtcctacaaggaggatgaggagatgaagacagacagtgatgacctgctggaggtgtgtggagaagatgtgccccagcctgaggaggaggagtttgagaccatcgagcgcttcatggactgccgcatcggcaggaaaggagccaccggggccaccaccaccatctatgctgtggaggctgatggagaccccaatgccggctttgagaagaacaaggagcctggagagatccagtacctgatcaagtggaagggctggagccacatccacaacacctgggagacagaggagaccctgaagcagcagaatgtgcggggcatgaagaagctggacaactacaagaagaaggaccaggagaccaagcgctggctgaagaatgccagcccagaagatgtggagtactacaactgccagcaggagctgacagatgacctgcacaagcagtaccagatcgtggagcgcatcatcgcccacagcaaccagaagtctgctgctggctacccagactactactgcaagtggcagggcctgccctacagcgagtgctcctgggaggatggagccctgatcagcaagaagttccaggcctgcattgatgagtacttcagcaggaaccagagcaagaccacccccttcaaggactgcaaggtgctgaagcagaggcccaggtttgtggccctgaagaagcagcccagctacatcggcggccacgagggcctggagctgcgggactaccagctgaatggcctgaactggctggcccacagctggtgcaagggcaacagctgcatcctggctgatgagatgggcctgggcaagaccatccagaccatctccttcctgaactacctgttccacgagcaccagctgtatggccccttcctgctggtggtgcccctgagcaccctgacctcctggcagcgggagatccagacctgggccagccagatgaatgctgtggtgtacctgggggacatcaacagcaggaacatgatccgcacccatgagtggacccaccaccagaccaagaggctgaagttcaacatcctgctgaccacctatgagatcctgctgaaggacaaggccttcctgggcggcctgaactgggccttcatcggcgtggatgaggcccaccggctgaagaatgatgacagcctgctgtacaagaccctgattgacttcaagagcaaccaccggctgctgatcaccggcacccccctgcagaacagcctgaaggagctgtggagcctgctgcacttcatcatgcctgagaagttcagctcctgggaggactttgaggaggagcacggcaagggccgggagtatggctacgccagcctgcacaaggagctggagcccttcctgctgcggcgggtgaagaaggatgtggagaagagcctgcctgccaaggtggagcagatcctgaggatggagatgtctgccctgcagaagcagtactacaagtggatcctgaccaggaactacaaggccctgagcaagggcagcaagggcagcaccagcggcttcctgaacatcatgatggagctgaagaagtgctgcaaccactgctacctgatcaagcccccagacaacaatgagttctacaacaagcaggaggccctgcagcacctgatccgcagcagcggcaagctgatcctgctggacaagctgctgatccggctgcgggagcggggcaacagagtgctgatcttcagccagatggtgaggatgctggacatcctggccgagtacctgaagtaccggcagttccccttccagaggctggatggcagcatcaagggggagctgaggaagcaggccctggaccacttcaatgctgagggcagcgaggacttctgcttcctgctgagcacccgggccggcggcctgggcatcaacctggccagcgctgacacagtggtgatctttgacagcgactggaacccccagaatgacctgcaggcccaggcccgggcccacagaattggccagaagaagcaggtgaacatctaccgcctggtgaccaagggctctgtggaggaggacatcctggagcgggccaagaagaagatggtgctggaccacctggtgatccagaggatggacaccaccgggaagacagtgctgcacacaggcagcgcccccagcagcagcacccccttcaacaaggaggagctgagcgccatcctgaagtttggagctgaggagctgttcaaggagcctgagggggaggagcaggagccccaggagatggacattgatgagatcctgaagagagctgagacccatgaaaatgagcccggccccctgactgtgggagatgagctgctgagccagttcaaggtggccaacttcagcaacatggatgaagatgacatcgagctggagcctgagaggaacagcaagaactgggaggagatcatccctgaggaccagaggcggcggctggaggaggaggagcggcagaaggagctggaggagatctacatgctgcccaggatgaggaactgtgccaagcagatctccttcaatggaagtgagggccgccgcagccgcagccgccgctacagcggcagtgacagcgacagcatcagcgagggcaagaggcccaagaagaggggccggcccaggaccatcccccgggagaacatcaagggcttcagtgatgctgagatccgccgcttcatcaagagctacaagaagtttggaggccccctggagcggctggatgccatcgccagagatgctgagctggtggacaagtcagaaacagacctgcggcggctgggggagctggtgcacaacggctgcatcaaggccctgaaggacagcagcagcggcacagagaggactggaggccgcctgggcaaggtgaagggccccaccttccgcatctctggagtgcaggtgaatgccaagctggtgatcagccatgaggaggagctgatccccctgcacaagagcatccccagcgaccctgaggagaggaagcagtacaccatcccctgccacaccaaggccgcccactttgatattgactggggcaaggaggatgacagcaacctgctgattggcatctatgaatatggctacggctcctgggagatgatcaagatggaccctgacctgagcctgacccacaagatcctgcctgatgatcctgacaagaagccccaggccaagcagctgcagaccagggctgactacctgatcaagctgctgagccgggacctggccaagaaggaggccctgagcggggccggcagcagcaagaggaggaaggcccgggccaagaagaacaaggccatgaagagcatcaaggtgaaggaggagatcaagagtgacagcagccccctgcccagcgagaagagtgatgaagatgatgacaagctgtctgagagcaagagtgatggccgggagaggagcaagaagagctctgtgtctgatgcccctgtgcacatcacagccagcggggagcctgtgcccatcagcgaggagagcgaggagctggaccagaagaccttcagcatctgcaaggagaggatgaggcctgtgaaggccgccctgaagcagctggacaggcctgagaagggcctgtctgagcgggagcagctggagcacacccggcagtgcctgatcaagatcggggaccacatcacagagtgcctgaaggagtacaccaaccctgagcagatcaagcagtggaggaagaacctgtggatctttgtgtccaagttcacagaatttgatgccaggaagctgcacaagctgtacaagcacgccatcaagaagaggcaggagagccagcagaacagcgaccagaacagcaacctgaacccccacgtgatcagaaatccagatgtggagcggctgaaggagaacaccaaccatgatgacagcagccgggacagctacagcagtgacagacacctgacccagtaccatgaccaccacaaggacagacaccagggcgacagctacaagaagagtgacagcaggaagaggccctacagcagcttcagcaatggcaaggaccaccgggactgggaccactacaagcaggacagccgctactacagcgaccgggagaagcacaggaagctggatgaccacaggagccgggaccacaggagcaacctggagggcagcctgaaggacaggagccacagcgaccacaggagccacagcgaccaccggctgcacagcgaccacaggagcagcagcgagtacacccaccacaagagcagccgggactaccgctaccacagcgactggcagatggaccaccgggccagcagcagcggccccaggagccccctggaccagaggagcccctacggcagccgcagcccctttgagcacagcgtggagcacaagagcaccccagagcacacctggagcagcaggaagacctag

SEQ ID NO: 147512 - DNA, 903 bp, synthetic construct
  misc_feature 1..903: note = Description of Artificial Sequence: Synthetic coding sequence
  source 1..903: mol_type = other DNA
atgttctccttcaccggggtgctggtgatctatgaggtgctgaagaagtgcatcggcaagctgatcagcctgcgggtgtgcagcattgagggctgtgtgtgtgtgtatgtgtttgtgcctgggggcaaggagttccacgagaagctgaacatcttccaccagaccaacctgatctgcctcttcctgaacagcagcaggaacctgtggatctttgtgtccaagttcacagaatttgatgccaggaagctgcacaagctgtacaagcacgccatcaagaagaggcaggagagccagcagaacagcgaccagaacagcaacctgaacccccacgtgatcagaaatccagatgtggagcggctgaaggagaacaccaaccatgatgacagcagccgggacagctacagcagtgacagacacctgacccagtaccatgaccaccacaaggacagacaccagggcgacagctacaagaagagtgacagcaggaagaggccctacagcagcttcagcaatggcaaggaccaccgggactgggaccactacaagcaggacagccgctactacagcgaccgggagaagcacaggaagctggatgaccacaggagccgggaccacaggagcaacctggagggcagcctgaaggacaggagccacagcgaccacaggagccacagcgaccaccggctgcacagcgaccacaggagcagcagcgagtacacccaccacaagagcagccgggactaccgctaccacagcgactggcagatggaccaccgggccagcagcagcggccccaggagccccctggaccagaggagcccctacggcagccgcagcccctttgagcacagcgtggagcacaagagcaccccagagcacacctggagcagcaggaagacctag

SEQ ID NO: 147513 - DNA, 624 bp, synthetic construct
  misc_feature 1..624: note = Description of Artificial Sequence: Synthetic coding sequence
  source 1..624: mol_type = other DNA
atgaatggccacagtgatgaggagagcgtgaggaacagcagcggggagagcagccagagtgatgatgacagcggcagcgccagcggcagcggcagcggcagcagcagcggcagcagcagtgatggcagcagcagccagagcggcagcagtgacagcgacagcggcagcgagagcggcagccagagcgagagcgagagtgacaccagccgggagaacaaggtgcaggccaagccacccaaggtggatggagctgagttctggaagagcagccccagcatcctggccgtgcagaggtctgccatcctgaagaagcagcagcagcagcagcagcagcagcagcaccaggccagcagcaacagcggcagcgaggaggacagcagcagcagcgaggacagtgatgacagcagcagcgaggtgaagaggaagaagcacaaggatgaggactggcagatgagcggcagcggcagccccagccagagcggcagtgacagcgagagcgaggaggagcgggagaagagcagctgtgatgaaacagaaagtgactatgagcccaagaacaaggtgaagagcaggaagccccagaacagaagcaagagcaagaatgagaagaagaagaagaagtag

SEQ ID NO: 147514 - DNA, 660 bp, synthetic construct
  misc_feature 1..660: note = Description of Artificial Sequence: Synthetic coding sequence
  source 1..660: mol_type = other DNA
gtgggcgctgaccgggacagccccaccctgctgcctgctgggggcagcaactggctggcccagcgcttccactgccagaatggctgcatcctgggagatgagatgggcctgggcaagacctgccagaccatcgccctcttcatctacctggccggccgcctgaatgatgagggccccttcctgatcctgtgccccctgtctgtggagcagctggagaggagaaatgctgagatctgcagccgctccttcctgtgcaacatctgtggggacaaggaggagcgggcctgcctgcagcaggacctgaagcaggagagccgcttccacgtgctgctgaccacctatgagatctgcctgaaggatgccagcttcctgaagagcttcccctggagcgtgctggtggtggatgaggcccaccggctgaagaaccagagcagcctgctgcacaagaccctgtctgagttctctgtggtgttcagcctgctgctgaccggcacccccatccagaacagcctgcaggagctgtacagcctgctgagctttgtggagccagacctcttcagcaaggaggagtgggagatcctcttcaatgccacccgcatcctgaggaagaacctgagccagcaggtgaactgcaccaacagctgcagccacttctgctag

SEQ ID NO: 147515 - DNA, 1851 bp, synthetic construct
  misc_feature 1..1851: note = Description of Artificial Sequence: Synthetic coding sequence
  source 1..1851: mol_type = other DNA
atgtctgccctgcagaagaagtactacaaggccatcctgatgaaggacctggatgcctttgaaaatgaaacagccaagaaggtgaagctgcagaacatcctgagccagctgaggaaatgtgtggaccacccctacctgtttgatggagtggagcctgagccctttgaggtgggggaccacctgacagaggccagcggcaagctgcacctgctggacaagctgctggccttcctgtacagcggcggccaccgggtgctgctcttcagccagatgacccagatgctggacatcctgcaggactacatggactaccggggctacagctatgagcgggtggatggctctgtgcggggggaggagcggcacctggccatcaagaactttggccagcagcccatctttgtgttcctgctgagcacccgggccggcggcgtgggcatgaacctgacagctgctgacaccgtcatctttgtggacagcgacttcaacccccagaatgacctgcaggccgccgcccgggcccacagaattggccagaacaagtctgtgaaggtgatccggctgattggccgggacacagtggaggagatcgtgtacaggaaggccgccagcaagctgcagctgaccaacatgatcattgaaggaggccacttcaccctgggcgcccagaagccagctgctgatgctgacctgcagctgtctgagatcctgaagtttggcctggacaagctgctggccagcgagggcagcaccatggatgaaattgacctggagagcatcctgggggagaccaaggatggccagtgggtgtctgatgccctgcctgctgctgagggcggcagccgggaccaggaggagggcaagaaccacatgtacctgtttgagggcaaggactacagcaaggagcccagcaaggaggacaggaagagctttgagcagctggtgaacctgcagaagaccctgctggagaaggccagccaggagggccgcagcctgagaaataaaggatctgtgctgatccctggcctggtggagggcagcaccaagaggaagagggtgctgagccctgaggagctggaggaccggcagaagaagaggcaggaggccgccgccaagagaagaaggctgattgaggagaagaagaggcagaaggaggaggccgagcacaagaagaagatggcctggtgggagagcaacaactaccagagcttctgcctgcccagcgaggagagcgagcctgaggacctggagaatggagaggagagcagcgctgagctggactaccaggaccctgatgccaccagcctgaagtatgtgtctggagatgtgacccacccccaggccggggctgaagatgccctgattgtgcactgtgtggatgacagcggccactggggccggggcggcctcttcaccgccctggagaagaggtctgctgagcccaggaagatctatgagctggccggcaagatgaaggacctgagcctgggcggcgtgctgctcttccctgtggatgacaaggagagcaggaacaagggccaggacctgctggccctgattgtggcccagcaccgggacaggagcaatgtgctgagcggcatcaagatggccgccctggaggagggcctgaagaagatcttcctggccgccaagaagaagaaggcctctgtgcacctgccccgcatcggccacgccaccaagggcttcaactggtacggcacagagcggctcatcaggaagcacctggccgcccggggcatccccacctacatctactacttccccaggagcaagtctgctgtgctgcacgcccagagcagcagcagcagcagccggcagctggtgccctag

SEQ ID NO: 147516 - DNA, 2694 bp, synthetic construct
  misc_feature 1..2694: note = Description of Artificial Sequence: Synthetic coding sequence
  source 1..2694: mol_type = other DNA
atggagcgggccggggccaccagccggggcggccaggcccctggcttcctgctgcggctgcacacagagggccgggcagaggccgcccgggtgcaggagcaggacctgcggcagtggggcctgaccggcatccacctgcggagctaccagctggagggcgtgaactggctggcccagcgcttccactgccagaatggctgcatcctgggagatgagatgggcctgggcaagacctgccagaccatcgccctcttcatctacctggccggccgcctgaatgatgagggccccttcctgatcctgtgccccctgtctgtgctgagcaactggaaggaggagatgcagagatttgcccctggcctgagctgtgtgacctacgccggggacaaggaggagcgggcctgcctgcagcaggacctgaagcaggagagccgcttccacgtgctgctgaccacctatgagatctgcctgaaggatgccagcttcctgaagagcttcccctggagcgtgctggtggtggatgaggcccaccggctgaagaaccagagcagcctgctgcacaagaccctgtctgagttctctgtggtgttcagcctgctgctgaccggcacccccatccagaacagcctgcaggagctgtacagcctgctgagctttgtggagccagacctcttcagcaaggaggaggtgggggacttcatccagcgctaccaggacatcgagaaggagagcgagagcgccagcgagctgcacaagctgctgcagcccttcctgctgcggcgggtgaaggccgaggtggccacagagctgcccaagaagacagaggtggtgatctaccacggcatgtctgccctgcagaagaagtactacaaggccatcctgatgaaggacctggatgcctttgaaaatgaaacagccaagaaggtgaagctgcagaacatcctgagccagctgaggaaatgtgtggaccacccctacctgtttgatggagtggagcctgagccctttgaggtgggggaccacctgacagaggccagcggcaagctgcacctgctggacaagctgctggccttcctgtacagcggcggccaccgggtgctgctcttcagccagatgacccagatgctggacatcctgcaggactacatggactaccggggctacagctatgaaagagtggatggctctgtgcggggggaggagcggcacctggccatcaagaactttggccagcagcccatctttgtgttcctgctgagcaccagggctggaggagtgggcatgaacctgacagctgctgacaccgtcatctttgtggacagcgacttcaacccccagaatgacctgcaggccgccgcccgggcccaccgcatcggccagaacaagtctgtgaaggtgatccgcctcatcggccgggacacagtggaggagatcgtgtacaggaaggccgccagcaagctgcagctgaccaacatgatcatcgagggcggccacttcaccctgggcgcccagaagccagctgctgatgctgacctgcagctgtctgagatcctgaagtttggcctggacaagctgctggccagcgagggcagcaccatggatgaaattgacctggagagcatcctgggggagaccaaggatggccagtgggtgtctgatgccctgcctgctgctgagggcggcagccgggaccaggaggagggcaagaaccacatgtacctgtttgagggcaaggactacagcaaggagcccagcaaagaagacaggaagagctttgagcagctggtgaacctgcagaagaccctgctggagaaggccagccaggagggccgcagcctgaggaacaagggctctgtgctgatccctggcctggtggagggcagcaccaagaggaagagggtgctgagccctgaggagctggaggaccggcagaagaagaggcaggaggccgccgccaagagaagaagactcatcgaggagaagaagaggcagaaggaggaggccgagcacaagaagaagatggcctggtgggagagcaacaactaccagagcttctgcctgcccagcgaggagagcgagcctgaggacctggagaatggagaggagagcagcgctgagctggactaccaggaccctgatgccaccagcctgaagtatgtgtctggagatgtgacccacccccaggccggggctgaagatgccctgattgtgcactgtgtggatgattctggccactggggccggggcggcctcttcaccgccctggagaagaggtctgctgagcccaggaagatctatgagctggccggcaagatgaaggacctgagcctgggcggcgtgctgctcttccctgtggatgacaaggagagcagaaataaaggccaggacctgctggccctgattgtggcccagcaccgggacaggagcaatgtgctgagcggcatcaagatggccgccctggaggagggcctgaagaagatcttcctggccgccaagaagaagaaggcctctgtgcacctgcccagaattggacatgccaccaagggcttcaactggtatggaacagagcggctcatcaggaagcacctggccgcccggggcatccccacctacatctactacttccccaggagcaagtctgctgtgctgcacgcccagagcagcagcagcagcagccggcagctggtgccctag

SEQ ID NO: 147517 - DNA, 2082 bp, synthetic construct
  misc_feature 1..2082: note = Description of Artificial Sequence: Synthetic coding sequence
  source 1..2082: mol_type = other DNA
atggagcgggccggggccaccagccggggcggccaggcccctggcttcctgctgcggctgcacacagagggccgggcagaggccgcccgggtgcaggagcaggacctgcggcagtggggcctgacagccagcgagctgcacaagctgctgcagcccttcctgctgcggcgggtgaaggccgaggtggccacagagctgcccaagaagacagaggtggtgatctaccacggcatgtctgccctgcagaagaagtactacaaggccatcctgatgaaggacctggatgcctttgaaaatgaaacagccaagaaggtgaagctgcagaacatcctgagccagctgaggaaatgtgtggaccacccctacctgtttgatggagtggagcctgagccctttgaggtgggggaccacctgacagaggccagcggcaagctgcacctgctggacaagctgctggccttcctgtacagcggcggccaccgggtgctgctcttcagccagatgacccagatgctggacatcctgcaggactacatggactaccggggctacagctatgaaagagtggatggctctgtgcggggggaggagcggcacctggccatcaagaactttggccagcagcccatctttgtgttcctgctgagcaccagggctggaggagtgggcatgaacctgacagctgctgacaccgtcatctttgtggacagcgacttcaacccccagaatgacctgcaggccgccgcccgggcccaccgcatcggccagaacaagtctgtgaaggtgatccgcctcatcggccgggacacagtggaggagatcgtgtacaggaaggccgccagcaagctgcagctgaccaacatgatcatcgagggcggccacttcaccctgggcgcccagaagccagctgctgatgctgacctgcagctgtctgagatcctgaagtttggcctggacaagctgctggccagcgagggcagcaccatggatgaaattgacctggagagcatcctgggggagaccaaggatggccagtgggtgtctgatgccctgcctgctgctgagggcggcagccgggaccaggaggagggcaagaaccacatgtacctgtttgagggcaaggactacagcaaggagcccagcaaagaagacaggaagagctttgagcagctggtgaacctgcagaagaccctgctggagaaggccagccaggagggccgcagcctgaggaacaagggctctgtgctgatccctggcctggtggagggcagcaccaagaggaagagggtgctgagccctgaggagctggaggaccggcagaagaagaggcaggaggccgccgccaagagaagaagactcatcgaggagaagaagaggcagaaggaggaggccgagcacaagaagaagatggcctggtgggagagcaacaactaccagagcttctgcctgcccagcgaggagagcgagcctgaggacctggagaatggagaggagagcagcgctgagctggactaccaggaccctgatgccaccagcctgaagtatgtgtctggagatgtgacccacccccaggccggggctgaagatgccctgattgtgcactgtgtggatgattctggccactggggccggggcggcctcttcaccgccctggagaagaggtctgctgagcccaggaagatctatgagctggccggcaagatgaaggacctgagcctgggcggcgtgctgctcttccctgtggatgacaaggagagcagaaataaaggccaggacctgctggccctgattgtggcccagcaccgggacaggagcaatgtgctgagcggcatcaagatggccgccctggaggagggcctgaagaagatcttcctggccgccaagaagaagaaggcctctgtgcacctgcccagaattggacatgccaccaagggcttcaactggtatggaacagagcggctcatcaggaagcacctggccgcccggggcatccccacctacatctactacttccccaggagcaagtctgctgtgctgcacgcccagagcagcagcagcagcagccggcagctggtgccctag

SEQ ID NO: 147518 - DNA, 2412 bp, synthetic construct
  misc_feature 1..2412: note = Description of Artificial Sequence: Synthetic coding sequence
  source 1..2412: mol_type = other DNA
atggagcgggccggggccaccagccggggcggccaggcccctggcttcctgctgcggctgcacacagagggccgggcagaggccgcccgggtgcaggagcaggacctgcggcagtggggcctgaccggcatccacctgcggagctaccagctggagggcgtgaactggctggcccagcgcttccactgccagaatggctgcatcctgggagatgagatgggcctgggcaagacctgccagaccatcgccctcttcatctacctggccggccgcctgaatgatgagggccccttcctgatcctgtgccccctgtctgtgctgagcaactggaaggaggagatgcagagatttgcccctggcctgagctgtgtgacctacgccggggacaaggaggagcgggcctgcctgcagcaggacctgaagcaggagagccgcttccacgtgctgctgaccacctatgagatctgcctgaaggatgccagcttcctgaagagcttcccctggagcgtgctggtggtggatgaggcccaccggctgaagaaccagagcagcctgctgcacaagaccctgtctgagttctctgtggtgttcagcctgctgctgaccggcacccccatccagaacagcctgcaggagctgtacagcctgctgagctttgtggagccagacctcttcagcaaggaggaggtgggggacttcatccagcgctaccaggacatcgagaaggagagcgagagcgccagcgagctgcacaagctgctgcagcccttcctgctgcggcgggtgaaggccgaggtggccacagagctgcccaagaagacagaggtggtgatctaccacggcatgtctgccctgcagaagaagtactacaaggccatcctgatgaaggacctggatgcctttgaaaatgaaacagccaagaaggtgaagctgcagaacatcctgagccagctgaggaaatgtgtggaccacccctacctgtttgatggaggagtgggcatgaacctgacagctgctgacaccgtcatctttgtggacagcgacttcaacccccagaatgacctgcaggccgccgcccgggcccaccgcatcggccagaacaagtctgtgaaggtgatccgcctcatcggccgggacacagtggaggagatcgtgtacaggaaggccgccagcaagctgcagctgaccaacatgatcatcgagggcggccacttcaccctgggcgcccagaagccagctgctgatgctgacctgcagctgtctgagatcctgaagtttggcctggacaagctgctggccagcgagggcagcaccatggatgaaattgacctggagagcatcctgggggagaccaaggatggccagtgggtgtctgatgccctgcctgctgctgagggcggcagccgggaccaggaggagggcaagaaccacatgtacctgtttgagggcaaggactacagcaaggagcccagcaaagaagacaggaagagctttgagcagctggtgaacctgcagaagaccctgctggagaaggccagccaggagggccgcagcctgaggaacaagggctctgtgctgatccctggcctggtggagggcagcaccaagaggaagagggtgctgagccctgaggagctggaggaccggcagaagaagaggcaggaggccgccgccaagagaagaagactcatcgaggagaagaagaggcagaaggaggaggccgagcacaagaagaagatggcctggtgggagagcaacaactaccagagcttctgcctgcccagcgaggagagcgagcctgaggacctggagaatggagaggagagcagcgctgagctggactaccaggaccctgatgccaccagcctgaagtatgtgtctggagatgtgacccacccccaggccggggctgaagatgccctgattgtgcactgtgtggatgattctggccactggggccggggcggcctcttcaccgccctggagaagaggtctgctgagcccaggaagatctatgagctggccggcaagatgaaggacctgagcctgggcggcgtgctgctcttccctgtggatgacaaggagagcagaaataaaggccaggacctgctggccctgattgtggcccagcaccgggacaggagcaatgtgctgagcggcatcaagatggccgccctggaggagggcctgaagaagatcttcctggccgccaagaagaagaaggcctctgtgcacctgcccagaattggacatgccaccaagggcttcaactggtatggaacagagcggctcatcaggaagcacctggccgcccggggcatccccacctacatctactacttccccaggagcaagtctgctgtgctgcacgcccagagcagcagcagcagcagccggcagctggtgccctag

SEQ ID NO: 147519 - DNA, 1305 bp, synthetic construct
  misc_feature 1..1305: note = Description of Artificial Sequence: Synthetic coding sequence
  source 1..1305: mol_type = other DNA
atggctgtgtcctgggagatgcgctgggcctggggccggcctgccaggtttgcccctggcctgagctgtgtgacctacgccggggacaaggaggagcgggcctgcctgcagcaggacctgaagcaggagagccgcttccacgtgctgctgaccacctatgagatctgcctgaaggatgccagcttcctgaagagcttcccctggagcgtgctggtggtggatgaggcccaccggctgaagaaccagagcagcctgctgcacaagaccctgtctgagttctctgtggtgttcagcctgctgctgaccggcacccccatccagaacagcctgcaggagctgtacagcctgctgagctttgtggagccagacctcttcagcaaggaggaggtgggggacttcatccagcgctaccaggacatcgagaaggagagcgagagcgccagcgagctgcacaagctgctgcagcccttcctgctgcggcgggtgaaggccgaggtggccacagagctgcccaagaagacagaggtggtgatctaccacggcatgtctgccctgcagaagaagtactacaaggccatcctgatgaaggacctggatgcctttgaaaatgaaacagccaagaaggtgaagctgcagaacatcctgagccagctgaggaaatgtgtggaccacccctacctgtttgatggagtggagcctgagccctttgaggtgggggaccacctgacagaggccagcggcaagctgcacctgctggacaagctgctggccttcctgtacagcggcggccaccgggtgctgctcttcagccagatgacccagatgctggacatcctgcaggactacatggactaccggggctacagctatgaaagagtggatggctctgtgcggggggaggagcggcacctggccatcaagaactttggccagcagcccatctttgtgttcctgctgagcaccagggctggaggagtgggcatgaacctgacagctgctgacaccgtcatctttgtggacagcgacttcaacccccagaatgacctgcaggccgccgcccgggcccaccgcatcggccagaacaagtctgtgaaggtgatccgcctcatcggccgggacacagtggaggagatcgtgtacaggaaggccgccagcaagctgcagctgaccaacatgatcatcgagggcggccacttcaccctgggcgcccagaagccagctgctgatgctgacctgcaggtgcgctacagcaacctggtgtggatcaactgctggcccctgcggggggccccctggatgaagtag

SEQ ID NO: 147520 - DNA, 5487 bp, synthetic construct
  misc_feature 1..5487: note = Description of Artificial Sequence: Synthetic coding sequence
  source 1..5487: mol_type = other DNA
atgatgaggaacaaggacaagagccaggaggaggacagcagcctgcacagcaatgccagcagccacagcgccagcgaggaggccagcggcagtgacagcggcagccagagcgagagcgagcagggcagtgaccccggcagcggccacggcagcgagagcaacagcagcagcgagagcagcgagagccagagcgagagcgagagcgagagcgctggcagcaagagccagcctgtgctgcctgaggccaaggagaagccagccagcaagaaggagagaattgctgatgtgaagaagatgtgggaggagtacccagatgtgtatggagtgcggcgcagcaacagaagccggcaggagcccagccgcttcaacatcaaggaggaggccagcagcggcagcgagagcggcagccccaagagaagaggccagaggcagctgaagaagcaggagaagtggaagcaggagcccagtgaagatgagcaggagcagggcaccagcgctgagagcgagcctgagcagaagaaggtgaaggcccggcggcctgtgcccaggagaacagtgcccaagccccgggtgaagaagcagcccaagacccagaggggcaagaggaagaagcaggacagcagtgatgaagatgatgatgatgatgaggcccccaagaggcagacccggcggcgggccgccaagaatgtgtcctacaaggaggatgatgactttgaaacagacagtgatgacctgattgagatgactggagagggcgtggatgagcagcaggacaacagcgagaccatcgagaaggtgctggacagccggctgggcaagaagggggccactggagccagcaccaccgtgtatgccatcgaggccaatggagaccccagcggggactttgacacagagaaggatgaaggagagatccagtacctgatcaagtggaagggctggagctacatccacagcacctgggagagcgaggagagcctgcagcagcagaaggtgaagggcctgaagaagctggagaacttcaagaagaaggaggatgagatcaagcagtggctgggcaaggtgtccccagaagatgtggagtacttcaactgccagcaggagctggccagcgagctgaacaagcagtaccagatcgtggagcgggtgattgctgtgaagaccagcaagagcaccctgggccagacagacttccctgcccacagcaggaagccagcccccagcaatgaacctgagtacctgtgcaagtggatgggcctgccctacagcgagtgctcctgggaggatgaggccctgattggcaagaagttccagaactgcatcgacagcttccacagcaggaacaacagcaagaccatccccacccgggagtgcaaggccctgaagcagaggcccaggtttgtggccctgaagaagcagcctgcctacctgggcggggagaacctggagctgcgggactaccagctggagggcctgaactggctggcccacagctggtgcaagaacaacagcgtcatcctggctgatgagatgggcctgggcaagaccatccagaccatctccttcctgagctacctgttccaccagcaccagctgtatggccccttcctgattgtggtgcccctgagcaccctgacctcctggcagcgggagtttgagatctgggcccctgagatcaacgtggtggtgtacatcggggacctgatgagcaggaacaccatccgggagtatgagtggatccacagccagaccaagaggctgaagttcaatgccctgatcaccacctatgagatcctgctgaaggacaagacagtgctgggcagcatcaactgggccttcctgggcgtggatgaggcccaccggctgaagaatgatgacagcctgctgtacaagaccctgattgacttcaagagcaaccaccggctgctgatcaccggcacccccctgcagaacagcctgaaggagctgtggagcctgctgcacttcatcatgcctgagaagtttgagttctgggaggactttgaggaggaccacggcaagggcagagaaaatggctaccagagcctgcacaaggtgctggagcccttcctgctgcggcgggtgaagaaggatgtggagaagagcctgcctgccaaggtggagcagatcctgcgggtggagatgtctgccctgcagaagcagtactacaagtggatcctgaccaggaactacaaggccctggccaagggcacccggggcagcaccagcggcttcctgaacatcgtgatggagctgaagaagtgctgcaaccactgctacctgatcaagcccccagaagaaaatgaaagagaaaatggccaggagatcctgctgagcctcatccgcagcagcggcaagctgatcctgctggacaagctgctgacccggctgcgggagcggggcaacagagtgctgatcttcagccagatggtgaggatgctggacatcctggccgagtacctgaccatcaagcactaccccttccagaggctggatggcagcatcaagggggagatcaggaagcaggccctggaccacttcaatgctgatggcagcgaggacttctgcttcctgctgagcaccagggctgggggcctgggcatcaacctggccagcgctgacacagtggtgatctttgacagcgactggaacccccagaatgacctgcaggcccaggcccgggcccaccgcatcggccagaagaagcaggtgaacatctaccgcctggtgaccaagggcaccgtggaggaggagatcatcgagcgggccaagaagaagatggtgctggaccacctggtgatccagaggatggacaccaccggccgcaccatcctggagaacaacagcggccgcagcaacagcaaccccttcaacaaggaggagctgacagccatcctgaagtttggagcagaagatctcttcaaggagctggagggggaggagagcgagccccaggagatggacattgatgagatcctgcggctggccgagacccgggagaatgaggtgtccaccagcgccacagatgagctgctgagccagttcaaggtggccaactttgccaccatggaggatgaggaggagctggaggagcggccccacaaggactgggatgagatcatccctgaggagcagaggaagaaggtggaggaggaggagcggcagaaggagctggaggagatctacatgctgccccgcatccgcagcagcaccaagaaggcccagaccaatgacagcgacagcgacacagagagcaagaggcaggcccagaggagcagcgccagcgagagcgagacagaggacagtgatgatgacaagaagcccaagaggcggggccggcccaggtctgtgaggaaggacctggtggagggcttcacagatgctgagatccgccgcttcatcaaggcctacaagaagtttggcctgcccctggagcggctggagtgcatcgccagagatgctgagctggtggacaagtctgtggccgacctgaagaggctgggggagctgatccacaacagctgtgtgtctgccatgcaggagtatgaggagcagctgaaggaaaatgccagcgagggcaagggccctgggaagagaagaggccccaccatcaagatctctggagtgcaggtgaatgtgaagagcatcatccagcacgaggaggagtttgagatgctgcacaagagcatccctgtggaccctgaggagaagaagaagtactgcctgacctgccgggtgaaggccgcccactttgatgtggagtggggcgtggaggatgacagccggctgctgctgggcatctatgagcacggctacggcaactgggagctgatcaagacagatcctgagctgaagctgacagacaagatcctgcctgtggagacagacaagaagccccagggcaagcagctgcagaccagggctgactacctgctgaagctgctgaggaagggcctggagaagaagggagctgtgactggaggagaggaggccaagctgaagaagaggaagccccgggtgaagaaggagaacaaggtgccccggctgaaggaggagcacggcatcgagctgagcagccccaggcacagcgacaaccccagcgaggagggggaggtgaaggatgatggcctggagaagagccccatgaagaagaagcagaagaagaaggagaacaaggagaacaaggagaagcagatgagcagcaggaaggacaaggagggggacaaggagaggaagaagagcaaggacaagaaggagaagcccaagtctggagatgccaagagcagcagcaagagcaagaggagccagggccctgtgcacatcacagctggcagcgagcctgtgcccatcggggaggatgaagatgatgacctggaccaggagaccttcagcatctgcaaggagaggatgaggcctgtgaagaaggccctgaagcagctggacaagccagacaagggcctgaatgtgcaggagcagctggagcacaccaggaactgcctgctgaagattggagacagaattgctgaatgtctgaaggcctacagcgaccaggagcacatcaagctgtggaggaggaacctgtggatctttgtgtccaagttcacagaatttgatgccaggaagctgcacaagctgtacaagatggcccacaagaagaggagccaggaggaggaggagcagaagaagaaggatgatgtgactggaggcaagaagcccttccggcctgaggccagcggcagcagccgggacagcctcatcagccagagccacaccagccacaacctgcacccccagaagccccacctgcctgccagccacggcccccagatgcacggccacccccgggacaactacaaccaccccaacaagaggcacttcagcaatgctgacagaggagactggcagcgggagaggaagttcaactacggcggcggcaacaacaaccccccctggggcagtgacagacaccaccagtatgagcagcactggtacaaggaccaccactatggagaccggcggcacatggatgcccacaggagcggcagctaccggcccaacaacatgagcaggaagaggccctatgaccagtacagcagtgaccgggaccaccggggccaccgggactactatgacagacaccaccacgacagcaagagaagaagaagtgatgagttccggccccagaactaccaccagcaggacttccggaggatgtctgaccacaggcctgccatgggctaccacggccagggccccagcgaccactaccgctccttccacacagacaagctgggggagtacaagcagcccctgccccccctgcaccctgctgtgtctgaccccaggagcccccccagccagaagagcccccatgacagcaagagccccctggaccacaggagccccctggagaggagcctggagcagaagaacaacccagactacaactggaatgtgaggaagacctag

SEQ ID NO: 147521 - DNA, 1506 bp, synthetic construct
  misc_feature 1..1506: note = Description of Artificial Sequence: Synthetic coding sequence
  source 1..1506: mol_type = other DNA
atgatgaggaacaaggacaagagccaggaggaggacagcagcctgcacagcaatgccagcagccacagcgccagcgaggaggccagcggcagtgacagcggcagccagagcgagagcgagcagggcagtgaccccggcagcggccacggcagcgagagcaacagcagcagcgagagcagcgagagccagagcgagagcgagagcgagagcgctggcagcaagagccagcctgtgctgcctgaggccaaggagaagccagccagcaagaaggagagaattgctgatgtgaagaagatgtgggaggagtacccagatgtgtatggagtgcggcgcagcaacagaagccggcaggagcccagccgcttcaacatcaaggaggaggccagcagcggcagcgagagcggcagccccaagagaagaggccagaggcagctgaagaagcaggagaagtggaagcaggagcccagtgaagatgagcaggagcagggcaccagcgctgagagcgagcctgagcagaagaaggtgaaggcccggcggcctgtgcccaggagaacagtgcccaagccccgggtgaagaagcagcccaagacccagaggggcaagaggaagaagcaggacagcagtgatgaagatgatgatgatgatgaggcccccaagaggcagacccggcggcgggccgccaagaatgtgtcctacaaggaggatgatgactttgaaacagacagtgatgacctgattgagatgactggagagggcgtggatgagcagcaggacaacagcgagaccatcgagaaggtgctggacagccggctgggcaagaagggggccactggagccagcaccaccgtgtatgccatcgaggccaatggagaccccagcggggactttgacacagagaaggatgaaggagagatccagtacctgatcaagtggaagggctggagctacatccacagcacctgggagagcgaggagagcctgcagcagcagaaggtgaagggcctgaagaagctggagaacttcaagaagaaggaggatgagatcaagcagtggctgggcaaggtgtccccagaagatgtggagtacttcaactgccagcaggagctggccagcgagctgaacaagcagtaccagatcgtggagcgggtgattgctgtgaagaccagcaagagcaccctgggccagacagacttccctgcccacagcaggaagccagcccccagcaatgaacctgagtacctgtgcaagtggatgggcctgccctacagcgagtgctcctgggaggatgaggccctgattggcaagaagttccagaactgcatcgacagcttccacagcaggaacaacagcaagaccatccccacccgggagtgcaaggccctgaagcagaggcccaggtttgtggccctgaagaagcagcctgcctacctgggcggggagaacctggagctgcgggactaccagctggagggcctgaactggctggcccacagctggtgcaagtag

SEQ ID NO: 147522 - DNA, 1545 bp, synthetic construct
  misc_feature 1..1545: note = Description of Artificial Sequence: Synthetic coding sequence
  source 1..1545: mol_type = other DNA
atggcccacaagcagcgggaggactacctgaacctgagcccctgtgtgttcacctggtaccgcaccttcagccagctggcctttgatggagagaagctgagccacagcgccagcgaggaggccagcggcagtgacagcggcagccagagcgagagcgagcagggcagtgaccccggcagcggccacggcagcgagagcaacagcagcagcgagagcagcgagagccagagcgagagcgagagcgagagcgctggcagcaagagccagcctgtgctgcctgaggccaaggagaagccagccagcaagaaggagagaattgctgatgtgaagaagatgtgggaggagtacccagatgtgtatggagtgagaagaagcaacagaagccggcaggagcccagccgcttcaacatcaaggaggaggccagcagcggcagcgagagcggcagccccaagaggcggggccagaggcagctgaagaagcaggagaagtggaagcaggagcccagtgaagatgagcaggagcagggcaccagcgctgagagcgagcctgagcagaagaaggtgaaggcccggcggcctgtgcccaggagaacagtgcccaagccccgggtgaagaagcagcccaagacccagaggggcaagaggaagaagcaggacagcagtgatgaagatgatgatgatgatgaggcccccaagaggcagaccaggagaagagctgccaagaatgtgtcctacaaggaggatgatgactttgaaacagacagtgatgacctgattgagatgaccggggagggcgtggatgagcagcaggacaacagcgagaccatcgagaaggtgctggacagccggctgggcaagaagggggccaccggggccagcaccaccgtgtatgccatcgaggccaacggggaccccagcggggactttgacacagagaaggatgaaggagagatccagtacctgatcaagtggaagggctggagctacatccacagcacctgggagagcgaggagagcctgcagcagcagaaggtgaagggcctgaagaagctggagaacttcaagaagaaggaggatgagatcaagcagtggctgggcaaggtgtccccagaagatgtggagtacttcaactgccagcaggagctggccagcgagctgaacaagcagtaccagatcgtggagcgggtgattgctgtgaagaccagcaagagcaccctgggccagacagacttccctgcccacagcaggaagccagcccccagcaatgaacctgagtacctgtgcaagtggatgggcctgccctacagtgaatgttcctgggaggatgaggccctgattggcaagaagttccagaactgcatcgacagcttccacagcaggaacaacagcaagaccatccccacccgggagtgcaaggccctgaagcagaggcccaggtttgtggccctgaagaagcagcctgcctacctgggcggggagaacctggagctgcgggactaccagctggagggcctgaactggctggcccacagctggtgcaagtag

SEQ ID NO: 147523 - DNA, 552 bp, synthetic construct
  misc_feature 1..552: note = Description of Artificial Sequence: Synthetic coding sequence
  source 1..552: mol_type = other DNA
atgatgaggaacaaggacaagagccaggaggaggacagcagcctgcacagcaatgccagcagccacagcgccagcgaggaggccagcggcagtgacagcggcagccagagcgagagcgagcagggcagtgaccccggcagcggccacggcagcgagagcaacagcagcagcgagagcagcgagagccagagcgagagcgagagcgagagcgctggcagcaagagccagcctgtgctgcctgaggccaaggagaagccagccagcaagaaggagagaattgctgatgtgaagaagatgtgggaggagtacccagatgtgtatggagtgcggcgcagcaacagaagccggcaggagcccagccgcttcaacatcaaggaggaggccagcagcggcagcgagagcggcagccccaagagaagaggccagaggcagctgaagaagcaggagaagtggaagcaggagcccagtgaagatgagcaggagcagggcaccagcgctgagagcgagcctgagcagaagaaggtgaaggcccggcggcctgtgcccaggtag

SEQ ID NO: 147524 - DNA, 5220 bp, synthetic construct
  misc_feature 1..5220: note = Description of Artificial Sequence: Synthetic coding sequence
  source 1..5220: mol_type = other DNA
atgatgaggaacaaggacaagagccaggaggaggacagcagcctgcacagcaatgccagcagccacagcgccagcgaggaggccagcggcagtgacagcggcagccagagcgagagcgagcagggcagtgaccccggcagcggccacggcagcgagagcaacagcagcagcgagagcagcgagagccagagcgagagcgagagcgagagcgctggcagcaagagccagcctgtgctgcctgaggccaaggagaagccagccagcaagaaggagagaattgctgatgtgaagaagatgtgggaggagtacccagatgtgtatggagtgcggcgcagcaacagaagccggcaggagcccagccgcttcaacatcaaggaggaggccagcagcggcagcgagagcggcagccccaagagaagaggccagaggcagctgaagaagcaggagaagtggaagcaggagcccagtgaagatgagcaggagcagggcaccagcgctgagagcgagcctgagcagaagaaggtgaaggcccggcggcctgtgcccaggagaacagtgcccaagccccgggtgaagaagcagcccaagacccagaggggcaagaggaagaagcaggacagcagtgatgaagatgatgatgatgatgaggcccccaagaggcagacccggcggcgggccgccaagaatgtgtcctacaaggaggatgatgactttgaaacagacagtgatgacctgattgagatgactggagagggcgtggatgagcagcaggacaacagcgagaccatcgagaaggtgctggacagccggctgggcaagaagggggccactggagccagcaccaccgtgtatgccatcgaggccaatggagaccccagcggggactttgacacagagaaggatgaaggagagatccagtacctgatcaagtggaagggctggagctacatccacagcacctgggagagcgaggagagcctgcagcagcagaaggtgaagggcctgaagaagctggagaacttcaagaagaaggaggatgagatcaagcagtggctgggcaaggtgtccccagaagatgtggagtacttcaactgccagcaggagctggccagcgagctgaacaagcagtaccagatcgtggagcgggtgattgctgtgaagaccagcaagagcaccctgggccagacagacttccctgcccacagcaggaagccagcccccagcaatgaacctgagtacctgtgcaagtggatgggcctgccctacagcgagtgctcctgggaggatgaggccctgattggcaagaagttccagaactgcatcgacagcttccacagcaggaacaacagcaagaccatccccacccgggagtgcaaggccctgaagcagaggcccaggtttgtggccctgaagaagcagcctgcctacctgggcggggagaacctggagctgcgggactaccagctggagggcctgaactggctggcccacagctggtgcaagaacaacagcgtcatcctggctgatgagatgggcctgggcaagaccatccagaccatctccttcctgagctacctgttccaccagcaccagctgtatggccccttcctgattgtggtgcccctgagcaccctgacctcctggcagcgggagtttgagatctgggcccctgagatcaacgtggtggtgtacatcggggacctgatgagcaggaacaccatccgggagtatgagtggatccacagccagaccaagaggctgaagttcaatgccctgatcaccacctatgagatcctgctgaaggacaagacagtgctgggcagcatcaactgggccttcctgggcgtggatgaggcccaccggctgaagaatgatgacagcctgctgtacaagaccctgattgacttcaagagcaaccaccggctgctgatcaccggcacccccctgcagaacagcctgaaggagctgtggagcctgctgcacttcatcatgcctgagaagtttgagttctgggaggactttgaggaggaccacggcaagggcagagaaaatggctaccagagcctgcacaaggtgctggagcccttcctgctgcggcgggtgaagaaggatgtggagaagagcctgcctgccaaggtggagcagatcctgcgggtggagatgtctgccctgcagaagcagtactacaagtggatcctgaccaggaactacaaggccctggccaagggcacccggggcagcaccagcggcttcctgaacatcgtgatggagctgaagaagtgctgcaaccactgctacctgatcaagcccccagaagaaaatgaaagagaaaatggccaggagatcctgctgagcctcatccgcagcagcggcaagctgatcctgctggacaagctgctgacccggctgcgggagcggggcaacagagtgctgatcttcagccagatggtgaggatgctggacatcctggccgagtacctgaccatcaagcactaccccttccagaggctggatggcagcatcaagggggagatcaggaagcaggccctggaccacttcaatgctgatggcagcgaggacttctgcttcctgctgagcaccagggctgggggcctgggcatcaacctggccagcgctgacacagtggtgatctttgacagcgactggaacccccagaatgacctgcaggcccaggcccgggcccaccgcatcggccagaagaagcaggtgaacatctaccgcctggtgaccaagggcaccgtggaggaggagatcatcgagcgggccaagaagaagatggtgctggaccacctggtgatccagaggatggacaccaccggccgcaccatcctggagaacaacagcggccgcagcaacagcaaccccttcaacaaggaggagctgacagccatcctgaagtttggagcagaagatctcttcaaggagctggagggggaggagagcgagccccaggagatggacattgatgagatcctgcggctggccgagacccgggagaatgaggtgtccaccagcgccacagatgagctgctgagccagttcaaggtggccaactttgccaccatggaggatgaggaggagctggaggagcggccccacaaggactgggatgagatcatccctgaggagcagaggaagaaggtggaggaggaggagcggcagaaggagctggaggagatctacatgctgccccgcatccgcagcagcaccaagaaggcccagaccaatgacagcgacagcgacacagagagcaagaggcaggcccagaggagcagcgccagcgagagcgagacagaggacagtgatgatgacaagaagcccaagaggcggggccggcccaggtctgtgaggaaggacctggtggagggcttcacagatgctgagatccgccgcttcatcaaggcctacaagaagtttggcctgcccctggagcggctggagtgcatcgccagagatgctgagctggtggacaagtctgtggccgacctgaagaggctgggggagctgatccacaacagctgtgtgtctgccatgcaggagtatgaggagcagctgaaggaaaatgccagcgagggcaagggccctgggaagagaagaggccccaccatcaagatctctggagtgcaggtgaatgtgaagagcatcatccagcacgaggaggagtttgagatgctgcacaagagcatccctgtggaccctgaggagaagaagaagtactgcctgacctgccgggtgaaggccgcccactttgatgtggagtggggcgtggaggatgacagccggctgctgctgggcatctatgagcacggctacggcaactgggagctgatcaagacagatcctgagctgaagctgacagacaagatcctgcctgtggagacagacaagaagccccagggcaagcagctgcagaccagggctgactacctgctgaagctgctgaggaagggcctggagaagaagggagctgtgactggaggagaggaggccaagctgaagaagaggaagccccgggtgaagaaggagaacaaggtgccccggctgaaggaggagcacggcatcgagctgagcagccccaggcacagcgacaaccccagcgaggagggggaggtgaaggatgatggcctggagaagagccccatgaagaagaagcagaagaagaaggagaacaaggagaacaaggagaagcagatgagcagcaggaaggacaaggagggggacaaggagaggaagaagagcaaggacaagaaggagaagcccaagtctggagatgccaagagcagcagcaagagcaagaggagccagggccctgtgcacatcacagctggcagcgagcctgtgcccatcggggaggatgaagatgatgacctggaccaggagaccttcagcatctgcaaggagaggatgaggcctgtgaagaaggccctgaagcagctggacaagccagacaagggcctgaatgtgcaggagcagctggagcacaccaggaactgcctgctgaagattggagacagaattgctgaatgtctgaaggcctacagcgaccaggagcacatcaagctgtggaggaggaacctgtggatctttgtgtccaagttcacagaatttgatgccaggaagctgcacaagctgtacaagatggcccacaagaagaggagccaggaggaggaggagcagaagaagaaggatgatgtgactggaggcaagaagcccttccggcctgaggccagcggcagcagccgggacagcctcatcagccagagccacaccagccacaacctgcacccccagaagccccacctgcctgccagccacggcccccagatgcacggccacccccgggacaactacaaccaccccaacaagaggcacttcagcaatgctgacagaggagactggcagcgggagaggaagttcaactacggcggcggcaacaacaaccccccctggggcagtgacagacaccaccagtatgagcagcactggtacaaggaccaccactatggagaccggcggcacatggatgcccacaggagcggcagctaccggcccaacaacatgagcaggaagaggccctatgaccagtacagcagtgaccgggaccaccggggccaccgggactactatgacagatatgccaagggctgtgagacccctggggccaacctgtgccaggagctgttcctgggcaggaagtag

SEQ ID NO: 147525 - DNA, 6003 bp, synthetic construct
  misc_feature 1..6003: note = Description of Artificial Sequence: Synthetic coding sequence
  source 1..6003: mol_type = other DNA
atgaaggctgctgacaccgtcatcctgtgggcccggagcaagaatgaccagctgcgcatctccttccccccaggcctgtgctggggagacaggatgccagacaaggatgacatccggctgctgcccagcgccctgggcgtgaagaagaggaagaggggccccaagaagcagaaggagaacaagccaggcaagcccaggaagaggaagaagagggacagcgaggaggagtttggaagtgaaagagatgagtaccgggagaagtctgagagcggcggctctgaatatggaactggacctggcaggaagagaagaaggaagcaccgggagaagaaggagaagaagaccaagaggaggaagaagggggagggagatggcggccagaagcaggtggagcagaagagcagcgccaccctgctgctgacctggggcctggaggatgtggagcacgtgttcagcgaggaggactaccacaccctgaccaactacaaggccttcagccagttcatgaggcccctgattgccaagaagaaccccaagatccccatgagcaagatgatgaccatcctgggcgccaagtggagggagttcagcgccaacaaccccttcaagggcagcgctgctgctgtggccgctgctgctgctgctgctgctgctgctgtggccgagcaggtgtctgctgctgtgagcagcgccacccccatcgcccccagcggccccccagccctgcccccacctcctgctgctgacatccagcccccacccatccggcgggccaagaccaaggagggcaagggccctggccacaagaggaggagcaagagcccccgggtgcctgatggcaggaagaagctgcggggcaagaagatggcccccctgaagatcaagctgggcctgctgggcggcaagaggaagaagggcggcagctatgtgttccagagtgatgagggccctgagcctgaggccgaggagagtgacctggacagcggctctgtgcacagcgccagcggccgcccagatggccctgtgaggaccaagaagctgaagaggggccggcccggcaggaagaagaagaaggtgctgggctgcccagctgtggccggggaggaggaggtggatggctatgaaacagaccaccaggactactgtgaggtgtgccagcagggcggggagatcatcctgtgtgacacctgcccccgggcctaccacctggtgtgcctggaccctgagctggaccgggcccctgagggcaagtggagctgcccccactgtgagaaggagggcgtgcagtgggaggccaaggaggaggaggaggagtatgaggaggagggggaggaggagggggagaaggaggaggaggatgaccacatggagtactgccgggtgtgcaaggatggaggagagctgctgtgctgtgatgcctgcatcagcagctaccacatccactgcctgaacccccccctgcctgacatccccaacggggagtggctgtgcccccgctgcacctgccctgtgctgaagggccgggtgcagaagatcctgcactggcgctggggcgagccccctgtggccgtgcctgccccccagcaggctgatggcaacccagatgtgcccccaccccggcccctgcagggccgctctgagcgggagttctttgtgaagtgggtgggcctgagctactggcactgctcctgggccaaggagctgcagctggagatcttccacctggtgatgtacagaaactaccagaggaagaatgacatggatgagcccccacccctggactatggcagcggagaagatgatggcaagagtgacaagaggaaggtgaaggacccccactatgcagagatggaggagaagtactaccgcttcggcatcaagccagagtggatgacagtgcaccgcatcatcaaccacagcgtggacaagaagggcaactaccactacctggtgaagtggagggacctgccctatgaccagagcacctgggaggaggatgagatgaacatcccagaatatgaggagcacaagcagagctactggaggcaccgggagctgatcatgggagaggaccctgcccagcccaggaagtacaagaagaagaagaaggagctgcagggagatggcccccccagcagccccaccaatgaccccaccgtgaagtatgagacccagccccgcttcatcacagccaccggcggcaccctgcacatgtaccagctggagggcctgaactggctgcgcttctcctgggcccagggcacagacaccatcctggctgatgagatgggcctgggcaagaccatccagaccatcgtgttcctgtacagcctgtacaaggagggccacaccaagggccccttcctggtgtctgcccccctgagcaccatcatcaactgggagcgggagttccagatgtgggcccccaagttctacgtggtgacctacacaggagacaaggacagccgggccatcatccgggagaatgagttctcctttgaggacaatgccatcaagggcggcaagaaggccttcaagatgaagcgggaggcccaggtgaagttccacgtgctgctgaccagctatgagctgatcaccatcgaccaggccgccctgggcagcatccgctgggcctgcctggtggtggatgaggcccaccggctgaagaacaaccagagcaagttcttccgggtgctgaatggctacaagattgaccacaagctgctgctgaccggcacccccctgcagaacaacctggaggagctgttccacctgctgaacttcctgaccccagagcgcttcaacaacctggagggcttcctggaggagtttgctgacatcagcaaggaggaccagatcaagaagctgcatgacctgctgggcccccacatgctgcggcggctgaaggcagatgtgttcaagaacatgcctgccaagacagagctgattgtgcgggtggagctgagccccatgcagaagaagtactacaagtacatcctgaccaggaactttgaggccctgaacagcagaggaggcggcaaccaggtgtccctgctgaacatcatgatggacctgaagaagtgctgcaaccacccctacctgtttcctgtggccgccatggagagccccaagctgcccagcggggcctatgagggcggggccctgatcaagagcagcggcaagctgatgctgctgcagaagatgctgaggaagctgaaggagcagggccaccgggtgctgatcttcagccagatgaccaagatgctggacctgctggaggacttcctggactatgagggctacaagtatgaaagaattgatggcggcatcactggagccctgcggcaggaggccatcgaccgcttcaatgcccctggggcccagcagttctgcttcctgctgagcacccgggccggcggcctgggcatcaacctggccacagctgacaccgtcatcatctttgacagcgactggaacccccacaatgacatccaggccttcagccgggcccacagaattggccaggccaacaaggtgatgatctacagatttgtgacccgggcctctgtggaggagcgcatcacccaggtggccaagaggaagatgatgctgacccacctggtggtgcggcccggcctgggcagcaaggccggctccatgagcaagcaggagctggatgacatcctgaagtttggaacagaggagctgttcaaggatgaaaatgaaggagagaacaaggaggaggacagcagcgtcatccactatgacaatgaggccatcgcccggctgctggacaggaaccaggatgccacagaggacacagatgtgcagaacatgaatgagtacctgagcagcttcaaggtggcccagtatgtggtgcgggaggaggacaagattgaggagattgaaagagagatcatcaagcaggaggagaatgtggaccctgactactgggagaagctgctgcggcaccactatgagcagcagcaggaggacctggccaggaacctgggcaagggcaagagggtgaggaagcaggtgaactacaatgatgctgcccaggaggaccaggacaaccagagcgagtacagcgtgggcagcgaggaggaggatgaggactttgatgagaggcctgagggccggcggcagagcaagaggcagctgagaaatgagaaggacaagcccctgccccccctgctggcccgggtgggcggcaacatcgaggtgctgggcttcaacacccggcagaggaaggccttcctgaatgctgtgatgcgctggggcatgccaccccaggatgccttcaccacccagtggctggtgcgggacctgcggggcaagacagagaaggagttcaaggcctacgtgtccctcttcatgaggcacctgtgtgagcccggggctgatggcagcgagacctttgctgatggagtgccccgggagggcctgagccggcagcaggtgctgacccgcatcggcgtgatgagcctggtgaagaagaaggtgcaggagtttgagcacatcaatggccgctggagcatgcctgagctgatgccagaccccagcgctgacagcaagaggagcagccgggccagcagccccaccaagaccagccccaccaccccagaggccagcgccaccaacagcccctgcaccagcaagccagccaccccagcccccagcgagaagggggagggcatccgcacccccctggagaaggaggaggccgagaaccaggaggagaagccagagaagaacagcagaattggagagaagatggagacagaagcagatgcccccagccctgcccccagcctgggggagcggctggagcccaggaagatccccctggaggatgaggtgcctggggtgcctggagagatggagcctgagcccggctacagaggagaccgggagaagagcgccacagagagcaccccaggagagcggggggaggagaagcccctggatggccaggagcaccgggagaggcctgagggggagactggagacctgggcaagcgggaggatgtgaagggggaccgggagctgcggcccggccccagagatgagcccaggagcaatggaagaagagaggagaagacagagaagccccgcttcatgttcaacattgctgatggcggcttcacagagctgcacaccctgtggcagaatgaggagagagctgccatcagcagcggcaagctgaatgagatctggcacagaagacatgactactggctgctggccggcatcgtgctgcacggctacgcccgctggcaggacatccagaatgatgcccagtttgccatcatcaatgagcccttcaagacagaggccaacaagggcaacttcctggagatgaagaacaagttcctggcccggcgcttcaagctgctggagcaggccctggtgattgaggagcagctgcggcgggccgcctacctgaacctgagccaggagcccgcccacccagccatggccctgcacgccaggtttgctgaggctgaatgtctggccgagagccaccagcacctgagcaaggagagcctggccggcaacaagccagccaatgctgtgctgcacaaggtgctgaaccagctggaggagctgctgagtgacatgaaggcagatgtgacccggctgcctgccaccctgagccgcatcccccccatcgccgcccggctgcagatgtctgagaggagcatcctgagccggctggccagcaagggcacagagccccaccccaccccagcctacccacctggcccctatgccaccccacctggctatggagctgccttctctgctgcccctgtgggcgccctggccgccgccggggccaactacagccagatgcctgctggcagcttcatcacagctgccaccaacggcccccctgtgctggtgaagaaggagaaggagatggtgggcgccctggtgtctgatggcctggacaggaaggagccccgggccggggaggtgatctgcattgatgactag

SEQ ID NO: 147526 - DNA, 5901 bp, synthetic construct
  misc_feature 1..5901: note = Description of Artificial Sequence: Synthetic coding sequence
  source 1..5901: mol_type = other DNA
atgaaggctgctgacaccgtcatcctgtgggcccggagcaagaatgaccagctgcgcatctccttccccccaggcctgtgctggggagacaggatgccagacaaggatgacatccggctgctgcccagcgccctgggcgtgaagaagaggaagaggggccccaagaagcagaaggagaacaagccaggcaagcccaggaagaggaagaagagggacagcgaggaggagtttggaagtgaaagagatgagtaccgggagaagtctgagagcggcggctctgaatatggaactggacctggcaggaagagaagaaggaagcaccgggagaagaaggagaagaagaccaagaggaggaagaagggggagggagatggcggccagaagcaggtggagcagaagagcagcgccaccctgctgctgacctggggcctggaggatgtggagcacgtgttcagcgaggaggactaccacaccctgaccaactacaaggccttcagccagttcatgaggcccctgattgccaagaagaaccccaagatccccatgagcaagatgatgaccatcctgggcgccaagtggagggagttcagcgccaacaaccccttcaagggcagcgctgctgctgtggccgctgctgctgctgctgctgctgctgctgtggccgagcaggtgtctgctgctgtgagcagcgccacccccatcgcccccagcggccccccagccctgcccccacctcctgctgctgacatccagcccccacccatccggcgggccaagaccaaggagggcaagggccctggccacaagaggaggagcaagagcccccgggtgcctgatggcaggaagaagctgcggggcaagaagatggcccccctgaagatcaagctgggcctgctgggcggcaagaggaagaagggcggcagctatgtgttccagagtgatgagggccctgagcctgaggccgaggagagtgacctggacagcggctctgtgcacagcgccagcggccgcccagatggccctgtgaggaccaagaagctgaagaggggccggcccggcaggaagaagaagaaggtgctgggctgcccagctgtggccggggaggaggaggtggatggctatgaaacagaccaccaggactactgtgaggtgtgccagcagggcggggagatcatcctgtgtgacacctgcccccgggcctaccacctggtgtgcctggaccctgagctggaccgggcccctgagggcaagtggagctgcccccactgtgagaaggagggcgtgcagtgggaggccaaggaggaggaggaggagtatgaggaggagggggaggaggagggggagaaggaggaggaggatgaccacatggagtactgccgggtgtgcaaggatggaggagagctgctgtgctgtgatgcctgcatcagcagctaccacatccactgcctgaacccccccctgcctgacatccccaacggggagtggctgtgcccccgctgcacctgccctgtgctgaagggccgggtgcagaagatcctgcactggcgctggggcgagccccctgtggccgtgcctgccccccagcaggctgatggcaacccagatgtgcccccaccccggcccctgcagggccgctctgagcgggagttctttgtgaagtgggtgggcctgagctactggcactgctcctgggccaaggagctgcagctggagatcttccacctggtgatgtacagaaactaccagaggaagaatgacatggatgagcccccacccctggactatggcagcggagaagatgatggcaagagtgacaagaggaaggtgaaggacccccactatgcagagatggaggagaagtactaccgcttcggcatcaagccagagtggatgacagtgcaccgcatcatcaaccacagcgtggacaagaagggcaactaccactacctggtgaagtggagggacctgccctatgaccagagcacctgggaggaggatgagatgaacatcccagaatatgaggagcacaagcagagctactggaggcaccgggagctgatcatgggagaggaccctgcccagcccaggaagtacaagaagaagaagaaggagctgcagggagatggcccccccagcagccccaccaatgaccccaccgtgaagtatgagacccagccccgcttcatcacagccaccggcggcaccctgcacatgtaccagctggagggcctgaactggctgcgcttctcctgggcccagggcacagacaccatcctggctgatgagatgggcctgggcaagaccatccagaccatcgtgttcctgtacagcctgtacaaggagggccacaccaagggccccttcctggtgtctgcccccctgagcaccatcatcaactgggagcgggagttccagatgtgggcccccaagttctacgtggtgacctacacaggagacaaggacagccgggccatcatccgggagaatgagttctcctttgaggacaatgccatcaagggcggcaagaaggccttcaagatgaagcgggaggcccaggtgaagttccacgtgctgctgaccagctatgagctgatcaccatcgaccaggccgccctgggcagcatccgctgggcctgcctggtggtggatgaggcccaccggctgaagaacaaccagagcaagttcttccgggtgctgaatggctacaagattgaccacaagctgctgctgaccggcacccccctgcagaacaacctggaggagctgttccacctgctgaacttcctgaccccagagcgcttcaacaacctggagggcttcctggaggagtttgctgacatcagcaaggaggaccagatcaagaagctgcatgacctgctgggcccccacatgctgcggcggctgaaggcagatgtgttcaagaacatgcctgccaagacagagctgattgtgcgggtggagctgagccccatgcagaagaagtactacaagtacatcctgaccaggaactttgaggccctgaacagcagaggaggcggcaaccaggtgtccctgctgaacatcatgatggacctgaagaagtgctgcaaccacccctacctgtttcctgtggccgccatggagagccccaagctgcccagcggggcctatgagggcggggccctgatcaagagcagcggcaagctgatgctgctgcagaagatgctgaggaagctgaaggagcagggccaccgggtgctgatcttcagccagatgaccaagatgctggacctgctggaggacttcctggactatgagggctacaagtatgaaagaattgatggcggcatcactggagccctgcggcaggaggccatcgaccgcttcaatgcccctggggcccagcagttctgcttcctgctgagcacccgggccggcggcctgggcatcaacctggccacagctgacaccgtcatcatctttgacagcgactggaacccccacaatgacatccaggccttcagccgggcccacagaattggccaggccaacaaggtgatgatctacagatttgtgacccgggcctctgtggaggagcgcatcacccaggtggccaagaggaagatgatgctgacccacctggtggtgcggcccggcctgggcagcaaggccggctccatgagcaagcaggagctggatgacatcctgaagtttggaacagaggagctgttcaaggatgaaaatgaaggagagaacaaggaggaggacagcagcgtcatccactatgacaatgaggccatcgcccggctgctggacaggaaccaggatgccacagaggacacagatgtgcagaacatgaatgagtacctgagcagcttcaaggtggcccagtatgtggtgcgggaggaggacaagattgaggagattgaaagagagatcatcaagcaggaggagaatgtggaccctgactactgggagaagctgctgcggcaccactatgagcagcagcaggaggacctggccaggaacctgggcaagggcaagagggtgaggaagcaggtgaactacaatgatgctgcccaggaggaccaggacaaccagagcgagtacagcgtgggcagcgaggaggaggatgaggactttgatgagaggcctgagggccggcggcagagcaagaggcagctgagaaatgagaaggacaagcccctgccccccctgctggcccgggtgggcggcaacatcgaggtgctgggcttcaacacccggcagaggaaggccttcctgaatgctgtgatgcgctggggcatgccaccccaggatgccttcaccacccagtggctggtgcgggacctgcggggcaagacagagaaggagttcaaggcctacgtgtccctcttcatgaggcacctgtgtgagcccggggctgatggcagcgagacctttgctgatggagtgccccgggagggcctgagccggcagcaggtgctgacccgcatcggcgtgatgagcctggtgaagaagaaggtgcaggagtttgagcacatcaatggccgctggagcatgcctgagctgatgccagaccccagcgctgacagcaagaggagcagccgggccagcagccccaccaagaccagccccaccaccccagaggccagcgccaccaacagcccctgcaccagcaagccagccaccccagcccccagcgagaagggggagggcatccgcacccccctggagaaggaggaggccgagaaccaggaggagaagccagagaagaacagcagaattggagagaagatggagacagaagcagatgcccccagccctgcccccagcctgggggagcggctggagcccaggaagatccccctggaggatgaggtgcctggggtgcctggagagatggagcctgagcccggctacagaggagaccgggagaagtcagaagatgtgaagggggaccgggagctgcggcccggccccagagatgagcccaggagcaatggaagaagagaggagaagacagagaagccccgcttcatgttcaacattgctgatggcggcttcacagagctgcacaccctgtggcagaatgaggagagagctgccatcagcagcggcaagctgaatgagatctggcacagaagacatgactactggctgctggccggcatcgtgctgcacggctacgcccgctggcaggacatccagaatgatgcccagtttgccatcatcaatgagcccttcaagacagaggccaacaagggcaacttcctggagatgaagaacaagttcctggcccggcgcttcaagctgctggagcaggccctggtgattgaggagcagctgcggcgggccgcctacctgaacctgagccaggagcccgcccacccagccatggccctgcacgccaggtttgctgaggctgaatgtctggccgagagccaccagcacctgagcaaggagagcctggccggcaacaagccagccaatgctgtgctgcacaaggtgctgaaccagctggaggagctgctgagtgacatgaaggcagatgtgacccggctgcctgccaccctgagccgcatcccccccatcgccgcccggctgcagatgtctgagaggagcatcctgagccggctggccagcaagggcacagagccccaccccaccccagcctacccacctggcccctatgccaccccacctggctatggagctgccttctctgctgcccctgtgggcgccctggccgccgccggggccaactacagccagatgcctgctggcagcttcatcacagctgccaccaacggcccccctgtgctggtgaagaaggagaaggagatggtgggcgccctggtgtctgatggcctggacaggaaggagccccgggccggggaggtgatctgcattgatgactag

SEQ ID NO: 147527 - DNA, 6180 bp, synthetic construct
  misc_feature 1..6180: note = Description of Artificial Sequence: Synthetic coding sequence
  source 1..6180: mol_type = other DNA
atggccagccccctgagagatgaggaggaggaggaggaggagatggtggtgtctgaggaggaggaggaggaggaggaggagggagatgaggaggaggaggaggaggtggaggccgcagatgaagatgatgaagaagatgatgatgagggcgtgctgggccggggccctggccatgaccggggccgggacagacacagccccccaggctgccacctgttccccccacctcctcctcctcctccacccctgcccccacctcctcctcctcctcctccagacaaggatgacatccggctgctgcccagcgccctgggcgtgaagaagaggaagaggggccccaagaagcagaaggagaacaagccaggcaagcccaggaagaggaagaagagggacagcgaggaggagtttggcagcgagagagatgagtaccgggagaagtctgagagcggcggctctgaatatggcaccggccctggcaggaagagaagaaggaagcaccgggagaagaaggagaagaagaccaagaggaggaagaagggggagggagatggcggccagaagcaggtggagcagaagagcagcgccaccctgctgctgacctggggcctggaggatgtggagcacgtgttttctgaggaggactaccacaccctgaccaactacaaggccttcagccagttcatgaggcccctcatcgccaagaagaaccccaagatccccatgagcaagatgatgaccatcctgggcgccaagtggagggagttcagcgccaacaaccccttcaagggcagcgctgctgctgtggccgctgctgctgctgctgctgctgctgctgtggccgagcaggtgtctgctgctgtgtcctctgccacccccatcgcccccagcggccccccagccctgcccccacctcctgctgctgacatccagcccccacccatcagaagagccaagaccaaggagggcaaaggacctggccacaagagaagaagcaagagcccccgggtgcctgatggcaggaagaagctgcggggcaagaagatggcccccctgaagatcaagctgggcctgctgggcggcaagaggaagaagggcggcagctatgtgttccagagtgatgagggccctgagcctgaggccgaggagagtgacctggacagcggctctgtgcacagcgccagcggccgcccagatggccctgtgaggaccaagaagctgaagaggggccggcccggcaggaagaagaagaaggtgctgggctgcccagctgtggccggggaggaggaggtggatggctatgaaacagaccaccaggactactgtgaggtgtgccagcagggcggggagatcatcctgtgtgacacctgcccccgggcctaccacctggtgtgcctggaccctgagctggaccgggcccctgagggcaagtggagctgcccccactgtgagaaggagggcgtgcagtgggaggccaaggaggaggaggaggagtatgaggaggagggggaggaggagggggagaaggaggaggaggatgaccacatggagtactgccgggtgtgcaaggatggaggagagctgctgtgctgtgatgcctgcatcagcagctaccacatccactgcctgaacccccccctgcctgacatccccaatggagagtggctgtgcccccgctgcacctgccctgtgctgaagggccgggtgcagaagatcctgcactggcgctggggcgagccccctgtggccgtgcctgccccccagcaggctgatggcaacccagatgtgcccccaccccggcccctgcagggccgctctgagcgggagttctttgtgaagtgggtgggcctgagctactggcactgctcctgggccaaggagctgcagctggagatcttccacctggtgatgtacagaaactaccagaggaagaatgacatggatgagcccccacccctggactatggcagcggggaggatgatggcaagagtgacaagaggaaggtgaaggacccccactacgccgagatggaggagaagtactacagatttggcatcaagccagagtggatgacagtgcaccgcatcatcaaccacagcgtggacaagaagggcaactaccactacctggtgaagtggagggacctgccctatgaccagagcacctgggaggaggatgagatgaacatcccagaatatgaggagcacaagcagagctactggaggcaccgggagctgatcatgggagaagatcctgcccagcccaggaagtacaagaagaagaagaaggagctgcagggagatggcccccccagcagccccaccaatgaccccaccgtgaagtatgagacccagccccgcttcatcacagccactggaggcaccctgcacatgtaccagctggagggcctgaactggctgcgcttctcctgggcccagggcacagacaccatcctggctgatgagatgggcctgggcaagaccatccagaccatcgtgttcctgtacagcctgtacaaggagggccacaccaagggccccttcctggtgtctgcccccctgagcaccatcatcaactgggagcgggagttccagatgtgggcccccaagttctacgtggtgacctacaccggggacaaggacagccgggccatcatcagagaaaatgagttctcctttgaagataatgccatcaagggcggcaagaaggccttcaagatgaagcgggaggcccaggtgaagttccacgtgctgctgaccagctatgagctgatcaccatcgaccaggccgccctgggcagcatccgctgggcctgcctggtggtggatgaggcccaccggctgaagaacaaccagagcaagttcttccgggtgctgaatggctacaagattgaccacaagctgctgctgaccggcacccccctgcagaacaacctggaggagctgttccacctgctgaacttcctgaccccagagcgcttcaacaacctggagggcttcctggaggagtttgctgacatcagcaaagaagaccagatcaagaagctgcatgacctgctgggcccccacatgctgcggcggctgaaggcagatgtgttcaagaacatgcctgccaagacagagctgattgtgcgggtggagctgagccccatgcagaagaagtactacaagtacatcctgaccaggaactttgaggccctgaacagccggggcggcggcaaccaggtgtccctgctgaacatcatgatggacctgaagaagtgctgcaaccacccctacctgtttcctgtggccgccatggagagccccaagctgcccagcggggcctatgaaggaggagccctgatcaagagcagcggcaagctgatgctgctgcagaagatgctgaggaagctgaaggagcagggccaccgggtgctgatcttcagccagatgaccaagatgctggacctgctggaggacttcctggactatgagggctacaagtatgaaagaattgatggcggcatcaccggggccctgcggcaggaggccatcgaccgcttcaatgcccctggggcccagcagttctgcttcctgctgagcaccagggctgggggcctgggcatcaacctggccacagctgacaccgtcatcatctttgacagcgactggaacccccacaatgacatccaggccttcagccgggcccaccgcatcggccaggccaacaaggtgatgatctacagatttgtgacccgggcctctgtggaggagcgcatcacccaggtggccaagaggaagatgatgctgacccacctggtggtgcggcccggcctgggcagcaaggccggctccatgagcaagcaggagctggatgacatcctgaagtttggaacagaggagctgttcaaggatgaaaatgaaggagagaacaaggaggaggacagcagcgtcatccactatgacaatgaggccatcgcccggctgctggacaggaaccaggatgccacagaggacacagatgtgcagaacatgaatgagtacctgagcagcttcaaggtggcccagtatgtggtgcgggaggaggacaagattgaggagattgagcgggagatcatcaagcaggaggagaatgtggaccctgactactgggagaagctgctgcggcaccactatgagcagcagcaggaggacctggccaggaacctgggcaagggcaagagggtgaggaagcaggtgaactacaatgatgctgcccaggaggaccaggacaaccagagcgagtacagcgtgggcagcgaggaggaggatgaagattttgatgagaggcctgagggccggcggcagagcaagaggcagctgagaaatgagaaggacaagcccctgccccccctgctggcccgggtgggcggcaacatcgaggtgctgggcttcaacacccggcagaggaaggccttcctgaatgctgtgatgcgctggggcatgccaccccaggatgccttcaccacccagtggctggtgcgggacctgcggggcaagacagagaaggagttcaaggcctacgtgtccctcttcatgaggcacctgtgtgagcctggagcagatggcagcgagacctttgctgatggagtgccccgggagggcctgagccggcagcaggtgctgaccagaattggagtgatgagcctggtgaagaagaaggtgcaggagtttgagcacatcaatggccgctggagcatgcctgagctgatgccagaccccagcgctgacagcaagaggagcagccgggccagcagccccaccaagaccagccccaccaccccagaggccagcgccaccaacagcccctgcaccagcaagccagccaccccagcccccagcgagaagggggagggcatccgcacccccctggagaaggaggaggccgagaaccaggaggagaagccagagaagaacagccgcatcggggagaagatggagacagaagcagatgcccccagccctgcccccagcctgggggagcggctggagcccaggaagatccccctggaggatgaggtgcctggggtgcctggagagatggagcctgagcccggctacagaggagaccgggagaagagcgccacagagagcaccccaggagagcggggggaggagaagcccctggatggccaggagcaccgggagaggcctgagggggagaccggggacctgggcaagagagaagatgtgaagggggaccgggagctgcggcccggccccagagatgagcccaggagcaatggccggcgggaggagaagacagagaagccccgcttcatgttcaacattgctgatggcggcttcacagagctgcacaccctgtggcagaatgaggagcgggccgccatcagcagcggcaagctgaatgagatctggcacagaagacatgactactggctgctggccggcatcgtgctgcacggctacgcccgctggcaggacatccagaatgatgcccagtttgccatcatcaatgagcccttcaagacagaggccaacaagggcaacttcctggagatgaagaacaagttcctggcccggcgcttcaagctgctggagcaggccctggtgattgaggagcagctgcggcgggccgcctacctgaacctgagccaggagcccgcccacccagccatggccctgcacgccaggtttgctgaggccgagtgcctggccgagagccaccagcacctgagcaaggagagcctggccggcaacaagccagccaatgctgtgctgcacaaggtgctgaaccagctggaggagctgctgagtgacatgaaggcagatgtgacccggctgcctgccaccctgagccgcatcccccccatcgccgcccggctgcagatgtctgagaggagcatcctgagccggctggccagcaaaggaacagagccccaccccaccccagcctacccacctggcccctatgccaccccacctggctacggggccgccttctctgctgcccctgtgggcgccctggccgctgctggggccaactacagccagatgcctgctggcagcttcatcacagctgccaccaatggacctcctgtgctggtgaagaaggagaaggagatggtgggcgccctggtgtctgatggcctggacaggaaggagcccagggctggggaggtgatctgcattgatgactag

SEQ ID NO: 147528 - DNA, 5865 bp, synthetic construct
  misc_feature 1..5865: note = Description of Artificial Sequence: Synthetic coding sequence
  source 1..5865: mol_type = other DNA
atgaggggccctgtgggcacagaggaggagctgccccggctgtttgctgaggagatggagaatgaagatgagatgtctgaggaggaggatggcggcctggaggcctttgatgacttcttccctgtggagcctgtgtccctgcccaagaagaagaagcccaagaagctgaaggagaacaagtgcaagggcaagaggaagaagaaggagggcagcaatgatgagctgtctgaaaatgaggaggacctggaggagaagtctgagagcgagggcagtgactacagccccaacaagaagaagaagaagaagctgaaggacaagaaggagaagaaggccaagaggaagaagaaggatgaagatgaagatgacaatgatgatggctgcctgaaggagcccaagagcagcggccagctgatggccgagtggggcctggatgatgtggactacctgttcagcgaggaggactaccacaccctgaccaactacaaggccttcagccagttcctgcggcccctcatcgccaagaagaaccccaagatccccatgagcaagatgatgacagtgctgggcgccaagtggagggagttcagcgccaacaaccccttcaagggcagcagcgctgctgctgctgctgctgctgtggccgctgctgtggagaccgtgaccatcagcccccccctggccgtgagccccccccaggtgccccagcctgtgcccatcaggaaggccaagaccaaggagggcaagggccctggggtgaggaagaagatcaagggcagcaaggatggcaagaagaagggcaagggcaagaagacagctggcctgaagttccgctttggaggcatcagcaacaagaggaagaagggcagcagcagtgaagaagatgagcgggaggagagtgactttgattctgccagcatccacagcgcctctgtgcgctctgagtgcagcgctgccctgggcaagaagagcaagagaagaaggaagaagaagagaattgatgatggagatggctatgaaacagaccaccaggactactgtgaggtgtgccagcagggcggggagatcatcctgtgtgacacctgcccccgggcctaccacctggtgtgcctggaccctgagctggagaaggcccctgagggcaagtggagctgcccccactgtgagaaggagggcatccagtgggagcccaaggatgatgatgatgaggaggaggagggcggctgtgaggaggaggaggatgaccacatggagttctgccgggtgtgcaaggatggaggagagctgctgtgctgtgatgcctgccccagcagctaccacctgcactgcctgaacccccccctgcctgagatccccaacggggagtggctgtgcccccgctgcacctgcccccccctgaagggcaaggtgcagaggatcctgcactggcgctggacagagcccccagcccccttcatggtgggcctgcccggcccagatgtggagcccagcctgcccccacccaagcccctggagggcatccctgagcgggagttctttgtgaagtgggccggcctgagctactggcactgctcctgggtgaaggagctgcagctggagctgtaccacacagtgatgtacagaaactaccagaggaagaatgacatggatgagcccccaccatttgattatggcagcggagatgaagatggcaagtctgagaagaggaagaacaaggaccccctgtatgccaagatggaggagcgcttctaccgctatggcatcaagccagagtggatgatgatccaccgcatcctgaaccacagctttgacaagaagggagatgtgcactacctgatcaagtggaaggacctgccctatgaccagtgcacctgggagattgatgacatcgacatcccctactatgacaacctgaagcaggcctactggggccaccgggagctgatgctgggggaggacacccggctgcccaagaggctgctgaagaagggcaagaagctgagagatgacaagcaggagaagcccccagacacccccatcgtggaccccaccgtgaagtttgacaagcagccctggtacatcgacagcactggaggcaccctgcacccctaccagctggagggcctgaactggctgcgcttctcctgggcccagggcacagacaccatcctggctgatgagatgggcctgggcaagacagtgcagaccatcgtgttcctgtacagcctgtacaaggagggccacagcaagggcccctacctggtgtctgcccccctgagcaccatcatcaactgggagcgggagtttgagatgtgggccccagacttctacgtggtgacctacacaggagacaaggagagccgcagcgtcatccgggagaatgagttctcctttgaggacaatgccatccgcagcggcaagaaggtgttcaggatgaagaaggaggtgcagatcaagttccacgtgctgctgaccagctatgagctgatcaccatcgaccaggccatcctgggcagcattgagtgggcctgcctggtggtggatgaggcccaccggctgaagaacaaccagagcaagttcttccgggtgctgaacagctacaagattgactacaagctgctgctgaccggcacccccctgcagaacaacctggaggagctgttccacctgctgaacttcctgaccccagagcgcttcaacaacctggagggcttcctggaggagtttgctgacatcagcaaggaggaccagatcaagaagctgcatgacctgctgggcccccacatgctgcggcggctgaaggcagatgtgttcaagaacatgcctgccaagacagagctgattgtgcgggtggagctgagccagatgcagaagaagtactacaagttcatcctgaccaggaactttgaggccctgaacagcaagggcggcggcaaccaggtgtccctgctgaacatcatgatggacctgaagaagtgctgcaaccacccctacctgtttcctgtggccgctgtggaggcccctgtgctgcccaacggcagctatgatggcagcagcctggtgaagagcagcggcaagctgatgctgctgcagaagatgctgaagaagctgagagatgagggccaccgggtgctgatcttcagccagatgaccaagatgctggacctgctggaggacttcctggagtatgagggctacaagtatgaaagaattgatggcggcatcactggaggcctgcggcaggaggccatcgaccgcttcaatgcccctggggcccagcagttctgcttcctgctgagcacccgggccggcggcctgggcatcaacctggccacagctgacaccgtcatcatctatgacagcgactggaacccccacaatgacatccaggccttcagccgggcccacagaattggccagaacaagaaggtgatgatctacagatttgtgacccgggcctctgtggaggagcgcatcacccaggtggccaagaggaagatgatgctgacccacctggtggtgcggcccggcctgggcagcaagagcggctccatgaccaagcaggagctggatgacatcctgaagtttggaacagaggagctgttcaaggatgatgtggagggcatgatgagccagggccagaggcctgtgacccccatcccagatgtgcagagcagcaagggcggcaacctggccgccagcgccaagaagaagcacggcagcaccccacctggggacaacaaggatgtggaggacagcagcgtcatccactatgatgatgctgccatcagcaagctgctggacaggaaccaggatgccacagatgacacagagctgcagaacatgaatgagtacctgagcagcttcaaggtggcccagtatgtggtgcgggaggaggatggagtggaggaggtggagcgggagatcatcaagcaggaggagaatgtggaccctgactactgggagaagctgctgcggcaccactatgagcagcagcaggaggacctggccaggaacctgggcaagggcaagaggatcaggaagcaggtgaactacaatgatgccagccaggaggaccaggagtggcaggatgagctgagtgacaaccagagcgagtacagcatcggctctgaagatgaagatgaagattttgaggagaggcctgagggccagagcggccggcggcagagccggcggcagctgaagagtgaccgggacaagcccctgccccccctgctggcccgggtgggcggcaacatcgaggtgctgggcttcaatgcccggcagaggaaggccttcctgaatgccatcatgcgctggggcatgccaccccaggatgccttcaacagccactggctggtgcgggacctgcggggcaagtctgagaaggagttccgggcctacgtgtccctcttcatgaggcacctgtgtgagcccggggctgatggagctgagacctttgctgatggagtgccccgggagggcctgagccggcagcacgtgctgacccgcatcggcgtgatgagcctggtgaggaagaaggtgcaggagtttgaacatgtgaatggcaagtacagcaccccagacctgatccctgagggccctgagggcaagaagtctggagaggtgatcagcagtgaccccaacacccctgtgcctgccagccctgcccacctgctgcctgcccccctgggcctgcctgacaagatggaggcccagctgggctacatggatgagaaggaccccggggcccagaagccccggcagcccctggaggtgcaggccctgcctgctgccctggacagagtggagagcgaggacaagcatgagagccctgccagcaaggagcgggcccgggaggagaggcctgaggagacagagaaggccccacccagccctgagcagctgccccgggaggaggtgctgcctgagaaggagaagatcctggacaagctggagctgagcctcatccacagcagaggagacagcagcgagctgcggccagatgacaccaaggccgaggagaaggagcccatcgagacccagcagaatggagacaaggaggaggatgatgagggcaagaaggaggacaagaagggcaagttcaagttcatgttcaacattgctgatggcggcttcacagagctgcacaccctgtggcagaatgaggagagagctgctgtgtcctctgggaagatctatgacatctggcacagaagacatgactactggctgctggccggcatcgtgacccacggctacgcccgctggcaggacatccagaatgacccccgctacatgatcctgaatgagcccttcaagtctgaggtgcacaagggcaactacctggagatgaagaacaagttcctggcccggcgcttcaagctgctggagcaggccctggtgattgaggagcagctgcggcgggccgcctacctgaacatgacccaggaccccaaccacccagccatggccctgaatgcccggctggccgaggtggagtgcctggccgagagccaccagcacctgagcaaggagagcctggccggcaacaagccagccaatgctgtgctgcacaaggtgctgaaccagctggaggagctgctgagtgacatgaaggcagatgtgacccggctgcccagcatgctgagccgcatcccccctgtggccgcccggctgcagatgtctgagaggagcatcctgagccggctgaccaacagagctggggaccccaccatccagcagggcgccttcggcagcagccagatgtacagcaacaactttggccccaacttccggggccctggccctgggggcatcgtgaactacaaccagatgcccctgggcccctacgtgacagacatctag

SEQ ID NO: 147529 - DNA, 2427 bp, synthetic construct
  misc_feature 1..2427: note = Description of Artificial Sequence: Synthetic coding sequence
  source 1..2427: mol_type = other DNA
atgatctacagatttgtgacccgggcctctgtggaggagcgcatcacccaggtggccaagaggaagatgatgctgacccacctggtggtgcggcccggcctgggcagcaagagcggctccatgaccaagcaggagctggatgacatcctgaagtttggaacagaggagctgttcaaggatgatgtggagggcatgatgagccagggccagaggcctgtgacccccatcccagatgtgcagagcagcaaaggaggcaacctggccgccagcgccaagaagaagcacggcagcaccccacctggggacaacaaggatgtggaggacagcagcgtcatccactatgatgatgctgccatcagcaagctgctggacaggaaccaggatgccacagatgacacagagctgcagaacatgaatgagtacctgagcagcttcaaggtggcccagtatgtggtgcgggaggaggatggagtggaggaggtggagcgggagatcatcaagcaggaggagaatgtggaccctgactactgggagaagctgctgcggcaccactatgagcagcagcaggaggacctggccaggaacctgggcaagggcaagaggatcaggaagcaggtgaactacaatgatgccagccaggaggaccaggagtggcaggatgagctgagtgacaaccagagcgagtacagcatcggctctgaagatgaagatgaggactttgaggagaggcctgagggccagagcggccggcggcagagccggcggcagctgaagagtgaccgggacaagcccctgccccccctgctggcccgggtgggcggcaacatcgaggtgctgggcttcaatgcccggcagaggaaggccttcctgaatgccatcatgcgctggggcatgccaccccaggatgccttcaacagccactggctggtgcgggacctgcggggcaagtctgagaaggagttccgggcctacgtgtccctcttcatgaggcacctgtgtgagcctggagcagatggagctgagacctttgctgatggagtgccccgggagggcctgagccggcagcacgtgctgaccagaattggagtgatgagcctggtgaggaagaaggtgcaggagtttgagcacgtgaatggcaagtacagcaccccagacctgatccctgagggccctgagggcaagaagagcggggaggtgatcagcagtgaccccaacacccctgtgcctgccagccctgcccacctgctgcctgcccccctgggcctgcctgacaagatggaggcccagctgggctacatggatgagaaggaccccggggcccagaagccccggcagcccctggaggtgcaggccctgcctgctgccctggacagagtggagagcgaggacaagcatgagagccctgccagcaaggagcgggcccgggaggagaggcctgaggagacagagaaggccccacccagccctgagcagctgccccgggaggaggtgctgcctgagaaggagaagatcctggacaagctggagctgagcctcatccacagcagaggagacagcagcgagctgcggccagatgacaccaaggccgaggagaaggagcccatcgagacccagcagaatggagacaaggaggaggatgatgagggcaagaaggaggacaagaagggcaagttcaagttcatgttcaacattgctgatggcggcttcacagagctgcacaccctgtggcagaatgaggagagagctgctgtgagcagcggcaagatctatgacatctggcacagaagacatgactactggctgctggccggcatcgtgacccacggctacgcccgctggcaggacatccagaatgacccccgctacatgatcctgaatgagcccttcaagtctgaggtgcacaagggcaactacctggagatgaagaacaagttcctggcccggcgcttcaagctgctggagcaggccctggtgattgaggagcagctgcggcgggccgcctacctgaacatgacccaggaccccaaccacccagccatggccctgaatgcccggctggccgaggtggagtgcctggccgagagccaccagcacctgagcaaggagagcctggccggcaacaagccagccaatgctgtgctgcacaaggtgctgaaccagctggaggagctgctgagtgacatgaaggcagatgtgacccggctgcccagcatgctgagccgcatcccccctgtggccgcccggctgcagatgtctgagaggagcatcctgagccggctgaccaacagagctggggaccccaccatccagcagatcagcagccggccccgggacttccctgtgctgcagaggagcttccctgctgagccccggctgcccggccacctgcctgacccccacggccgggagaagctgccccccttctag

SEQ ID NO: 147530 - DNA, 3588 bp, synthetic construct
  misc_feature 1..3588: note = Description of Artificial Sequence: Synthetic coding sequence
  source 1..3588: mol_type = other DNA
atggtgggcctgcccggcccagatgtggagcccagcctgcccccacccaagcccctggagggcatccctgagcgggagttctttgtgaagtgggccggcctgagctactggcactgctcctgggtgaaggagctgcagctggagctgtaccacacagtgatgtacagaaactaccagaggaagaatgacatggatgagcccccaccatttgattatggcagcggagatgaagatggcaagtctgagaagaggaagaacaaggaccccctgtatgccaagatggaggagcgcttctaccgctatggcatcaagccagagtggatgatgatccaccgcatcctgaaccacagctttgacaagaagggagatgtgcactacctgatcaagtggaaggacctgccctatgaccagtgcacctgggagattgatgacatcgacatcccctactatgacaacctgaagcaggcctactggggccaccgggagctgatgctgggggaggacacccggctgcccaagaggctgctgaagaagggcaagaagctgagagatgacaagcaggagaagcccccagacacccccatcgtggaccccaccgtgaagtttgacaagcagccctggtacatcgacagcactggaggcaccctgcacccctaccagctggagggcctgaactggctgcgcttctcctgggcccagggcacagacaccatcctggctgatgagatgggcctgggcaagacagtgcagaccatcgtgttcctgtacagcctgtacaaggagggccacagcaagggcccctacctggtgtctgcccccctgagcaccatcatcaactgggagcgggagtttgagatgtgggccccagacttctacgtggtgacctacacaggagacaaggagagccgcagcgtcatccgggagaatgagttctcctttgaggacaatgccatccgcagcggcaagaaggtgttcaggatgaagaaggaggtgcagatcaagttccacgtgctgctgaccagctatgagctgatcaccatcgaccaggccatcctgggcagcattgagtgggcctgcctggtggtggatgaggcccaccggctgaagaacaaccagagcaagttcttccgggtgctgaacagctacaagattgactacaagctgctgctgaccggcacccccctgcagaacaacctggaggagctgttccacctgctgaacttcctgaccccagagcgcttcaacaacctggagggcttcctggaggagtttgctgacatcagcaaggaggaccagatcaagaagctgcatgacctgctgggcccccacatgctgcggcggctgaaggcagatgtgttcaagaacatgcctgccaagacagagctgattgtgcgggtggagctgagccagatgcagaagaagtactacaagttcatcctgaccaggaactttgaggccctgaacagcaagggcggcggcaaccaggtgtccctgctgaacatcatgatggacctgaagaagtgctgcaaccacccctacctgtttcctgtggccgctgtggaggcccctgtgctgcccaacggcagctatgatggcagcagcctggtgaagagcagcggcaagctgatgctgctgcagaagatgctgaagaagctgagagatgagggccaccgggtgctgatcttcagccagatgaccaagatgctggacctgctggaggacttcctggagtatgagggctacaagtatgaaagaattgatggcggcatcactggaggcctgcggcaggaggccatcgaccgcttcaatgcccctggggcccagcagttctgcttcctgctgagcacccgggccggcggcctgggcatcaacctggccacagctgacaccgtcatcatctatgacagcgactggaacccccacaatgacatccaggccttcagccgggcccacagaattggccagaacaagaaggtgatgatctacagatttgtgacccgggcctctgtggaggagcgcatcacccaggtggccaagaggaagatgatgctgacccacctggtggtgcggcccggcctgggcagcaagagcggctccatgaccaagcaggagctggatgacatcctgaagtttggaacagaggagctgttcaaggatgatgtggagggcatgatgagccagggccagaggcctgtgacccccatcccagatgtgcagagcagcaagggcggcaacctggccgccagcgccaagaagaagcacggcagcaccccacctggggacaacaaggatgtggaggacagcagcgtcatccactatgatgatgctgccatcagcaagctgctggacaggaaccaggatgccacagatgacacagagctgcagaacatgaatgagtacctgagcagcttcaaggtggcccagtatgtggtgcgggaggaggatggagtggaggaggtggagcgggagatcatcaagcaggaggagaatgtggaccctgactactgggagaagctgctgcggcaccactatgagcagcagcaggaggacctggccaggaacctgggcaagggcaagaggatcaggaagcaggtgaactacaatgatgccagccaggaggaccaggagtggcaggatgagctgagtgacaaccagagcgagtacagcatcggctctgaagatgaagatgaagattttgaggagaggcctgagggccagagcggccggcggcagagccggcggcagctgaagagtgaccgggacaagcccctgccccccctgctggcccgggtgggcggcaacatcgaggtgctgggcttcaatgcccggcagaggaaggccttcctgaatgccatcatgcgctggggcatgccaccccaggatgccttcaacagccactggctggtgcgggacctgcggggcaagtctgagaaggagttccgggcctacgtgtccctcttcatgaggcacctgtgtgagcccggggctgatggagctgagacctttgctgatggagtgccccgggagggcctgagccggcagcacgtgctgacccgcatcggcgtgatgagcctggtgaggaagaaggtgcaggagtttgaacatgtgaatggcaagtacagcaccccagacctgatccctgagggccctgagggcaagaagtctggagaggtgatcagcagtgaccccaacacccctgtgcctgccagccctgcccacctgctgcctgcccccctgggcctgcctgacaagatggaggcccagctgggctacatggatgagaaggaccccggggcccagaagccccggcagcccctggaggtgcaggccctgcctgctgccctggacagagtggagagcgaggacaagcatgagagccctgccagcaaggagcgggcccgggaggagaggcctgagcagaccccaccagcccaggcccagctgcggggcggccggcccctgagccctggaacagcccctggctggcagcgggagggccctggcctgggcgcccggcgggcccggagccccagccagggcggccctgggggcggcggcagcagctttggcagccaggcccccctgtag

SEQ ID NO: 147531 - DNA, 2427 bp, synthetic construct; identical to SEQ ID NO: 147529
  misc_feature 1..2427: note = Description of Artificial Sequence: Synthetic coding sequence
  source 1..2427: mol_type = other DNA

SEQ ID NO: 147532 - DNA, 3288 bp, synthetic construct
  misc_feature 1..3288: note = Description of Artificial Sequence: Synthetic coding sequence
  source 1..3288: mol_type = other DNA
atgatccaccgcatcctgaaccacagctttgacaagaagggagatgtgcactacctgatcaagtggaaggacctgccctatgaccagtgcacctgggagattgatgacatcgacatcccctactatgacaacctgaagcaggcctactggggccaccgggagctgatgctgggggaggacacccggctgcccaagaggctgctgaagaagggcaagaagctgagagatgacaagcaggagaagcccccagacacccccatcgtggaccccaccgtgaagtttgacaagcagccctggtacatcgacagcactggaggcaccctgcacccctaccagctggagggcctgaactggctgcgcttctcctgggcccagggcacagacaccatcctggctgatgagatgggcctgggcaagacagtgcagaccatcgtgttcctgtacagcctgtacaaggagggccacagcaagggcccctacctggtgtctgcccccctgagcaccatcatcaactgggagcgggagtttgagatgtgggccccagacttctacgtggtgacctacacaggagacaaggagagccgcagcgtcatccgggagaatgagttctcctttgaggacaatgccatccgcagcggcaagaaggtgttcaggatgaagaaggaggtgcagatcaagttccacgtgctgctgaccagctatgagctgatcaccatcgaccaggccatcctgggcagcattgagtgggcctgcctggtggtggatgaggcccaccggctgaagaacaaccagagcaagttcttccgggtgctgaacagctacaagattgactacaagctgctgctgaccggcacccccctgcagaacaacctggaggagctgttccacctgctgaacttcctgaccccagagcgcttcaacaacctggagggcttcctggaggagtttgctgacatcagcaaggaggaccagatcaagaagctgcatgacctgctgggcccccacatgctgcggcggctgaaggcagatgtgttcaagaacatgcctgccaagacagagctgattgtgcgggtggagctgagccagatgcagaagaagtactacaagttcatcctgaccaggaactttgaggccctgaacagcaagggcggcggcaaccaggtgtccctgctgaacatcatgatggacctgaagaagtgctgcaaccacccctacctgtttcctgtggccgctgtggaggcccctgtgctgcccaacggcagctatgatggcagcagcctggtgaagagcagcggcaagctgatgctgctgcagaagatgctgaagaagctgagagatgagggccaccgggtgctgatcttcagccagatgaccaagatgctggacctgctggaggacttcctggagtatgagggctacaagtatgaaagaattgatggcggcatcactggaggcctgcggcaggaggccatcgaccgcttcaatgcccctggggcccagcagttctgcttcctgctgagcacccgggccggcggcctgggcatcaacctggccacagctgacaccgtcatcatctatgacagcgactggaacccccacaatgacatccaggccttcagccgggcccacagaattggccagaacaagaaggtgatgatctacagatttgtgacccgggcctctgtggaggagcgcatcacccaggtggccaagaggaagatgatgctgacccacctggtggtgcggcccggcctgggcagcaagagcggctccatgaccaagcaggagctggatgacatcctgaagtttggaacagaggagctgttcaaggatgatgtggagggcatgatgagccagggccagaggcctgtgacccccatcccagatgtgcagagcagcaagggcggcaacctggccgccagcgccaagaagaagcacggcagcaccccacctggggacaacaaggatgtggaggacagcagcgtcatccactatgatgatgctgccatcagcaagctgctggacaggaaccaggatgccacagatgacacagagctgcagaacatgaatgagtacctgagcagcttcaaggtggcccagtatgtggtgcgggaggaggatggagtggaggaggtggagcgggagatcatcaagcaggaggagaatgtggaccctgactactgggagaagctgctgcggcaccactatgagcagcagcaggaggacctggccaggaacctgggcaagggcaagaggatcaggaagcaggtgaactacaatgatgccagccaggaggaccaggagtggcaggatgagctgagtgacaaccagagcgagtacagcatcggctctgaagatgaagatgaagattttgaggagaggcctgagggccagagcggccggcggcagagccggcggcagctgaagagtgaccgggacaagcccctgccccccctgctggcccgggtgggcggcaacatcgaggtgctgggcttcaatgcccggcagaggaaggccttcctgaatgccatcatgcgctggggcatgccaccccaggatgccttcaacagccactggctggtgcgggacctgcggggcaagtctgagaaggagttccgggcctacgtgtccctcttcatgaggcacctgtgtgagcccggggctgatggagctgagacctttgctgatggagtgccccgggagggcctgagccggcagcacgtgctgacccgcatcggcgtgatgagcctggtgaggaagaaggtgcaggagtttgaacatgtgaatggcaagtacagcaccccagacctgatccctgagggccctgagggcaagaagtctggagaggtgatcagcagtgaccccaacacccctgtgcctgccagccctgcccacctgctgcctgcccccctgggcctgcctgacaagatggaggcccagctgggctacatggatgagaaggaccccggggcccagaagccccggcagcccctggaggtgcaggccctgcctgctgccctggacagagtggagagcgaggacaagcatgagagccctgccagcaaggagcgggcccgggaggagaggcctgaggagacagagaaggccccacccagccctgagcagctgccccgggccagctgcagcgtgacccaggccggcgtgcagtggaggcaccggctgatgggcgccttcatcagcagcgcccaggccaccctgcccccccagctgcctgagcagaggcgctgcttcctgcggcggcggcgctcctggacctcctggagctag

SEQ ID NO: 147533 - DNA, 3258 bp, synthetic construct
  misc_feature 1..3258: note = Description of Artificial Sequence: Synthetic coding sequence
  source 1..3258: mol_type = other DNA
atgatccaccgcatcctgaaccacagctttgacaagaagggagatgtgcactacctgatcaagtggaaggacctgccctatgaccagtgcacctgggagattgatgacatcgacatcccctactatgacaacctgaagcaggcctactggggccaccgggagctgatgctgggggaggacacccggctgcccaagaggctgctgaagaagggcaagaagctgagagatgacaagcaggagaagcccccagacacccccatcgtggaccccaccgtgaagtttgacaagcagccctggtacatcgacagcactggaggcaccctgcacccctaccagctggagggcctgaactggctgcgcttctcctgggcccagggcacagacaccatcctggctgatgagatgggcctgggcaagacagtgcagaccatcgtgttcctgtacagcctgtacaaggagggccacagcaagggcccctacctggtgtctgcccccctgagcaccatcatcaactgggagcgggagtttgagatgtgggccccagacttctacgtggtgacctacacaggagacaaggagagccgcagcgtcatccgggagaatgagttctcctttgaggacaatgccatccgcagcggcaagaaggtgttcaggatgaagaaggaggtgcagatcaagttccacgtgctgctgaccagctatgagctgatcaccatcgaccaggccatcctgggcagcattgagtgggcctgcctggtggtggatgaggcccaccggctgaagaacaaccagagcaagttcttccgggtgctgaacagctacaagattgactacaagctgctgctgaccggcacccccctgcagaacaacctggaggagctgttccacctgctgaacttcctgaccccagagcgcttcaacaacctggagggcttcctggaggagtttgctgacatcagcaaggaggaccagatcaagaagctgcatgacctgctgggcccccacatgctgcggcggctgaaggcagatgtgttcaagaacatgcctgccaagacagagctgattgtgcgggtggagctgagccagatgcagaagaagtactacaagttcatcctgaccaggaactttgaggccctgaacagcaagggcggcggcaaccaggtgtccctgctgaacatcatgatggacctgaagaagtgctgcaaccacccctacctgtttcctgtggccgctgtggaggcccctgtgctgcccaacggcagctatgatggcagcagcctggtgaagagcagcggcaagctgatgctgctgcagaagatgctgaagaagctgagagatgagggccaccgggtgctgatcttcagccagatgaccaagatgctggacctgctggaggacttcctggagtatgagggctacaagtatgaaagaattgatggcggcatcactggaggcctgcggcaggaggccatcgaccgcttcaatgcccctggggcccagcagttctgcttcctgctgagcacccgggccggcggcctgggcatcaacctggccacagctgacaccgtcatcatctatgacagcgactggaacccccacaatgacatccaggccttcagccgggcccacagaattggccagaacaagaaggtgatgatctacagatttgtgacccgggcctctgtggaggagcgcatcacccaggtggccaagaggaagatgatgctgacccacctggtggtgcggcccggcctgggcagcaagagcggctccatgaccaagcaggagctggatgacatcctgaagtttggaacagaggagctgttcaaggatgatgtggagggcatgatgagccagggccagaggcctgtgacccccatcccagatgtgcagagcagcaagggcggcaacctggccgccagcgccaagaagaagcacggcagcaccccacctggggacaacaaggatgtggaggacagcagcgtcatccactatgatgatgctgccatcagcaagctgctggacaggaaccaggatgccacagatgacacagagctgcagaacatgaatgagtacctgagcagcttcaaggtggcccagtatgtggtgcgggaggaggatggagtggaggaggtggagcgggagatcatcaagcaggaggagaatgtggaccctgactactgggagaagctgctgcggcaccactatgagcagcagcaggaggacctggccaggaacctgggcaagggcaagaggatcaggaagcaggtgaactacaatgatgccagccaggaggaccaggagtggcaggatgagctgagtgacaaccagagcgagtacagcatcggctctgaagatgaagatgaagattttgaggagaggcctgagggccagagcggccggcggcagagccggcggcagctgaagagtgaccgggacaagcccctgccccccctgctggcccgggtgggcggcaacatcgaggtgctgggcttcaatgcccggcagaggaaggccttcctgaatgccatcatgcgctggggcatgccaccccaggatgccttcaacagccactggctggtgcgggacctgcggggcaagtctgagaaggagttccgggcctacgtgtccctcttcatgaggcacctgtgtgagcccggggctgatggagctgagacctttgctgatggagtgccccgggagggcctgagccggcagcacgtgctgacccgcatcggcgtgatgagcctggtgaggaagaaggtgcaggagtttgaacatgtgaatggcaagtacagcaccccagacctgatccctgagggccctgagggcaagaagtctggagaggtgatcagcagtgaccccaacacccctgtgcctgccagccctgcccacctgctgcctgcccccctgggcctgcctgacaagatggaggcccagctgggctacatggatgagaaggaccccggggcccagaagccccggcagcccctggaggtgcaggccctgcctgctgccctggacagagtggagagcgaggacaagcatgagagccctgccagcaaggagcgggcccgggaggagaggcctgaggagacagagaaggccccacccagccctgagcagctgccccgggccagctgcagcgtgacccaggccggcgtgcagtggaggcacctgggctcctgggagcccctgagcccccggctgaagaggcccagccacctgtccttcctgaacagaggaggagccagctag

SEQ ID NO: 147534 - DNA, 8994 bp, synthetic construct
  misc_feature 1..8994: note = Description of Artificial Sequence: Synthetic coding sequence
  source 1..8994: mol_type = other DNA
atggctgaccccggcatgatgagcctgtttggagaagatggcaacatcttcagcgagggcctggagggcctgggggagtgtggctacccagaaaatcctgtgaaccccatgggccagcagatgcccatcgaccagggctttgccagcctgcagcccagcctgcaccaccccagcaccaaccagaaccagaccaagctgacccactttgaccactacaaccagtatgagcagcagaagatgcacctgatggaccagcccaacaggatgatgagcaacaccccaggaaatggcctggccagcccccacagccagtaccacaccccacctgtgccccaggtgccccatggaggcagcggcggcggccagatgggcgtgtacccaggcatgcagaatgaaagacatggccagagctttgtggacagcagctccatgtggggccccagggctgtgcaggtgcctgaccagatccgggccccctaccagcagcagcagccccagccccagcccccccagcctgcccccagcggccccccagcccagggccacccccagcacatgcagcagatgggcagctacatggcccggggggacttctccatgcagcagcacggccagccccagcagaggatgagccagttcagccagggccaggagggcctgaaccagggcaaccccttcatcgccaccagcggccctggccacctgagccacgtgccccagcagagccccagcatggcccccagcctgcggcacagcgtgcagcagttccaccaccaccccagcacagccctgcatggagagagcgtggcccacagcccccgcttcagccccaaccccccccagcagggcgctgtgcggccccagaccctgaacttcagcagccgcagccagacagtgcccagccccaccatcaacaacagcggccagtacagccgctacccctacagcaacctgaaccagggcctggtgaacaacacaggcatgaaccagaacctgggcctgaccaacaacacccccatgaaccagagcgtgccccgctacccaaatgctgtgggcttccccagcaacagcggccagggcctgatgcaccagcagcccatccaccccagcggcagcctgaaccagatgaacacccagaccatgcaccccagccagccccagggcacctacgccagccccccacccatgagccccatgaaggccatgagcaacccagctggcaccccaccaccccaggtgcggcccggcagcgctggcatccccatggaggtgggcagctaccccaacatgccccacccccagcccagccaccagcccccaggggccatgggcatcggccagaggaacatgggccccaggaacatgcagcagagccggcccttcatcggcatgagcagcgccccccgggagctgaccggccacatgaggcccaacggctgccctggggtgggcctgggggacccccaggccatccaggagcggctcatccctggccagcagcaccctggccagcagcccagcttccagcagctgcccacctgcccccccctgcagccccaccctggcctgcaccaccagagcagccccccccacccccaccaccagccctgggcccagctgcaccccagcccccagaacaccccccagaaggtgcctgtgcaccagcacagccccagcgagcccttcctggagaagcctgtgcctgacatgacccaggtgtctggccccaatgcccagctggtgaagagtgatgactacctgcccagcattgagcagcagccccagcagaagaagaagaagaagaagaacaaccacatcgtggccgaggaccccagcaaaggatttgggaaggatgacttccctggaggagtggacaaccaggagctgaacagaaacagcctggatggcagccaggaggagaagaagaagaagaagaggagcaaggccaagaaggaccccaaggagcccaaggagcccaaggagaagaaggagcccaaggagcccaagacccccaaggcccccaagatccccaaggagcccaaggagaagaaggccaagacagccacccccaagcccaagagcagcaagaagagcagcaacaagaagccagattctgaggccagcgccctgaagaagaaggtgaacaagggcaagacagagggctctgaaaattctgacctggacaagaccccaccacccagccccccaccagaagaagatgaagatcctggggtgcagaagaggaggagcagccggcaggtgaagaggaagcgctacacagaggacctggagttcaagatcagtgatgaggaggctgatgatgctgatgctgctggccgggacagccccagcaacaccagccagagcgagcagcaggagagcgtggatgctgagggccctgtggtggagaagatcatgagcagccgctctgtgaagaagcagaaggagagcggggaggaggtggagattgaggagttctacgtgaagtacaagaacttctcctacctgcactgccagtgggccagcattgaggacctggagaaggacaagaggatccagcagaagatcaagcgcttcaaggccaagcagggccagaacaagttcctgtctgaaattgaagatgagctgttcaacccagactatgtggaggtggaccgcatcatggactttgcccggagcacagatgacagaggagagcctgtgacccactacctggtgaagtggtgcagcctgccctatgaggacagcacctgggagcggcggcaggacatcgaccaggccaagattgaggagtttgagaagctgatgagccgggagcctgagacagagcgggtggagcggcccccagcagatgactggaagaagtctgagagcagccgggagtacaagaacaacaacaagctgcgggagtaccagctggagggcgtgaactggctgctcttcaactggtacaacatgaggaactgcatcctggctgatgagatgggcctgggcaagaccatccagagcatcaccttcctgtatgagatctacctgaagggcatccacggccccttcctggtgattgcccccctgagcaccatccccaactgggagcgggagttccgcacctggacagagctgaatgtggtggtgtaccacggcagccaggccagcaggaggaccatccagctgtatgagatgtacttcaaggacccccagggccgggtcatcaagggcagctacaagttccacgccatcatcaccacctttgagatgatcctgacagactgcccagagctgaggaacatcccctggaggtgtgtggtgattgatgaggcccaccggctgaagaacagaaactgcaagctgctggagggcctgaagatgatggacctggagcacaaggtgctgctgaccggcacccccctgcagaacacagtggaggagctgttcagcctgctgcacttcctggagcccagccgcttccccagcgagaccaccttcatgcaggagtttggagacctgaagacagaggagcaggtgcagaagctgcaggccatcctgaagcccatgatgctgcggcggctgaaggaggatgtggagaagaacctggcccccaaggaggagaccatcatcgaggtggagctgaccaacatccagaagaagtactaccgggccatcctggagaagaacttcaccttcctgagcaaaggaggcggccaggccaacgtgcccaacctgctgaacaccatgatggagctgaggaagtgctgcaaccacccctacctgatcaatggagctgaggagaagatcctggaggagttcaaggagacccacaatgctgagagcccagacttccagctgcaggccatgatccaggccgccggcaagctggtgctgattgacaagctgctgcccaagctgaaggccggcggccaccgggtgctgatcttcagccagatggtgcgctgcctggacatcctggaggactacctgatccagaggcgctacccctatgaaagaattgatggccgggtgcggggcaacctgcggcaggccgccatcgaccgcttcagcaagccagacagcgacagatttgtgttcctgctgtgcacccgggccggcggcctgggcatcaacctgacagctgctgacacctgcatcatctttgacagcgactggaacccccagaatgacctgcaggcccaggcccgctgccacagaattggccagagcaagtctgtgaagatctaccgcctcatcaccagaaattcctatgaaagagagatgtttgacaaggccagcctgaagctgggcctggacaaggctgtgctgcagagcatgagcggccgggagaatgccaccaacggggtgcagcagctgagcaagaaggagattgaggacctgctgaggaagggggcctatggagccctgatggatgaggaggatgagggcagcaagttctgtgaagaagatattgaccagatcctgctgcggaggacccacaccatcaccatcgagagcgagggcaagggcagcacctttgccaaggccagctttgtggccagcggcaacagaacagacatcagcctggatgaccccaacttctggcagaagtgggccaagaaggccgagctggacattgatgccctgaatggaagaaacaacctggtgattgacaccccccgggtgaggaagcagacccggctgtacagcgctgtgaaggaggatgagctgatggagttcagtgacctggagagtgacagcgaggagaagccctgtgccaagccccggcggccccaggacaagagccagggctacgcccggtctgagtgcttccgggtggagaagaacctgctggtgtatggctggggccgctggacagacatcctgagccacggccgctacaagaggcagctgacagagcaggatgtggagaccatctgcaggaccatcctggtgtactgcctgaaccactacaagggagatgagaacatcaagagcttcatctgggacctgatcacccccacagcagatggccagacccgggccctggtgaaccacagcggcctgagcgcccctgtgccccggggcaggaagggcaagaaggtgaaggcccagagcacccagcctgtggtgcaggatgctgactggctggccagctgcaacccagatgccctcttccaggaggacagctacaagaagcacctgaagcaccactgcaacaaggtgctgctgcgggtgaggatgctgtactacctgcggcaggaggtgattggagaccaggccgacaagatcctggagggcgctgacagcagcgaggctgatgtgtggatccctgagcccttccacgccgaggtgcctgctgactggtgggacaaggaggccgacaagagcctgctgattggagtcttcaagcacggctatgagaagtacaacagcatgagagctgaccctgccctgtgcttcctggagcgggtgggcatgccagatgccaaggccatcgctgctgagcagaggggcacagacatgctggctgatggaggagatggaggagaatttgacagagaagatgaagatcctgagtacaagcccaccaggacccccttcaaggatgaaattgatgaatttgccaacagccccagcgaggacaaggaggagagcatggagatccacgccaccgggaagcacagcgagagcaatgctgagctgggccagctgtactggcccaacaccagcaccctgaccacccggctgcggcggctcatcacagcctaccagaggagctacaagaggcagcagatgaggcaggaggccctgatgaagacagacagaagaagaagaagaccccgggaggaggtgcgggccctggaggccgagcgggaggccatcatcagcgagaagaggcagaagtggacccggcgggaggaggccgacttctacagagtggtgtccacctttggagtcatctttgatcctgtgaagcagcagtttgactggaaccagttccgggcctttgcccggctggacaagaagagtgatgagagcctggagaagtacttcagctgctttgtggccatgtgcagaagagtgtgcaggatgcctgtgaagccagatgatgagcccccagacctgagcagcatcatcgagcccatcacagaggagcgggccagcaggaccctgtaccgcatcgagctgctgaggaagatccgggagcaggtgctgcaccacccccagctgggggagcggctgaagctgtgccagcccagcctggacctgcctgagtggtgggagtgtggcagacatgaccgggacctgctggtgggcgccgccaagcatggagtgtccaggacagactaccacatcctgaatgaccctgagctgtccttcctggatgcccacaagaactttgcccagaacagaggagctggcaacaccagcagcctgaaccccctggccgtgggctttgtgcagaccccacctgtgatcagcagcgcccacatccaggatgagcgggtgctggagcaggccgagggcaaggtggaggagccagaaaatcctgctgccaaggagaagtgtgagggcaaggaggaggaggaggagacagatggcagcggcaaggagagcaagcaggagtgtgaggccgaggccagctctgtgaagaatgagctgaagggcgtggaggtgggcgctgacaccggcagcaagagcatcagcgagaagggctctgaagaagatgaggaggagaagctggaggatgatgacaagtctgaggagagcagccagcctgaggccggggctgtgtcccggggcaagaactttgatgaggagagcaatgcctccatgagcacagccagagatgagaccagagatggcttctacatggaggatggagaccccagcgtggcccagctgctgcacgagaggacctttgccttctccttctggcccaaggacagagtgatgatcaaccggctggacaacatctgtgaggccgtgctgaagggcaagtggcctgtgaacagacggcagatgtttgacttccagggcctcatccctggctacacccccaccaccgtggacagccccctgcagaagaggagctttgctgagctgtccatggtgggccaggccagcatcagcggcagcgaggacatcaccaccagcccccagctgagcaaagaagatgccctgaacctgtctgtgccccggcagaggagaagaagaagaaggaagattgaaattgaagctgagcgggccgccaagagaagaaacctgatggagatggtggcccagctgcgggagagccaggtggtgtctgaaaatggccaggagaaggtggtggacctgagcaaggccagccgggaggccaccagcagcaccagcaacttcagcagcctgagcagcaagttcatcctgcccaacgtgtccacccctgtgtctgatgccttcaagacccagatggagctgctgcaggccggcctgagcaggacccccaccaggcacctgctgaatggcagcctggtggatggagagccccccatgaagagaagaagaggaagaaggaagaatgtggagggcctggacctgctcttcatgagccacaagaggaccagcctgtctgcagaagatgctgaggtgaccaaggcctttgaagaagatattgagaccccacccaccaggaacatccccagccctggccagctggaccctgacacccgcatccctgtgatcaacctggaggatggcacccggctggtgggagaagatgcccccaagaacaaggacctggtggagtggctgaagctgcaccccacctacacagtggacatgcccagctatgtgcccaagaatgctgatgtgctcttcagcagcttccagaagcccaagcagaagaggcaccgctgcaggaaccccaacaagctggacatcaacaccctgaccggggaggagcgggtgcctgtggtgaacaagagaaatggcaagaagatgggcggggccatggccccacccatgaaggacctgccccgctggctggaggagaaccctgagtttgctgtggccccagactggacagacatcgtgaagcagagcggctttgtgcctgagagcatgtttgaccggctgctgactggacctgtggtgcggggggagggcgccagccggcggggcagaagacccaagtcagaaattgcccgggctgctgctgctgctgctgctgtggccagcaccagcggcatcaaccccctgctggtgaacagcctgtttgctggcatggacctgaccagcctgcagaacctgcagaacctgcagagcctgcagctggccggcctgatgggcttccccccaggcctggccacagctgccacagctggaggagatgccaagaacccagctgctgtgctgcccctgatgctgcccggcatggccggcctgcccaacgtgtttggcctgggcggcctgctgaacaaccccctgtctgctgccaccggcaacaccaccacagccagcagccagggcgagcctgaggacagcaccagcaagggggaggagaagggaaatgaaaatgaagatgagaacaaggacagcgagaagagcacagatgctgtgtctgctgctgacagcgccaatggatctgtgggcgccgccacagccccagctggcctgcccagcaaccccctggccttcaaccccttcctgctgagcaccatggcccctggcctcttctaccccagcatgttcctgcccccaggcctgggcggcctgaccctgcccggcttccctgccctggccggcctgcagaatgctgtgggcagcagcgaggagaaggctgctgacaaggccgagggcggccccttcaaggatggagagaccctggagggcagtgatgctgaggagagcctggacaagacagctgagagcagcctgctggaggatgaaattgcccagggcgaggagctggacagcctggatggaggagatgaaattgaaaataatgaaaatgatgaatag

SEQ ID NO: 147535 - DNA, 8994 bp, synthetic construct; identical to SEQ ID NO: 147534
  misc_feature 1..8994: note = Description of Artificial Sequence: Synthetic coding sequence
  source 1..8994: mol_type = other DNA

SEQ ID NO: 147536 - DNA, 102 bp, synthetic construct
  misc_feature 1..102: note = Description of Artificial Sequence: Synthetic coding sequence
  source 1..102: mol_type = other DNA
atggctgaccccggcatgatgagcctgtttggagaagatggcaacatcttcagcgagggcctggagggcctgggggagtgtggctacccagagaacccctag

SEQ ID NO: 147537 - DNA, 6906 bp, synthetic construct
  misc_feature 1..6906: note = Description of Artificial Sequence: Synthetic coding sequence
  source 1..6906: mol_type = other DNA
aaaggagagagcaagaggatcaccctggtgctgcagcagccccagagcggcggcccccagggccaccgccacgtggtgctgggcagcctgcccgggaagatcgtgctgcagggcaaccagctggccgccctgacccaggccaagaatgcccagggccagcctgccaaggtggtgaccatccagctgcaggtgcagcagccccagcagaagatccagatcgtgccccagccccccagcagccagccccagccccagcagccccccagcacccagcctgtgaccctgagctctgtgcagcaggcccagatcatgggccctggccagagccctggccagaggctgtctgtgcctgtgaaggtggtgctgcagccccaggccggcagcagccagggcgccagcagcggcctgtctgtggtgaaggtgctgagcgccagcgaggtggccgccctgagcagccctgccagcagcgccccccacagcggcggcaagacaggcatggaggagaacagaaggctggagcaccagaagaagcaggagaaggccaaccgcatcgtggccgaggccatcgcccgggcccgggcccggggggagcagaacatcccccgggtgctgaatgaagatgagctgcccagcgtgcggcctgaggaggagggggagaagaagaggaggaagaagtctgctggggagcggctgaaggaggagaagcccaagaagagcaagaccagcggggccagcaagaccaagggcaagagcaagctgaacaccatcacccctgtggtgggcaagaagaggaagaggaacaccagcagtgacaacagtgatgtggaggtgatgcctgcccagagccccagagaagatgaggagagcagcatccagaagaggaggagcaaccggcaggtgaagaggaagaagtacacagaggacctggacatcaagatcacagatgatgaggaggaggaggaggtggatgtgacaggccccatcaagccagagcccatcctgcctgagcctgtgcaggagccagatggagagaccctgcccagcatgcagttctttgtggagaaccccagtgaagaagatgctgccatcgtggacaaggtgctgtccatgagaattgtgaagaaggagctgcccagcggccagtacacagaagctgaggagttctttgtgaagtacaagaactacagctacctgcactgtgagtgggccaccatcagccagctggagaaggacaagaggatccaccagaagctgaagcgcttcaagaccaagatggcccagatgaggcacttcttccatgaagatgaggagcccttcaacccagactatgtggaggtggaccgcatcctggatgagagccacagcattgacaaggacaacggggagcctgtgatctactacctggtgaagtggtgcagcctgccctatgaggacagcacctgggagctgaaggaggatgtggatgagggcaagatccgggagttcaagaggatccagagccgccaccctgagctgaagagggtgaaccggccccaggccagcgcctggaagaagctggagctgagccatgagtacaagaacagaaaccagctgcgggagtaccagctggagggcgtgaactggctgctcttcaactggtacaaccggcagaactgcatcctggctgatgagatgggcctgggcaagaccatccagagcatcgccttcctgcaggaggtgtacaacgtgggcatccacggccccttcctggtgattgcccccctgagcaccatcaccaactgggagcgggagttcaacacctggacagagatgaacaccatcgtgtaccacggcagcctggccagccggcagatgatccagcagtatgagatgtactgcaaggacagccggggccgcctcatccctggggcctacaagtttgatgccctgatcaccacctttgagatgatcctgagtgactgcccagagctgcgggagattgagtggcgctgcgtcatcattgatgaggcccaccggctgaagaacagaaactgcaagctgctggacagcctgaagcacatggacctggagcacaaggtgctgctgaccggcacccccctgcagaacacagtggaggagctgttcagcctgctgcacttcctggagcccagccagttccccagcgagagcgagttcctgaaggactttggagacctgaagacagaggagcaggtgcagaagctgcaggccatcctgaagcccatgatgctgcggcggctgaaggaggatgtggagaagaacctggcccccaagcaggagaccatcatcgaggtggagctgaccaacatccagaagaagtactaccgggccatcctggagaagaacttctccttcctgagcaagggggccggccacaccaacatgcccaacctgctgaacaccatgatggagctgaggaagtgctgcaaccacccctacctgatcaacggggctgaggagaagatcctgacagagttccgggaggcctgccacatcatcccccatgacttccacctgcaggccatggtgcgctctgctgggaagctggtgctgattgacaagctgctgcccaagctgaaggccggcggccacaaggtgctgatcttcagccagatggtgcgctgcctggacatcctggaggactacctgatccagaggcgctacctgtatgaaagaattgatggccgggtgcggggcaacctgcggcaggccgccatcgaccgcttcagcaagccagacagcgacagatttgtgttcctgctgtgcaccagggctgggggcctgggcatcaacctgacagctgctgacacctgcatcatctttgacagcgactggaacccccagaatgacctgcaggcccaggcccgctgccaccgcatcggccagagcaaggctgtgaaggtgtaccgcctcatcaccaggaacagctatgagcgggagatgtttgacaaggccagcctgaagctgggcctggacaaggctgtgctgcagagcatgagcggcagagatggcaacatcaccggcatccagcagttcagcaagaaggagattgaggacctgctgaggaaaggagcctatgctgccatcatggaggaggatgatgagggcagcaagttctgtgaggaggacatcgaccagatcctgctgcggaggaccaccaccatcaccattgaaagtgagggcaagggcagcacctttgccaaggccagctttgtggcctctgaaaatagaacagacatcagcctggatgaccccaacttctggcagaagtgggccaagaaggctgacctggacatggacctgctgaacagcaagaacaacctggtgattgacaccccccgggtgaggaagcagaccaggcacttcagcaccctgaaggatgatgacctggtggagttcagtgacctggagagtgaagatgatgagcggcccaggagcagaagacatgacagacaccacgcctacggccgcacagactgcttccgggtggagaagcacctgctggtgtatggctggggccgctggagggacatcctgagccacggccgcttcaagaggaggatgacagaaagagatgtggagaccatctgccgggccatcctggtgtactgcctgctgcactacagaggagatgagaacatcaagggcttcatctgggacctgatcagccctgcagaaaatggcaagaccaaggagctgcagaaccacagcggcctgagcatccctgtgccccggggcaggaagggcaagaaggtgaagagccagagcacctttgacatccacaaggctgactggatcaggaagtacaacccagacaccctcttccaggatgagagctacaagaagcacctgaagcaccagtgcaacaaggtgctgctgcgggtgaggatgctgtactacctgcggcaggaggtgattggagaccaggccgagaaggtgctgggcggggccatcgccagcgagattgacatctggttccctgtggtggaccagctggaggtgcccaccacctggtgggacagcgaggccgacaagagcctgctgattggagtcttcaagcacggctatgagaagtacaacaccatgagagctgaccctgccctgtgcttcctggagaaggccggccgcccagatgacaaggccatcgctgctgagcaccgggtgctggacaacttcagtgacatcgtggagggcgtggactttgacaaggactgtgaggaccctgagtacaagcccctgcagggcccccccaaggaccaggatgatgaaggagaccccctgatgatgatggatgaggagatctctgtgattgatggagatgaggcccaggtgacccagcagcccggccacctgttctggcccccaggcagcgccctgacagcccggctgcggcggctggtgacagcctaccagaggagctacaagcgggagcagatgaagattgaagctgctgagcggggggacagaagaagaagaagatgtgaggccgccttcaagctgaaggagatcgcccggcgggagaagcagcagcgctggacccggcgggagcagacagacttctacagagtggtgtccacctttggagtggagtatgaccctgacaccatgcagttccactgggaccgcttccgcacctttgcccggctggacaagaagacagatgagagcctgaccaagtacttccacggctttgtggccatgtgccggcaggtgtgccgcctgcccccagctgctggagatgagcccccagaccccaacctcttcatcgagcccatcacagaggagcgggccagcaggaccctgtaccgcatcgagctgctgcggcggctgcgggagcaggtgctgtgccaccccctgctggaggaccggctggccctgtgccagcccccaggccctgagctgcccaagtggtgggagcctgtgagacatgatggagagctgctgcggggagctgcccggcatggagtgtcccagacagactgcaacatcatgcaggaccctgacttctccttcctggccgccaggatgaactacatgcagaaccaccaggccggggccccagcccccagcctgagccgctgcagcacccccctgctgcaccagcagtacaccagcaggacagccagccccctgcccctgcggccagatgcccctgtggagaagagccctgaggagacagccacccaggtgcccagcctggagagcctgaccctgaagctggagcacgaggtggtggcccggagccggcccaccccccaggactatgagatgagggtgagccccagcgacaccacccccctggtgagccgctctgtgccccctgtgaagctggaggatgaagatgacagcgacagcgagctggacctgagcaagctgagccccagcagcagcagcagcagcagcagcagcagcagcagcagcagcacagatgaaagtgaagatgagaaggaggagaagctgacagaccagagccgcagcaagctgtatgatgaggagagcctgctgagcctgaccatgagccaggacggcttccccaatgaagatggagagcagatgaccccagagctgctgctgctgcaggagcggcagagggccagcgagtggcccaaggacagagtgctgatcaacagaattgacctggtgtgccaggccgtgctgagcggcaagtggcccagcagccgccgcagccaggagatggtgactggaggcatcctgggccctggcaaccacctgctggacagccccagcctgaccccaggagaatatggagacagccctgtgcccacccccaggagcagcagcgctgcctccatggccgaggaggaggccagcgctgtgtccacagctgctgcccagttcaccaagctgcggcggggcatggatgagaaggagttcaccgtgcagatcaaggatgaggagggcctgaagctgaccttccagaagcacaagctgatggccaatggagtgatgggagatggccaccccctcttccacaagaagaagggcaacaggaagaagctggtggagctggaggtggagtgcatggaggagcccaaccacctggatgtggacctggagacccgcatccctgtgatcaacaaggtggatggcaccctgctggtgggagaagatgcccccaggagagctgagctggagatgtggctgcagggccaccctgagtttgctgtggacccccgcttcctggcctacatggaggacaggaggaagcagaagtggcagcgctgcaagaagaacaacaaggccgagctgaactgcctgggcatggagcctgtgcagacagccaacagcagaaatggcaagaagggccaccacacagagaccgtcttcaacagagtgctgcccggccccatcgcccctgagagcagcaagaagagggcccggaggatgaggccagacctgagcaagatgatggccctgatgcagggcggcagcacaggcagcctgagcctgcacaacaccttccagcacagcagcagcggcctgcagagcgtgagcagcctgggccacagcagcgccaccagcgccagcctgcccttcatgccctttgtgatgggcggggcccccagcagcccccacgtggacagcagcaccatgctgcaccaccaccaccaccacccccacccccaccaccaccaccaccaccaccctggcctgcgggcccctggctaccccagcagccctgtgaccacagccagcggcaccaccctgcggctgccccccctgcagcctgaggaggatgatgatgaagatgaagaagatgatgatgacctgagccagggctatgacagcagcgagcgggacttcagcctgattgatgaccccatgatgcctgccaacagcgacagcagtgaagatgctgatgactag

SEQ ID NO: 147538 - DNA, 7746 bp, synthetic construct
  misc_feature 1..7746: note = Description of Artificial Sequence: Synthetic coding sequence
  source 1..7746: mol_type = other DNA
atggctgaccccatcatggacctgtttgatgaccccaacctgtttggcctggacagcctgacagatgacagcttcaaccaggtgacccaggaccccatcgaggaggccctgggcctgcccagcagcctggacagcctggaccagatgaaccaggacggcggcggcggagatgtgggcaacagcagcgccagcgagctggtgcccccacctgaggagacagcccccacagagctgagcaaggagagcacagccccagcccctgagagcatcaccctgcatgactacaccacccagcctgccagccaggagcagcctgcccagcctgtgctgcagaccagcacccccaccagcggcctgctgcaggtgtccaagagccaggagatcctgagccagggcaaccccttcatgggcgtgtctgccacagctgtgagcagcagcagcgctgggggccagcccccccagagcgcccccaagatcgtcatcctgaaggccccacccagcagctctgtgactggagcccacgtggcccagatccaggcccagggcatcaccagcacagcccagcccctggtggccggcacagccaacggcggcaaggtgaccttcaccaaggtgctgaccggcacccccctgcggcctggggtgtccatcgtgtctggcaacacagtgctggccgccaaggtgcccggcaaccaggccgctgtgcagagaattgtgcagcccagcaggcctgtgaagcagctggtgctgcagcctgtgaagggcagcgccccagctggcaaccctggggccactggaccacccctgaagccagctgtgaccctgaccagcacccccacccagggcgagagcaagaggatcaccctggtgctgcagcagccccagagcggcggcccccagggccaccgccacgtggtgctgggcagcctgcccgggaagatcgtgctgcagggcaaccagctggccgccctgacccaggccaagaatgcccagggccagcctgccaaggtggtgaccatccagctgcaggtgcagcagccccagcagaagatccagatcgtgccccagccccccagcagccagccccagccccagcagccccccagcacccagcctgtgaccctgagctctgtgcagcaggcccagatcatgggccctggccagagccctggccagaggctgtctgtgcctgtgaaggtggtgctgcagccccaggccggcagcagccagggcgccagcagcggcctgtctgtggtgaaggtgctgagcgccagcgaggtggccgccctgagcagccctgccagcagcgccccccacagcggcggcaagacaggcatggaggagaacagaaggctggagcaccagaagaagcaggagaaggccaaccgcatcgtggccgaggccatcgcccgggcccgggcccggggggagcagaacatcccccgggtgctgaatgaagatgagctgcccagcgtgcggcctgaggaggagggggagaagaagaggaggaagaagtctgctggggagcggctgaaggaggagaagcccaagaagagcaagaccagcggggccagcaagaccaagggcaagagcaagctgaacaccatcacccctgtggtgggcaagaagaggaagaggaacaccagcagtgacaacagtgatgtggaggtgatgcctgcccagagccccagagaagatgaggagagcagcatccagaagaggaggagcaaccggcaggtgaagaggaagaagtacacagaggacctggacatcaagatcacagatgatgaggaggaggaggaggtggatgtgacaggccccatcaagccagagcccatcctgcctgagcctgtgcaggagccagatggagagaccctgcccagcatgcagttctttgtggagaaccccagtgaagaagatgctgccatcgtggacaaggtgctgtccatgagaattgtgaagaaggagctgcccagcggccagtacacagaagctgaggagttctttgtgaagtacaagaactacagctacctgcactgtgagtgggccaccatcagccagctggagaaggacaagaggatccaccagaagctgaagcgcttcaagaccaagatggcccagatgaggcacttcttccatgaagatgaggagcccttcaacccagactatgtggaggtggaccgcatcctggatgagagccacagcattgacaaggacaacggggagcctgtgatctactacctggtgaagtggtgcagcctgccctatgaggacagcacctgggagctgaaggaggatgtggatgagggcaagatccgggagttcaagaggatccagagccgccaccctgagctgaagagggtgaaccggccccaggccagcgcctggaagaagctggagctgagccatgagtacaagaacagaaaccagctgcgggagtaccagctggagggcgtgaactggctgctcttcaactggtacaaccggcagaactgcatcctggctgatgagatgggcctgggcaagaccatccagagcatcgccttcctgcaggaggtgtacaacgtgggcatccacggccccttcctggtgattgcccccctgagcaccatcaccaactgggagcgggagttcaacacctggacagagatgaacaccatcgtgtaccacggcagcctggccagccggcagatgatccagcagtatgagatgtactgcaaggacagccggggccgcctcatccctggggcctacaagtttgatgccctgatcaccacctttgagatgatcctgagtgactgcccagagctgcgggagattgagtggcgctgcgtcatcattgatgaggcccaccggctgaagaacagaaactgcaagctgctggacagcctgaagcacatggacctggagcacaaggtgctgctgaccggcacccccctgcagaacacagtggaggagctgttcagcctgctgcacttcctggagcccagccagttccccagcgagagcgagttcctgaaggactttggagacctgaagacagaggagcaggtgcagaagctgcaggccatcctgaagcccatgatgctgcggcggctgaaggaggatgtggagaagaacctggcccccaagcaggagaccatcatcgaggtggagctgaccaacatccagaagaagtactaccgggccatcctggagaagaacttctccttcctgagcaagggggccggccacaccaacatgcccaacctgctgaacaccatgatggagctgaggaagtgctgcaaccacccctacctgatcaacggggctgaggagaagatcctgacagagttccgggaggcctgccacatcatcccccatgacttccacctgcaggccatggtgcgctctgctgggaagctggtgctgattgacaagctgctgcccaagctgaaggccggcggccacaaggtgctgatcttcagccagatggtgcgctgcctggacatcctggaggactacctgatccagaggcgctacctgtatgaaagaattgatggccgggtgcggggcaacctgcggcaggccgccatcgaccgcttcagcaagccagacagcgacagatttgtgttcctgctgtgcaccagggctgggggcctgggcatcaacctgacagctgctgacacctgcatcatctttgacagcgactggaacccccagaatgacctgcaggcccaggcccgctgccaccgcatcggccagagcaaggctgtgaaggtgtaccgcctcatcaccaggaacagctatgagcgggagatgtttgacaaggccagcctgaagctgggcctggacaaggctgtgctgcagagcatgagcggcagagatggcaacatcaccggcatccagcagttcagcaagaaggagattgaggacctgctgaggaaaggagcctatgctgccatcatggaggaggatgatgagggcagcaagttctgtgaggaggacatcgaccagatcctgctgcggaggaccaccaccatcaccattgaaagtgagggcaagggcagcacctttgccaaggccagctttgtggcctctgaaaatagaacagacatcagcctggatgaccccaacttctggcagaagtgggccaagaaggctgacctggacatggacctgctgaacagcaagaacaacctggtgattgacaccccccgggtgaggaagcagaccaggcacttcagcaccctgaaggatgatgacctggtggagttcagtgacctggagagtgaagatgatgagcggcccaggagcagaagacatgacagacaccacgcctacggccgcacagactgcttccgggtggagaagcacctgctggtgtatggctggggccgctggagggacatcctgagccacggccgcttcaagaggaggatgacagaaagagatgtggagaccatctgccgggccatcctggtgtactgcctgctgcactacagaggagatgagaacatcaagggcttcatctgggacctgatcagccctgcagaaaatggcaagaccaaggagctgcagaaccacagcggcctgagcatccctgtgccccggggcaggaagggcaagaaggtgaagagccagagcacctttgacatccacaaggctgactggatcaggaagtacaacccagacaccctcttccaggatgagagctacaagaagcacctgaagcaccagtgcaacaaggtgctgctgcgggtgaggatgctgtactacctgcggcaggaggtgattggagaccaggccgagaaggtgctgggcggggccatcgccagcgagattgacatctggttccctgtggtggaccagctggaggtgcccaccacctggtgggacagcgaggccgacaagagcctgctgattggagtcttcaagcacggctatgagaagtacaacaccatgagagctgaccctgccctgtgcttcctggagaaggccggccgcccagatgacaaggccatcgctgctgagcaccgggtgctggacaacttcagtgacatcgtggagggcgtggactttgacaaggactgtgaggaccctgagtacaagcccctgcagggcccccccaaggaccaggatgatgaaggagaccccctgatgatgatggatgaggagatctctgtgattgatggagatgaggcccaggtgacccagcagcccggccacctgttctggcccccaggcagcgccctgacagcccggctgcggcggctggtgacagcctaccagaggagctacaagcgggagcagatgaagattgaagctgctgagcggggggacagaagaagaagaagatgtgaggccgccttcaagctgaaggagatcgcccggcgggagaagcagcagcgctggacccggcgggagcagacagacttctacagagtggtgtccacctttggagtggagtatgaccctgacaccatgcagttccactgggaccgcttccgcacctttgcccggctggacaagaagacagatgagagcctgaccaagtacttccacggctttgtggccatgtgccggcaggtgtgccgcctgcccccagctgctggagatgagcccccagaccccaacctcttcatcgagcccatcacagaggagcgggccagcaggaccctgtaccgcatcgagctgctgcggcggctgcgggagcaggtgctgtgccaccccctgctggaggaccggctggccctgtgccagcccccaggccctgagctgcccaagtggtgggagcctgtgagacatgatggagagctgctgcggggagctgcccggcatggagtgtcccagacagactgcaacatcatgcaggaccctgacttctccttcctggccgccaggatgaactacatgcagaaccaccaggccggggccccagcccccagcctgagccgctgcagcacccccctgctgcaccagcagtacaccagcaggacagccagccccctgcccctgcggccagatgcccctgtggagaagagccctgaggagacagccacccaggtgcccagcctggagagcctgaccctgaagctggagcacgaggtggtggcccggagccggcccaccccccaggactatgagatgagggtgagccccagcgacaccacccccctggtgagccgctctgtgccccctgtgaagctggaggatgaagatgacagcgacagcgagctggacctgagcaagctgagccccagcagcagcagcagcagcagcagcagcagcagcagcagcagcacagatgaaagtgaagatgagaaggaggagaagctgacagaccagagccgcagcaagctgtatgatgaggagagcctgctgagcctgaccatgagccaggacggcttccccaatgaagatggagagcagatgaccccagagctgctgctgctgcaggagcggcagagggccagcgagtggcccaaggacagagtgctgatcaacagaattgacctggtgtgccaggccgtgctgagcggcaagtggcccagcagccgccgcagccaggagatggtgactggaggcatcctgggccctggcaaccacctgctggacagccccagcctgaccccaggagaatatggagacagccctgtgcccacccccaggagcagcagcgctgcctccatggccgaggaggaggccagcgctgtgtccacagctgctgcccagttcaccaagctgcggcggggcatggatgagaaggagttcaccgtgcagatcaaggatgaggagggcctgaagctgaccttccagaagcacaagctgatggccaatggagtgatgggagatggccaccccctcttccacaagaagaagggcaacaggaagaagctggtggagctggaggtggagtgcatggaggagcccaaccacctggatgtggacctggagacccgcatccctgtgatcaacaaggtggatggcaccctgctggtgggagaagatgcccccaggagagctgagctggagatgtggctgcagggccaccctgagtttgctgtggacccccgcttcctggcctacatggaggacaggaggaagcagaagtggcagcgctgcaagaagaacaacaaggccgagctgaactgcctgggcatggagcctgtgcagacagccaacagcagaaatggcaagaagggccaccacacagagaccgtcttcaacagagtgctgcccggccccatcgcccctgagagcagcaagaagagggcccggaggatgaggccagacctgagcaagatgatggccctgatgcagggcggcagcacaggcagcctgagcctgcacaacaccttccagcacagcagcagcggcctgcagagcgtgagcagcctgggccacagcagcgccaccagcgccagcctgcccttcatgccctttgtgatgggcggggcccccagcagcccccacgtggacagcagcaccatgctgcaccaccaccaccaccacccccacccccaccaccaccaccaccaccaccctggcctgcgggcccctggctaccccagcagccctgtgaccacagccagcggcaccaccctgcggctgccccccctgcagcctgaggaggatgatgatgaagatgaagaagatgatgatgacctgagccagggctatgacagcagcgagcgggacttcagcctgattgatgaccccatgatgcctgccaacagcgacagcagtgaagatgctgatgactag

SEQ ID NO: 147539 - DNA, 6909 bp, synthetic construct
  misc_feature 1..6909: note = Description of Artificial Sequence: Synthetic coding sequence
  source 1..6909: mol_type = other DNA
atgaagggggagagcaagaggatcaccctggtgctgcagcagccccagagcggcggcccccagggccacagacatgtggtgctgggcagcctgcccgggaagatcgtgctgcagggcaaccagctggccgccctgacccaggccaagaatgcccagggccagcctgccaaggtggtgaccatccagctgcaggtgcagcagccccagcagaagatccagatcgtgccccagccccccagcagccagccccagccccagcagccccccagcacccagcctgtgaccctgagctctgtgcagcaggcccagatcatgggccctggccagagccctggccagaggctgtctgtgcctgtgaaggtggtgctgcagccccaggccggcagcagccagggcgccagcagcggcctgtctgtggtgaaggtgctgagcgccagcgaggtggccgccctgagcagccctgccagcagcgccccccacagcggcggcaagacaggcatggaggagaacagaaggctggagcaccagaagaagcaggagaaggccaacagaattgtggccgaggccatcgcccgggcccgggcccggggggagcagaacatcccccgggtgctgaatgaagatgagctgcccagcgtgcggcctgaggaggagggggagaagaagaggaggaagaagtctgctggggagcggctgaaggaggagaagcccaagaagagcaagaccagcggggccagcaagaccaagggcaagagcaagctgaacaccatcacccctgtggtgggcaagaagaggaagaggaacaccagcagtgacaacagtgatgtggaggtgatgcctgcccagagcccccgggaggatgaggagagcagcatccagaagagaagaagcaaccggcaggtgaagaggaagaagtacacagaggacctggacatcaagatcacagatgatgaggaggaggaggaggtggatgtgacaggccccatcaagccagagcccatcctgcctgagcctgtgcaggagccagatggagagaccctgcccagcatgcagttctttgtggagaaccccagcgaggaggatgctgccatcgtggacaaggtgctgtccatgagaattgtgaagaaggagctgcccagcggccagtacacagaggccgaggagttctttgtgaagtacaagaactacagctacctgcactgtgagtgggccaccatcagccagctggagaaggacaagaggatccaccagaagctgaagcgcttcaagaccaagatggcccagatgaggcacttcttccatgaagatgaggagcccttcaacccagactatgtggaggtggaccgcatcctggatgagagccacagcattgacaaggacaatggagagcccgtcatctactacctggtgaagtggtgcagcctgccctatgaggacagcacctgggagctgaaggaggatgtggatgagggcaagatccgggagttcaagaggatccagagccgccaccctgagctgaagagggtgaaccggccccaggccagcgcctggaagaagctggagctgagccatgagtacaagaacagaaaccagctgcgggagtaccagctggagggcgtgaactggctgctcttcaactggtacaaccggcagaactgcatcctggctgatgagatgggcctgggcaagaccatccagagcatcgccttcctgcaggaggtgtacaacgtgggcatccacggccccttcctggtgattgcccccctgagcaccatcaccaactgggagcgggagttcaacacctggacagagatgaacaccatcgtgtaccacggcagcctggccagccggcagatgatccagcagtatgagatgtactgcaaggacagccggggccgcctcatccctggggcctacaagtttgatgccctgatcaccacctttgagatgatcctgagtgactgcccagagctgcgggagattgagtggaggtgtgtgatcattgatgaggcccaccggctgaagaacagaaactgcaagctgctggacagcctgaagcacatggacctggagcacaaggtgctgctgaccggcacccccctgcagaacacagtggaggagctgttcagcctgctgcacttcctggagcccagccagttccccagcgagagcgagttcctgaaggactttggagacctgaagacagaggagcaggtgcagaagctgcaggccatcctgaagcccatgatgctgcggcggctgaaggaggatgtggagaagaacctggcccccaagcaggagaccatcatcgaggtggagctgaccaacatccagaagaagtactaccgggccatcctggagaagaacttctccttcctgagcaaaggagctggccacaccaacatgcccaacctgctgaacaccatgatggagctgaggaagtgctgcaaccacccctacctgatcaatggagctgaggagaagatcctgacagagttccgggaggcctgccacatcatcccccatgacttccacctgcaggccatggtgcgctctgctgggaagctggtgctgattgacaagctgctgcccaagctgaaggccggcggccacaaggtgctgatcttcagccagatggtgcgctgcctggacatcctggaggactacctgatccagaggcgctacctgtatgaaagaattgatggccgggtgcggggcaacctgcggcaggccgccatcgaccgcttcagcaagccagacagcgacagatttgtgttcctgctgtgcacccgggccggcggcctgggcatcaacctgacagctgctgacacctgcatcatctttgacagcgactggaacccccagaatgacctgcaggcccaggcccgctgccacagaattggccagagcaaggctgtgaaggtgtaccgcctcatcaccagaaattcctatgaaagagagatgtttgacaaggccagcctgaagctgggcctggacaaggctgtgctgcagagcatgagcggcagagatggcaacatcaccggcatccagcagttcagcaagaaggagattgaggacctgctgaggaagggggcctatgctgccatcatggaggaggatgatgagggcagcaagttctgtgaagaagatattgaccagatcctgctgcggaggaccaccaccatcaccatcgagagcgagggcaagggcagcacctttgccaaggccagctttgtggccagcgagaacagaacagacatcagcctggatgaccccaacttctggcagaagtgggccaagaaggctgacctggacatggacctgctgaacagcaagaacaacctggtgattgacaccccccgggtgaggaagcagaccaggcacttcagcaccctgaaggatgatgacctggtggagttcagtgacctggagagtgaagatgatgagcggcccaggagcagaagacatgacagacaccacgcctacggccgcacagactgcttccgggtggagaagcacctgctggtgtatggctggggccgctggagggacatcctgagccacggccgcttcaagaggaggatgacagaaagagatgtggagaccatctgccgggccatcctggtgtactgcctgctgcactacagaggagatgagaacatcaagggcttcatctgggacctgatcagccctgcagaaaatggcaagaccaaggagctgcagaaccacagcggcctgagcatccctgtgccccggggcaggaagggcaagaaggtgaagagccagagcacctttgacatccacaaggctgactggatcaggaagtacaacccagacaccctcttccaggatgagagctacaagaagcacctgaagcaccagtgcaacaaggtgctgctgcgggtgaggatgctgtactacctgcggcaggaggtgattggagaccaggccgagaaggtgctgggcggggccatcgccagcgagattgacatctggttccctgtggtggaccagctggaggtgcccaccacctggtgggacagcgaggccgacaagagcctgctgattggagtcttcaagcacggctatgagaagtacaacaccatgagagctgaccctgccctgtgcttcctggagaaggccggccgcccagatgacaaggccatcgctgctgagcaccgggtgctggacaacttcagtgacatcgtggagggcgtggactttgacaaggactgtgaagatcctgagtacaagcccctgcagggcccccccaaggaccaggatgatgaaggagaccccctgatgatgatggatgaggagatctctgtgattgatggagatgaggcccaggtgacccagcagcccggccacctgttctggcccccaggcagcgccctgacagcccggctgcggcggctggtgacagcctaccagaggagctacaagcgggagcagatgaagattgaggccgctgagcggggggacagaagaagaagaagatgtgaggccgccttcaagctgaaggagatcgcccggcgggagaagcagcagcgctggacccggcgggagcagacagacttctacagagtggtgtccaccttcggcgtggagtatgaccctgacaccatgcagttccactgggaccgcttccgcacctttgcccggctggacaagaagacagatgagagcctgaccaagtacttccacggctttgtggccatgtgccggcaggtgtgccgcctgcccccagctgctggagatgagcccccagaccccaacctcttcatcgagcccatcacagaggagcgggccagcaggaccctgtacagaattgagctgctgcggcggctgcgggagcaggtgctgtgccaccccctgctggaggaccggctggccctgtgccagcccccaggccctgagctgcccaagtggtgggagcctgtgagacatgatggagagctgctgcggggggccgcccggcatggagtgtcccagacagactgcaacatcatgcaggaccctgacttctccttcctggccgccaggatgaactacatgcagaaccaccaggccggggccccagcccccagcctgagccgctgcagcacccccctgctgcaccagcagtacaccagcaggacagccagccccctgcccctgcggccagatgcccctgtggagaagagccctgaggagacagccacccaggtgcccagcctggagagcctgaccctgaagctggagcacgaggtggtggcccggagccggcccaccccccaggactatgagatgagggtgagccccagcgacaccacccccctggtgagccgctctgtgccccctgtgaagctggaggatgaagatgacagcgacagcgagctggacctgagcaagctgagccccagcagcagcagcagcagcagcagcagcagcagcagcagcagcacagatgaaagtgaagatgagaaggaggagaagctgacagaccagagccgcagcaagctgtatgatgaggagagcctgctgagcctgaccatgagccaggacggcttccccaatgaagatggagagcagatgaccccagagctgctgctgctgcaggagcggcagagggccagcgagtggcccaaggacagagtgctgatcaacagaattgacctggtgtgccaggccgtgctgagcggcaagtggcccagcagcagaagaagccaggagatggtgactggaggcatcctgggccctggcaaccacctgctggacagccccagcctgaccccaggagaatatggagacagccctgtgcccacccccaggagcagcagcgctgcctccatggccgaggaggaggccagcgctgtgtccacagctgctgcccagttcaccaagctgcggcggggcatggatgagaaggagttcaccgtgcagatcaaggatgaggagggcctgaagctgaccttccagaagcacaagctgatggccaacggggtgatgggagatggccaccccctcttccacaagaagaagggcaacaggaagaagctggtggagctggaggtggagtgcatggaggagcccaaccacctggatgtggacctggagacccgcatccctgtgatcaacaaggtggatggcaccctgctggtgggggaggatgccccccggcgggcagagctggagatgtggctgcagggccaccctgagtttgctgtggacccccgcttcctggcctacatggaggacaggaggaagcagaagtggcagcgctgcaagaagaacaacaaggccgagctgaactgcctgggcatggagcctgtgcagacagccaacagcagaaatggcaagaagggccaccacacagaaacagtgttcaacagagtgctgcccggccccatcgcccctgagagcagcaagaagagggcccggaggatgaggccagacctgagcaagatgatggccctgatgcagggcggcagcacaggcagcctgagcctgcacaacaccttccagcacagcagcagcggcctgcagagcgtgagcagcctgggccacagcagcgccaccagcgccagcctgcccttcatgccctttgtgatgggcggggcccccagcagcccccacgtggacagcagcaccatgctgcaccaccaccaccaccacccccacccccaccaccaccaccaccaccaccctggcctgcgggcccctggctaccccagcagccctgtgaccacagccagcggcaccaccctgcggctgccccccctgcagccagaagaagatgatgatgaagatgaggaggatgatgatgacctgagccagggctatgacagcagcgagcgggacttcagcctgattgatgaccccatgatgcctgccaacagcgacagcagtgaagatgctgatgactag

SEQ ID NO: 147540 - DNA, 7746 bp, synthetic construct; identical to SEQ ID NO: 147538
  misc_feature 1..7746: note = Description of Artificial Sequence: Synthetic coding sequence
  source 1..7746: mol_type = other DNA

SEQ ID NO: 147541 - DNA, 1797 bp, synthetic construct
  misc_feature 1..1797: note = Description of Artificial Sequence: Synthetic coding sequence
  source 1..1797: mol_type = other DNA
atgaccttccaggccagccacaggtctgcctggggcaagagcaggaagaagaactggcagtatgagggccccacccagaagctgttcctgaagaggaacaacgtgtctgccccagatggccccagcgaccccagcatctctgtgagcagcgagcagagcggggcccagcagcccccagccctgcaggtggagcgcatcgtggacaagaggaagaacaagaagggcaagacagagtacctggtgcgctggaagggctatgacagtgaagatgacacctgggagcctgagcagcacctggtgaactgtgaggagtacatccatgacttcaacagaagacacacagagaagcagaaggagagcaccctgaccaggaccaacagaaccagccccaacaatgccaggaagcagatcagccgcagcaccaacagcaacttcagcaagaccagccccaaggccctggtgattggcaaggaccacgagagcaagaacagccagctgtttgctgccagccagaagttcaggaagaacacagcccccagcctgagcagcaggaagaacatggacctggccaagagcggcatcaagatcctggtgcccaagagccctgtgaagagcaggacagctgtggatggcttccagagcgagagccctgagaagctggaccctgtggagcagggccaggaggacacagtggcccctgaggtggccgctgagaagcctgtgggcgccctgctgggccctggagctgagcgggccaggatgggcagccggccccgcatccaccccctggtgccccaggtgcccggccctgtgacagctgccatggccaccggcctggccgtgaatggcaagggcaccagccccttcatggatgccctgacagccaacggcaccaccaacatccagacctctgtgactggagtgacagccagcaagaggaagttcattgatgacagaagagaccagccctttgacaagaggctgcgcttctctgtgcggcagacagaaagtgcctaccgctacagagacatcgtggtgaggaagcaggacggcttcacccacatcctgctgagcaccaagagcagcgagaacaacagcctgaaccctgaggtgatgagggaggtgcagagcgccctgagcacagctgctgctgatgacagcaagctggtgctgctgtctgctgtgggctctgtgttctgctgcggcctggacttcatctacttcatccggcggctgacagatgacaggaagcgggagagcaccaagatggccgaggccatccggaactttgtgaacaccttcatccagttcaagaagcccatcatcgtggccgtgaatggacctgccatcggcctgggcgccagcatcctgcccctgtgtgatgtggtgtgggccaatgagaaggcctggttccagaccccctacaccaccttcggccagagcccagatggctgcagcacagtgatgttccccaagatcatgggcggggccagcgccaatgagatgctgctgagcggcaggaagctgacagcccaggaggcctgtgggaagggcctggtgtcccaggtgttctggccaggcaccttcacccaggaggtgatggtgcgcatcaaggagctggccagctgcaaccctgtggtgctggaggagagcaaggccctggtgcgctgcaacatgaagatggagctggagcaggccaatgaaagagaatgtgaggtgctgaagaagatctggggcagcgcccagggcatggacagcatgctgaagtacctgcagaggaagattgatgagttctag

SEQ ID NO: 147542 - DNA, 1239 bp, synthetic construct
  misc_feature 1..1239: note = Description of Artificial Sequence: Synthetic coding sequence
  source 1..1239: mol_type = other DNA
atggacctggccaagagcggcatcaagatcctggtgcccaagagccctgtgaagagcaggacagctgtggatggcttccagagcgagagccctgagaagctggaccctgtggagcagggccaggaggacacagtggcccctgaggtggccgctgagaagcctgtgggcgccctgctgggccctggagctgagcgggccaggatgggcagccggccccgcatccaccccctggtgccccaggtgcccggccctgtgacagctgccatggccaccggcctggccgtgaatggcaagggcaccagccccttcatggatgccctgacagccaacggcaccaccaacatccagacctctgtgactggagtgacagccagcaagaggaagttcattgatgacagaagagaccagccctttgacaagaggctgcgcttctctgtgcggcagacagaaagtgcctaccgctacagagacatcgtggtgaggaagcaggacggcttcacccacatcctgctgagcaccaagagcagcgagaacaacagcctgaaccctgaggtgatgagggaggtgcagagcgccctgagcacagctgctgctgatgacagcaagctggtgctgctgtctgctgtgggctctgtgttctgctgcggcctggacttcatctacttcatccggcggctgacagatgacaggaagcgggagagcaccaagatggccgaggccatccggaactttgtgaacaccttcatccagttcaagaagcccatcatcgtggccgtgaatggacctgccatcggcctgggcgccagcatcctgcccctgtgtgatgtggtgtgggccaatgagaaggcctggttccagaccccctacaccaccttcggccagagcccagatggctgcagcacagtgatgttccccaagatcatgggcggggccagcgccaatgagatgctgctgagcggcaggaagctgacagcccaggaggcctgtgggaagggcctggtgtcccaggtgttctggccaggcaccttcacccaggaggtgatggtgcgcatcaaggagctggccagctgcaaccctgtggtgctggaggagagcaaggccctggtgcgctgcaacatgaagatggagctggagcaggccaatgaaagagaatgtgaggtgctgaagaagatctggggcagcgcccagggcatggacagcatgctgaagtacctgcagaggaagattgatgagttctag

SEQ ID NO: 147543 - DNA, 1635 bp, synthetic construct
  misc_feature 1..1635: note = Description of Artificial Sequence: Synthetic coding sequence
  source 1..1635: mol_type = other DNA
atggccagcgaggagctgtatgaggtggagcgcatcgtggacaagaggaagaacaagaagggcaagacagagtacctggtgcgctggaagggctatgacagtgaagatgacacctgggagcctgagcagcacctggtgaactgtgaggagtacatccatgacttcaacagaagacacacagagaagcagaaggagagcaccctgaccaggaccaacagaaccagccccaacaatgccaggaagcagatcagccgcagcaccaacagcaacttcagcaagaccagccccaaggccctggtgattggcaaggaccacgagagcaagaacagccagctgtttgctgccagccagaagttcaggaagaacacagcccccagcctgagcagcaggaagaacatggacctggccaagagcggcatcaagatcctggtgcccaagagccctgtgaagagcaggacagctgtggatggcttccagagcgagagccctgagaagctggaccctgtggagcagggccaggaggacacagtggcccctgaggtggccgctgagaagcctgtgggcgccctgctgggccctggagctgagcgggccaggatgggcagccggccccgcatccaccccctggtgccccaggtgcccggccctgtgacagctgccatggccaccggcctggccgtgaatggcaagggcaccagccccttcatggatgccctgacagccaacggcaccaccaacatccagacctctgtgactggagtgacagccagcaagaggaagttcattgatgacagaagagaccagccctttgacaagaggctgcgcttctctgtgcggcagacagaaagtgcctaccgctacagagacatcgtggtgaggaagcaggacggcttcacccacatcctgctgagcaccaagagcagcgagaacaacagcctgaaccctgaggtgatgagggaggtgcagagcgccctgagcacagctgctgctgatgacagcaagctggtgctgctgtctgctgtgggctctgtgttctgctgcggcctggacttcatctacttcatccggcggctgacagatgacaggaagcgggagagcaccaagatggccgaggccatccggaactttgtgaacaccttcatccagttcaagaagcccatcatcgtggccgtgaatggacctgccatcggcctgggcgccagcatcctgcccctgtgtgatgtggtgtgggccaatgagaaggcctggttccagaccccctacaccaccttcggccagagcccagatggctgcagcacagtgatgttccccaagatcatgggcggggccagcgccaatgagatgctgctgagcggcaggaagctgacagcccaggaggcctgtgggaagggcctggtgtcccaggtgttctggccaggcaccttcacccaggaggtgatggtgcgcatcaaggagctggccagctgcaaccctgtggtgctggaggagagcaaggccctggtgcgctgcaacatgaagatggagctggagcaggccaatgaaagagaatgtgaggtgctgaagaagatctggggcagcgcccagggcatggacagcatgctgaagtacctgcagaggaagattgatgagttctag

SEQ ID NO: 147544 - DNA, 1239 bp, synthetic construct; identical to SEQ ID NO: 147542
  misc_feature 1..1239: note = Description of Artificial Sequence: Synthetic coding sequence
  source 1..1239: mol_type = other DNA

SEQ ID NO: 147545 - DNA, 1665 bp, synthetic construct
  misc_feature 1..1665: note = Description of Artificial Sequence: Synthetic coding sequence
  source 1..1665: mol_type = other DNA
atggccagccaggagtttgaggtggaggccatcgtggacaagaggcaggacaagaatggaaacacccagtacctggtgcgctggaagggctatgacaagcaggatgacacctgggagcctgagcagcacctgatgaactgtgagaagtgtgtgcatgacttcaacagacggcagacagagaagcagaagaagctgacctggaccaccaccagccgcatcttcagcaacaatgcccggcggaggaccagccgcagcaccaaggccaactacagcaagaacagccccaagacccctgtgacagacaagcaccacaggagcaagaacaggaagctgtttgctgccagcaagaatgtgcggaggaaggccgccagcatcctgagtgacaccaagaacatggagatcatcaacagcaccatcgagaccctggccccagacagcccctttgaccacaagacagtgtctggcttccagaagctggagaagctggaccccatcgctgctgaccagcaggacacagtggtgttcaaggtgacagagggcaagctgctgcgggaccccctgagcaggcctggagctgagcagacaggcatccagaacaagacccagatccaccccctgatgagccagatgagcggctctgtgacagcctccatggccaccggcagcgccaccaggaagggcatcgtggtgctgattgaccccctggccgccaacggcaccacagacatgcacacctctgtgccccgggtgaagggcggccagaggaacatcacagatgacagccgggaccagcccttcatcaagaagatgcacttcaccatccggctgacagaaagtgccagcacctacagagacatcgtggtgaagaaggaggatggcttcacccagatcgtgctgagcaccaggagcacagagaagaatgccctgaacacagaggtgatcaaggagatcgtgaatgccctgaacagcgctgctgctgatgacagcaagctggtgctcttctctgctgctggctctgtgttctgctgcggcctggactttggctactttgtgaagcacctgaggaacaacagaaacacagccagcctggagatggtggacaccatcaagaactttgtgaacaccttcatccagttcaagaagcccatcgtggtgtctgtgaatggacctgccatcggcctgggcgccagcatcctgcccctgtgtgacctggtgtgggccaatgagaaggcctggttccagaccccctacaccaccttcggccagagcccagatggctgcagcagcatcaccttccccaagatgatgggcaaggccagcgccaatgagatgctgattgctggcaggaagctgacagcccgggaggcctgtgccaagggcctggtgtcccaggtgttcctgaccggcaccttcacccaggaggtgatgatccagatcaaggagctggccagctacaaccccatcgtgctggaggagtgcaaggccctggtgcgctgcaacatcaagctggagctggagcaggccaatgaaagagaatgtgaggtgctgaggaagatctggagcagcgcccagggcatcgagagcatgctgaagatccccctgctgggctacaaggccgccttcccccccaggaagacccagaatgaccagcgctggtgcccctag

SEQ ID NO: 147546 - DNA, 1623 bp, synthetic construct
  misc_feature 1..1623: note = Description of Artificial Sequence: Synthetic coding sequence
  source 1..1623: mol_type = other DNA
atggccagccaggagtttgaggtggaggccatcgtggacaagaggcaggacaagaatggaaacacccagtacctggtgcgctggaagggctatgacaagcaggatgacacctgggagcctgagcagcacctgatgaactgtgagaagtgtgtgcatgacttcaacagacggcagacagagaagcagaagaagctgacctggaccaccaccagccgcatcttcagcaacaatgcccggcggaggaccagccgcagcaccaaggccaactacagcaagaacagccccaagacccctgtgacagacaagcaccacaggagcaagaacaggaagctgtttgctgccagcaagaatgtgcggaggaaggccgccagcatcctgagtgacaccaagaacatggagatcatcaacagcaccatcgagaccctggccccagacagcccctttgaccacaagacagtgtctggcttccagaagctggagaagctggaccccatcgctgctgaccagcaggacacagtggtgttcaaggtgacagagggcaagctgctgcgggaccccctgagcaggcctggagctgagcagacaggcatccagaacaagacccagatccaccccctgatgagccagatgagcggctctgtgacagcctccatggccaccggcagcgccaccaggaagggcatcgtggtgctgattgaccccctggccgccaacggcaccacagacatgcacacctctgtgccccgggtgaagggcggccagaggaacatcacagatgacagccgggaccagcccttcatcaagaagatgcacttcaccatccggctgacagaaagtgccagcacctacagagacatcgtggtgaagaaggaggatggcttcacccagatcgtgctgagcaccaggagcacagagaagaatgccctgaacacagaggtgatcaaggagatcgtgaatgccctgaacagcgctgctgctgatgacagcaagctggtgctcttctctgctgctggctctgtgttctgctgcggcctggactttggctactttgtgaagcacctgaggaacaacagaaacacagccagcctggagatggtggacaccatcaagaactttgtgaacaccttcatccagttcaagaagcccatcgtggtgtctgtgaatggacctgccatcggcctgggcgccagcatcctgcccctgtgtgacctggtgtgggccaatgagaaggcctggttccagaccccctacaccaccttcggccagagcccagatggctgcagcagcatcaccttccccaagatgatgggcaaggccagcgccaatgagatgctgattgctggcaggaagctgacagcccgggaggcctgtgccaagggcctggtgtcccaggtgttcctgaccggcaccttcacccaggaggtgatgatccagatcaaggagctggccagctacaaccccatcgtgctggaggagtgcaaggccctggtgcgctgcaacatcaagctggagctggagcaggccaatgaaagagaatgtgaggtgctgaggaagatctggagcagcgcccagggcatcgagagcatgctgaagtatgtggagaacaagattgatgagttctag

SEQ ID NO: 147547 - DNA, 1170 bp, synthetic construct
  misc_feature 1..1170: note = Description of Artificial Sequence: Synthetic coding sequence
  source 1..1170: mol_type = other DNA
atgggcaagatggctgctgctgtgggctctgtggccaccctggccacagagcccggggaggatgccttcaggaagctgttccgcttctaccggcagagcaggcctggaacagctgacctggagggcgtcatcgacttctctgctgcccatgctgcccggggcaaaggacctggggcccagaaggtgatcaagagccagctgaatgtgtcctctgtgtctgagcagaatgcctaccgggccggcctgcagcctgtgtccaagtggcaggcctacggcctgaagggctacccaggcttcatcttcatccccaaccccttcctgcccggctaccagtggcactgggtgaagcagtgcctgaagctgtacagccagaagcccaacgtgtgcaacctggacaagcacatgagcaaggaggagacccaggacctgtgggagcagagcaaggagttcctgcgctacaaggaggccaccaagagaagacccaggagcctgctggagaagctgcgctgggtgacagtgggctaccactacaactgggacagcaagaagtacagcgctgaccactacacccccttccccagcgacctgggcttcctgtctgagcaggtggccgccgcctgtggctttgaggacttccgggcagaggccggcatcctgaactactaccgcctggacagcaccctgggcatccacgtggacagaagtgagctggaccacagcaagcccctgctgtccttctcctttggccagagcgccatcttcctgctgggcggcctgcagagagatgaggcccccacagccatgttcatgcacagcggggacatcatgatcatgagcggcttcagccggctgctgaaccacgctgtgccccgggtgctgcccaaccctgagggggagggcctgccccactgcctggaggcccccctgcctgctgtgctgccccgggacagcatggtggagccctgcagcatggaggactggcaggtgtgtgccagctacctgaagacagcccgggtgaacatgacagtgcggcaggtgctggccacagaccagaacttccccctggagcccattgaagatgagaagagggacatcagcacagagggcttctgccacctggatgaccagaacagcgaggtgaagagggcccgcatcaacccagacagctag

SEQ ID NO: 147548 - DNA, 921 bp, synthetic construct
  misc_feature 1..921: note = Description of Artificial Sequence: Synthetic coding sequence
  source 1..921: mol_type = other DNA
atgaggtctgctgctgtgctggccctgctgctgtgtgccggccaggtgacagccctgcctgtgaacagccccatgaacaagggggacacagaggtgatgaagtgcatcgtggaggtgatcagtgacaccctgagcaagcccagccccatgcctgtgtcccaggagtgctttgagaccctgcggggagatgagcgcatcctgagcatcctgcggcaccagaacctgctgaaggagctgcaggacctggccctgcagggcgccaaggagcgggcccaccagcagaagaagcacagcggctttgaagatgagctgtctgaggtgctggagaaccagagcagccaggccgagctgaagggccgctctgaggccctggccgtggatggagctgggaagccaggagctgaggaggcccaggaccctgagggcaaaggagagcaggagcacagccagcagaaggaggaggaggaggagatggctgtggtgccccagggcctcttccggggcggcaagtctggagagctggagcaggaggaggagcggctgagcaaggagtgggaggacagcaagcgctggagcaagatggaccagctggccaaggagctgacagctgagaagaggctggagggccaggaggaggaggaggacaacagagacagctccatgaagctgtccttccgggcccgggcctacggcttccggggccctggcccccagctgcggcggggctggaggcccagcagccgggaggacagcctggaggccggcctgcccctgcaggtgcggggctacccagaggagaagaaggaggaggagggcagcgccaacagaagacctgaggaccaggagctggagagcctgagcgccattgaagctgagctggagaaggtggcccaccagctgcaggccctgcggcggggctag

SEQ ID NO: 147549 - DNA, 2034 bp, synthetic construct
  misc_feature 1..2034: note = Description of Artificial Sequence: Synthetic coding sequence
  source 1..2034: mol_type = other DNA
atgcagcccaccctgctgctgagcctgctgggcgctgtgggcctggccgctgtgaacagcatgcctgtggacaacagaaaccacaatgaaggcatggtgacccgctgcatcatcgaggtgctgagcaatgccctgagcaagagcagcgccccacccatcaccccagagtgccggcaggtgctgaagaccagcaggaaggatgtgaaggacaaggagaccacagaaaatgaaaacaccaagtttgaggtgcggctgctgcgggaccctgcagatgccagcgaggcccacgagagcagcagcagaggagaggccggggcccctggagaggaggacatccagggccccaccaaggctgacacagagaagtgggccgagggcggcggccacagccgggagcgggcagatgagccccagtggagcctgtaccccagcgacagccaggtgtctgaggaggtgaagaccaggcacagcgagaagagccagagagaagatgaggaggaggaggagggggagaactaccagaagggggagcggggggaggacagcagcgaggagaagcacctggaggagcctggagagacccagaatgccttcctgaatgaaaggaagcaggccagcgccatcaagaaggaggagctggtggcccggtctgagacccatgctgctggccacagccaggagaagacccacagccgggagaagagcagccaggagagcggggaggagaccggcagccaggagaaccacccccaggagagcaagggccagcccaggagccaggaggagagcgaggagggggaggaggatgccaccagcgaggtggacaagaggaggacccggcccaggcaccaccacggccgcagcaggccagacaggagcagccagggcggcagcctgcccagcgaggagaagggccacccccaggaggagagcgaggagagcaatgtgtccatggccagcctgggggagaagagggaccaccacagcacccactaccgggccagcgaggaggagccagaatatggagaggagatcaagggctacccaggagtgcaggcccctgaggacctggagtgggagcgctaccggggccggggcagcgaggagtaccgggccccccggccccagagcgaggagagctgggatgaggaggacaagaggaactaccccagcctggagctggacaagatggcccacggctatggagaggagagcgaggaggagcggggcctggagcccgggaagggccgccaccaccggggccggggcggggagccccgggcctacttcatgtctgacacccgggaggagaagcgcttcctgggggagggccaccaccgggtgcaggagaaccagatggacaaggcccggcggcacccccagggcgcctggaaggagctggacaggaactacctgaactacggggaggagggcgcccctgggaagtggcagcagcagggcgacctgcaggacaccaaggagaaccgggaggaggcccgcttccaggacaagcagtacagcagccaccacacagctgagaagaggaagaggctgggggagctgttcaacccctactatgaccccctgcagtggaagagcagccactttgagcggcgggacaacatgaatgacaacttcctggagggggaggaggagaatgagctgaccctgaatgagaagaacttcttccctgagtacaactatgactggtgggagaagaagcccttctctgaagatgtgaactggggctatgagaagaggaacctggcccgggtgcccaagctggacctgaagaggcagtatgacagagtggcccagctggaccagctgctgcactacaggaagaagtctgctgagttcccagacttctatgacagcgaggagcctgtgtccacccaccaggaggctgaaaatgagaaggacagagctgaccagacagtgctgacagaagatgagaagaaggagctggagaacctggccgccatggacctggagctgcagaagattgctgagaagttcagccagaggggctag

SEQ ID NO: 147550 - DNA, 870 bp, synthetic construct
  misc_feature 1..870: note = Description of Artificial Sequence: Synthetic coding sequence
  source 1..870: mol_type = other DNA
atgcctgtggacaacagaaaccacaatgaaggcatggtgacccgctgcatcatcgaggtgctgagcaatgccctgagcaagagcagcgccccacccatcaccccagagtgccggcaggtgctgaagaccagcaggaaggatgtgaaggacaaggagaccacagaaaatgaaaacaccaagtttgaggtgcggctgctgcgggaccctgcagatgccagcgaggcccacgagagcagcagcagaggagaggccggggcccctggagaggaggacatccagggccccaccaaggctgacacagagaagtgggccgagggcggcggccacagccgggagcgggcagatgagccccagtggagcctgtaccccagcgacagccaggtgtctgaggaggtgaagaccaggcacagcgagaagagccagagagaagatgaggaggaggaggagggggagaactaccagaagggggagcggggggaggacagcagcgaggagaagcacctggaggagcctggagagacccagaatgccttcctgaatgaaaggaagcaggccagcgccatcaagaaggaggagctggtggcccggtctgagacccatgctgctggccacagccaggagaagacccacagccgggagaagagcagccaggagagcggggaggagaccggcagccaggagaaccacccccaggagagcaagggccagcccaggagccaggaggagagcgaggagggggaggaggatgccaccagcgaggtggacaagaggaggacccggcccaggcaccaccacggccgcagcaggccagacaggagcagccagggcggcagcctgcccagcgaggagaagggccacccccaggagtag

SEQ ID NO: 147551 - DNA, 1806 bp, synthetic construct
  misc_feature 1..1806: note = Description of Artificial Sequence: Synthetic coding sequence
  source 1..1806: mol_type = other DNA
atgcctgagcgggagctgtggccagctggcactggaagtgagcctgtgaccagggtgggcagctgtgacagcatgatgagcagcaccagcaccaggagcggcagcagtgacagcagctatgacttcctgagcacagaggagaaggaatgtctgctcttcctggaggagaccatcggcagcctggacacagaagctgacagcggcctgagcacagatgagagcgagcccgccaccaccccccggggcttccgggccctgcccatcacccagcccaccccccggggcggccctgaggagaccatcacccagcagggccgcacccccaggacagtgacagagagcagcagcagccaccccccagagccccagggcctgggcctgcggagcggcagctacagcctgcccaggaacatccacatcgcccggagccagaacttcaggaagagcaccacccaggccagcagccacaaccctggagagcccggccgcctggcccctgagcctgagaaggagcaggtgtcccagagcagccagccccggcaggccccagccagcccccaggaggccgccctggacctggatgtggtgctgatccccccacctgaggccttccgggacacccagcctgagcagtgccgggaggccagcctgcctgagggccctggccagcagggccacaccccccagctgcacacccccagcagcagccaggagcgggagcagacccccagcgaggccatgagccagaaggccaaggagaccgtgtccacccgctacacccagccccagcccccacctgctggcctgccccagaatgcccgggcagaagatgcccccctgagcagcggggaggaccccaacagccggctggcccccctgaccacccccaagcccaggaagctgccccccaacatcgtgctgaagagcagccgcagcagcttccacagcgacccccagcactggctgagccgccacacagaggccgcccctggggacagcggcctcatcagctgcagcctgcaggagcagaggaaggccaggaaggaggccctggagaagctgggcctgccccaggaccaggatgagcccggcctgcacctgagcaagcccaccagcagcatccggcccaaggagacccgggcccagcacctgagccctgcccctggcctggcccagcctgctgccccagcccaggccagcgctgccatcccagctgctgggaaggccctggcccaggccccagccccagcccctggccctgcccagggccccctgcccatgaagagccctgcccctggaaatgtggccgccagcaagtccatgcccatcagcatccccaaggccccccgggccaacagcgccctgaccccacccaagccagagagcggcctgaccctgcaggagagcaacaccccaggcctgcggcagatgaacttcaagagcaacaccctggagaggtctggagtgggcctgagcagctacctgagcacagagaaggatgccagccccaagaccagcaccagcctgggcaagggcagcttcctggacaagatcagccccagcgtgctgaggaacagccggcccaggcctgccagcctgggcaccgggaaggactttgctggcatccaggtgggcaagctggccgacctggagcaggagcagagcagcaagaggctgagctaccagggccagagccgggacaagctgccccggcccccctgtgtgtctgtgaagatcagccccaagggcgtgcccaatgagcacagaagagaggccctgaagaagctgggcctgctgaaggagtag

SEQ ID NO: 147552 - DNA, 1068 bp, synthetic construct
  misc_feature 1..1068: note = Description of Artificial Sequence: Synthetic coding sequence
  source 1..1068: mol_type = other DNA
atgagccagaaggccaaggagaccgtgtccacccgctacacccagccccagcccccacctgctggcctgccccagaatgcccgggcagaagatgcccccctgagcagcggggaggaccccaacagccggctggcccccctgaccacccccaagcccaggaagctgccccccaacatcgtgctgaagagcagccgcagcagcttccacagcgacccccagcactggctgagccgccacacagaggccgcccctggggacagcggcctcatcagctgcagcctgcaggagcagaggaaggccaggaaggaggccctggagaagctgggcctgccccaggaccaggatgagcccggcctgcacctgagcaagcccaccagcagcatccggcccaaggagacccgggcccagcacctgagccctgcccctggcctggcccagcctgctgccccagcccaggccagcgctgccatcccagctgctgggaaggccctggcccaggccccagccccagcccctggccctgcccagggccccctgcccatgaagagccctgcccctggaaatgtggccgccagcaagtccatgcccatcagcatccccaaggccccccgggccaacagcgccctgaccccacccaagccagagagcggcctgaccctgcaggagagcaacaccccaggcctgcggcagatgaacttcaagagcaacaccctggagaggtctggagtgggcctgagcagctacctgagcacagagaaggatgccagccccaagaccagcaccagcctgggcaagggcagcttcctggacaagatcagccccagcgtgctgaggaacagccggcccaggcctgccagcctgggcaccgggaaggactttgctggcatccaggtgggcaagctggccgacctggagcaggagcagagcagcaagaggctgagctaccagggccagagccgggacaagctgccccggcccccctgtgtgtctgtgaagatcagccccaagggcgtgcccaatgagcacagaagagaggccctgaagaagctgggcctgctgaaggagtag

SEQ ID NO: 147553 - DNA, 1050 bp, synthetic construct
  misc_feature 1..1050: note = Description of Artificial Sequence: Synthetic coding sequence
  source 1..1050: mol_type = other DNA
atggccggccctgccatccacacagcccccatgctgttcctggtgctgctgctgcccctggagctgagcctggccggggccctggcccctggcaccccagccaggaacctgcctgagaaccacatcgacctgcccggccctgccctgtggaccccccaggccagccaccacagaagaagaggccctgggaagaaggagtggggccctggcctgcccagccaggcccaggatggagctgtggtgacagccacccggcaggccagccggctgcctgaggccgagggcctgctgcctgagcagagccctgctggcctgctgcaggacaaggacctgctgctgggcctggccctgccctacccagagaaggaaaatcggcccccaggctgggagaggaccaggaagaggagccgggagcacaagagaagaagagaccggctgcggctgcaccagggccgggccctggtgcggggccccagcagcctgatgaagaaggccgagctgtctgaggcccaggtgctggatgctgccatggaggagagcagcaccagcctggcccccaccatgttcttcctgaccacctttgaggccgccccagccacagaggagagcctcatcctgcctgtgaccagcctgcggccccagcaggcccagcccaggagtgatggagaggtgatgcccaccctggacatggccctgtttgactggacagattatgaggacctgaagccagatggctggcccagcgccaagaagaaggagaagcaccggggcaagctgagcagtgatggaaatgagaccagccctgctgagggggagccctgtgaccaccaccaggactgcctgcccggcacctgctgtgacctgcgggagcacctgtgcaccccccacaacagaggcctgaacaacaagtgctttgatgactgcatgtgtgtggagggcctgcgctgctacgccaagttccacaggaacagaagagtgaccaggaggaagggccgctgtgtggagcctgagacagccaacggggaccagggcagcttcatcaacgtgtag

SEQ ID NO: 147554 - DNA, 477 bp, synthetic construct
  misc_feature 1..477: note = Description of Artificial Sequence: Synthetic coding sequence
  source 1..477: mol_type = other DNA
atgtgcttcagcagagcagatgctgctgacaactaccccttcggcacctgccagcagaggaagctgttcccccacttccacccccccaacctgattggcaacaagtttgtgcccctgcggggcagcccccaccggggccctggctgctacttcagtgatgagatgacccctcatgctggccgctaccagaaggtgagcccccagcaggagaagcacaagcagaactttgcccccttcaacgtgctggtgccccgcttcaagaactaccccaaggacacctactaccccagccctggggcctacaaccctgagaagaagcccccacccaagatcgcctggcccatgaagtttggcagcccagactgggcccaggtgccctgcctgcagaagaggaccctgaaggccgagctgagcacagacaaggacttcaggaagcacaggaacagagtggcctacctgagcctgtactacaactag

SEQ ID NO: 147555 - DNA, 576 bp, synthetic construct
  misc_feature 1..576: note = Description of Artificial Sequence: Synthetic coding sequence
  source 1..576: mol_type = other DNA
atgtgcttcagcagagcagatgctgctgacaactaccccttcggcacctgccagcagaggaagctgttcccccacttccacccccccaacctgattggcaacaagtttgtgcccctgcggggcagcccccaccggggccctggctgctacttcagtgatggctacggcctggcctatgacctgagcaagatccccaccagcatcaagggctacaccctgggcgccaggacagctgtgcgcttcaagcccatccagaaggagatgacccctcatgctggccgctaccagaaggtgagcccccagcaggagaagcacaagcagaactttgcccccttcaacgtgctggtgccccgcttcaagaactaccccaaggacacctactaccccagccctggggcctacaaccctgagaagaagcccccacccaagatcgcctggcccatgaagtttggcagcccagactgggcccaggtgccctgcctgcagaagaggaccctgaaggccgagctgagcacagacaaggacttcaggaagcacaggaacagagtggcctacctgagcctgtactacaactag

SEQ ID NO: 147556 - DNA, 2055 bp, synthetic construct
  misc_feature 1..2055: note = Description of Artificial Sequence: Synthetic coding sequence
  source 1..2055: mol_type = other DNA
atgtgggtgctgctgcggagcggctaccccctgcgcatcctgctgcccctgcggggggagtggatgggccggcggggcctgcccaggaacctggcccctggccccccaagaagacgctacaggaaggagaccctgcaggccctggacatgcctgtgctgcctgtgacagccacagagatccggcagtacctgcggggccacggcatccccttccaggacggccacagctgcctgcgggccctgagcccctttgctgagagcagccagctgaagggccagacaggagtgaccaccagcttcagcctcttcatcgacaagaccaccggccacttcctgtgcatgaccagcctggccgagggctcctgggaggacttccaggcctctgtggagggcagaggagatggagcccgggagggcttcctgctgagcaaggcccctgagtttgaagattctgaggaggtgcggcgcatctggaacagagccatccccctgtgggagctgcctgaccaggaggaggtgcagctggccgacaccatgtttggcctgaccaaggtgacagatgacaccctgaagcgcttctctgtgcgctacctgcggcctgcccggagcctggtgttcccctggttcagccctgggggcagcggcctgcggggcctgaagctgctggaggccaagtgccagggagatggagtgtcctatgaggagaccaccatcccccggcccagcgcctaccacaacctgtttggcctgcccctcatcagcagaagagatgctgaggtggtgctgaccagccgggagctggacagcctggccctgaaccagagcacaggcctgcccaccctgaccctgccccggggcaccacctgcctgcccccagccctgctgccctacctggagcagttccgccgcatcgtgttctggctgggagatgacctgcgctcctgggaggccgccaagctgtttgccaggaagctgaaccccaagcgctgcttcctggtgcggcctggggaccagcagccccggcccctggaggccctgaatggaggcttcaacctgagccgcatcctgaggacagccctgcctgcctggcacaagagcatcgtgtccttccggcagctgcgggaggaggtgctgggggagctgagcaatgtggagcaggccgccggcctgcgctggagccgcttcccagacctgaaccgcatcctgaagggccacaggaaaggagagctgactgtgttcaccggccccactggaagtggcaagaccaccttcatcagtgaatatgccctggacctgtgcagccagggcgtgaacaccctgtggggcagctttgagatcagcaatgtgcggctggcccgggtgatgctgacccagtttgctgagggccgcctggaggaccagctggacaagtatgaccactgggccgacagatttgaggacctgcccctgtacttcatgaccttccacggccagcagagcatccgcaccgtcatcgacaccatgcagcacgctgtgtatgtgtatgacatctgccacgtgatcatcgacaacctgcagttcatgatgggccacgagcagctgagcacagacagaattgctgcccaggactacatcattggagtcttcaggaagtttgccacagacaacaactgccacgtgaccctggtgatccaccccaggaaggaggatgatgacaaggagctgcagacagccagcatcttcggcagcgccaaggccagccaggaggccgacaacgtgctgatcctgcaggacaggaagctggtgacaggccctgggaagcgctacctgcaggtgtccaagaacagatttgatggagatgtgggcgtcttccccctggagttcaacaagaacagcctgaccttcagcatcccccccaagaacaaggcccggctgaagaagatcaaggatgacaccggccctgtggccaagaagcccagcagcggcaagaagggggccaccacccagaacagcgagatctgcagcggccaggcccccaccccagaccagcctgacaccagcaagaggagcaagtag

SEQ ID NO: 147557 - DNA, 1749 bp, synthetic construct
  misc_feature 1..1749: note = Description of Artificial Sequence: Synthetic coding sequence
  source 1..1749: mol_type = other DNA
atgtgggtgctgctgcggagcggctaccccctgcgcatcctgctgcccctgcggggggagtggatgggccggcggggcctgcccaggaacctggcccctggccccccaagaagacgctacaggaaggagaccctgcaggccctggacatgcctgtgctgcctgtgacagccacagagatccggcagtacctgcggggccacggcatccccttccaggacggccacagctgcctgcgggccctgagcccctttgctgagagcagccagctgaagggccagacaggagtgaccaccagcttcagcctcttcatcgacaagaccaccggccacttcctgtgcatgaccagcctggccgagggctcctgggaggacttccaggcctctgtggagggcagaggagatggagcccgggagggcttcctgctgagcaaggcccctgagtttgaagattctgaggaggtgcggcgcatctggaacagagccatccccctgtgggagctgcctgaccaggaggaggtgcagctggccgacaccatgtttggcctgaccaaggtgacagatgacaccctgaagcgcttctctgtgcgctacctgcggcctgcccggagcctggtgttcccctggttcagccctgggggcagcggcctgcggggcctgaagctgctggaggccaagtgccagggagatggagtgtcctatgaggagaccaccatcccccggcccagcgcctaccacaacctgtttggcctgcccctcatcagcagaagagatgctgaggtggtgctgaccagccgggagctggacagcctggccctgaaccagagcacaggcctgcccaccctgaccctgccccggggcaccacctgcctgcccccagccctgctgccctacctggagcagttccgccgcatcgtgttctggctgggagatgacctgcgctcctgggaggccgccaagctgtttgccaggaagctgaaccccaagcgctgcttcctggtgcggcctggggaccagcagccccggcccctggaggccctgaatggaggcttcaacctgagccgcatcctgaggacagccctgcctgcctggcacaagagcatcgtgtccttccggcagctgcgggaggaggtgctgggggagctgagcaatgtggagcaggccgccggcctgcgctggagccgcttcccagacctgaaccgcatcctgaagggccacaggaaaggagagctgactgtgttcaccggccccactggaagtggcaagaccaccttcatcagtgaatatgccctggacctgtgcagccagggcgtgaacaccctgtggggcagctttgagatcagcaatgtgcggctggcccgggtgatgctgacccagtttgctgagggccgcctggaggaccagctggacaagtatgaccactgggccgacagatttgaggacctgcccctgtacttcatgaccttccacggccagcagagcatccgcaccgtcatcgacaccatgcagcacgctgtgtatgtgtatgacatctgccacgtgatcatcgacaacctgcagttcatgatgggccacgagcagctgagcacagacagaattgctgcccaggactacatcattggagtcttcaggaagtttgccacagacaacaactgccacgtgaccctggtgatccaccccaggaaggaggatgatgacaaggagctgcagacagccagcatcttcggcagcgccaaggtgtctggcctgtag

SEQ ID NO: 147558 - DNA, 1029 bp, synthetic construct
  misc_feature 1..1029: note = Description of Artificial Sequence: Synthetic coding sequence
  source 1..1029: mol_type = other DNA
atgcccttcctgctgggcctgcggcaggacaaggaggcctgtgtgggcaccaacaaccagagctacatctgtgacaccggccactgctgcggccagagccagtgctgcaactactactatgagctgtggtggttctggctggtgtggaccatcatcatcatcctgagctgctgctgcgtgtgccaccaccggcgggccaagcaccggctgcaggcccagcagaggcagcacgagatcaacctgattgcctaccgggaggcccacaactacagcgccctgcccttctacttccgcttcctgcccaactacctgctgcccccctatgaggaggtggtgaacagaccacccaccccacctccaccctacagcgccttccagctgcagcagcagcagctgctgcccccccagtgtggccctgctgggggcagccccccaggcatcgaccccacccggggcagccagggcgcccagagcagccccctgtctgagcccagccgcagcagcaccaggcctccttccattgctgaccctgaccccagcgacctgcctgtggacagagctgccaccaaggcccctggcatggagcccagcggctctgtggccggcctgggggagctggaccccggggccttcctggacaaggatgctgaatgtcgggaggagctgctgaaggatgacagcagcgagcacggggccccagacagcaaggagaagaccccaggccgccaccggcgcttcaccggggacagcggcatcgaggtgtgtgtgtgcaacagaggccaccatgatgatgacctgaaggagttcaacaccctgattgatgatgccctggatggccccctggacttctgtgacagctgccacgtgcggcccccaggagatgaggaggagggcctgtgccagagcagcgaggagcaggcccgggagcccggccacccccacctgccccggcccccagcctgcctgctgctgaacaccatcaatgagcaggacagccccaacagccagagcagcagcagccccagctag

SEQ ID NO: 147559 - DNA, 1092 bp, synthetic construct
  misc_feature 1..1092: note = Description of Artificial Sequence: Synthetic coding sequence
  source 1..1092: mol_type = other DNA
atggagcggcggcggctgctgggcggcatggccctgctgctgctgcaggccctgcccagccccctgagcgcccgggcagagcccccccaggacaaggaggcctgtgtgggcaccaacaaccagagctacatctgtgacaccggccactgctgcggccagagccagtgctgcaactactactatgagctgtggtggttctggctggtgtggaccatcatcatcatcctgagctgctgctgcgtgtgccaccacagaagagccaagcaccggctgcaggcccagcagaggcagcacgagatcaacctgattgcctaccgggaggcccacaactacagcgccctgcccttctacttccgcttcctgcccaactacctgctgcccccctatgaggaggtggtgaaccggccccccaccccacctccaccctacagcgccttccagctgcagcagcagcagctgctgcccccccagtgtggccctgctgggggcagccccccaggcatcgaccccacccggggcagccagggcgcccagagcagccccctgtctgagcccagccgcagcagcacccggccccccagcattgctgaccctgaccccagcgacctgcctgtggaccgggccgccaccaaggcccctggcatggagcccagcggctctgtggccggcctgggggagctggaccccggggccttcctggacaaggatgctgagtgccgggaggagctgctgaaggatgacagcagcgagcacggggccccagacagcaaggagaagaccccaggccgccaccggcgcttcaccggggacagcggcatcgaggtgtgtgtgtgcaacagaggccaccatgatgatgacctgaaggagttcaacaccctgattgatgatgccctggatggccccctggacttctgtgacagctgccacgtgcggcccccaggagatgaggaggagggcctgtgccagagcagcgaggagcaggcccgggagcccggccacccccacctgccccggcccccagcctgcctgctgctgaacaccatcaatgagcaggacagccccaacagccagagcagcagcagccccagctag

SEQ ID NO: 147560 - DNA, 1056 bp, synthetic construct
  misc_feature 1..1056: note = Description of Artificial Sequence: Synthetic coding sequence
  source 1..1056: mol_type = other DNA
atggccacagatgtgcagctggccgactaccccctgatgagccccaaggccgagctgaagctggagaagaagagcggcaggaagcccaggagcccccgggacagcggcccccagaaggagctggtgattcctggcatcgtggactttgagcgcatcagaagagccctgcggacccccaagccccagaccccaggcacctactgcttcggccgcctgagccaccacagcttcttcagccgccaccacccccacccccagcacgtgacccacatccaggacctgaccgggaagcctgtgtgtgtggtgcgggacttccctgcccccctgcctgagagcacagtgttcagcggctgccagatgggcatccccaccatctctgtgcccatcggggacccccagagcaacagaaacccccagctgagcagcgaggcctggaagaaggagctgaaggagctggccagccgggtggccttcctgaccaaggaggatgagctgaagaagaaggagaaggagcagaaggaggagcccctgcgggagcagggcgccaagtacagcgctgagaccggccgcctcatcccagccagcaccagggctgtgggcagaagaagaagccaccagggccagcagagccagagcagcagcagacatgagggcgtgcaggccttcctgctgcaggaccaggagctgctggtgctggagctgctgtgccgcatcctggagacagacctgctgagcgccatccagttctggctgctgtatgccccacccaaggagaaggacctggccctgggcctgctgcagacagctgtggcccagctgctgccccagcccctggtgtccatccccacagagaagctgctgagccagctgcctgaggtgcatgagcccccccaggagaagcaggagcccccctgcagccagagccccaagaagaccaagatcagccccttcaccaagtctgagaagccagagtacatcggggaggcccaggtgctgcagatgcacagcagccagaacacagagaagaagaccagcaagcccagggctgagagctag

SEQ ID NO: 147561 - DNA, 321 bp, synthetic construct
  misc_feature 1..321: note = Description of Artificial Sequence: Synthetic coding sequence
  source 1..321: mol_type = other DNA
cagtgtgccgagctgtggggctctgtgaggaagaacagcgacaagttcctgctgagcaggaacctgcaccccagcaaggaggagtaccggcagcagatcaagaccccaggagaggagtggaggcagatcctggtgcactggaggagcagcagccccccagatgccttcaagccagagcaccgggaggaggacattgaagctgagggccgggagctgcggggccccaacacctgcacctgcctggcccaggagcagccccagggcttccggggcgtgtctgtgtccaccaccttcaccgctgtgcctgacagcctgccctag

SEQ ID NO: 147562 - DNA, 753 bp, synthetic construct
  misc_feature 1..753: note = Description of Artificial Sequence: Synthetic coding sequence
  source 1..753: mol_type = other DNA
atggccacagatgtgcagctggccgactaccccctgatgagccccaaggccgagctgaagctggagaagaagagcggcaggaagcccaggagcccccgggacagcggcccccagaaggagctggtgattcctggcatcgtggactttgagcgcatcagaagagccctgcggacccccaagccccagaccccaggcacctactgcttcggccgcctgagccaccacagcttcttcagccgccaccacccccacccccagcacgtgacccacatccaggacctgaccgggaagcctgtgtgtgtggtgcgggacttccctgcccccctgcctgagagcacagtgttcagcggctgccagatgggcatccccaccatctctgtgcccatcggggacccccagagcaacagaaacccccagctgagcagcgaggcctggaagaaggagctgaaggagctggccagccgggtggccttcctgaccaaggaggatgagctgaagaagaaggagaaggagcagaaggaggagcccctgcgggagcagggcgccaagtacagcgctgagaccggccgcctcatcccagccagcaccagggctgtgggcagaagaagaagccaccagggccagcagagccagagcagcagcagacatgagggcgtgcaggccttcctgctgcaggaccaggagctgctgaagaagaccagcctgtgggacagctgccggcagcagtggctgagcagcttccccagcccctag

SEQ ID NO: 147563 - DNA, 951 bp, synthetic construct
  misc_feature 1..951: note = Description of Artificial Sequence: Synthetic coding sequence
  source 1..951: mol_type = other DNA
agccccaaggccgagctgaagctggagaagaagagcggcaggaagcccaggagcccccgggacagcggcccccagaaggagctggtgattcctggcatcgtggactttgagcgcatccggcgggccctgcggacccccaagccccagaccccaggcacctactgcttcggccgcctgagccaccacagcttcttcagccgccaccacccccacccccagcacgtgacccacatccaggacctgaccgggaagcctgtgtgtgtggtgcgggacttccctgcccccctgcctgagagcaccgtcttcagcggctgccagatgggcatccccaccatctctgtgcccatcggggacccccagagcaacagaaacccccagctgagcagcgcctggaagaaggagctgaaggagctggccagccgggtggccttcctgaccaaggaggatgagctgaagaagaaggaggacaccaccagcctgaactggaactgcaagagcagaagaccccaggcccctggcctgtctggaacagacctgggcgctgctgagctgggcatcaagaaggagcagaaggaggagcccctgcgggagcagggcgccaagtacagcgctgagaccggccgcctcatcccagccagcaccagggctgtgggcagaagaagaagccaccagggccagcagagccagagcagcagcagacatgagggcgtgcaggccttcctgctgcaggaccaggagctgctgggcggcctgaccagccctggggcccctgtgtctgaccccggcaaccggctggccaagaggaaccctgtgctggccgccctgcggagcgcccagggcaagaggcccaggagcggcaccccagctgacagcagcggcagcgcccccagccctgcccccagcctgcacccctacaggaaggcccccaagccagccagccgcagcgcctag

SEQ ID NO: 147564 - DNA, 498 bp, synthetic construct
  misc_feature 1..498: note = Description of Artificial Sequence: Synthetic coding sequence
  source 1..498: mol_type = other DNA
atgtacatcagccccaaggccgagctgaagctggagaagaagagcggcaggaagcccaggagcccccgggacagcggcccccagaaggagctggtgattcctggcatcgtggactttgagcgcatcagaagagccctgcggacccccaagccccagaccccaggcacctactgcttcggccgcctgagccaccacagcttcttcagccgccaccacccccacccccagcacgtgacccacatccaggacctgaccgggaagcctgtgtgtgtggtgcgggacttccctgcccccctgcctgagagcacagtgttcagcggctgccagatgggcatccccaccatctctgtgcccatcggggacccccagagcaacagaaacccccagctgagcagcgcctggaagaaggagctgaaggagctggccagccgggtggccttcctgaccaaggaggatgagctgaagaagaaggaggtgggcgctgagcacaggagctag

SEQ ID NO: 147565 - DNA, 672 bp, synthetic construct
  misc_feature 1..672: note = Description of Artificial Sequence: Synthetic coding sequence
  source 1..672: mol_type = other DNA
atgctgtgggtgcagaggaagagaagaaggaaggagaccagtgaatgtcccagcgacaaggacaagagccctgagagccacaaggccaagaatgaatcctggatcaagagccacttcagccggctgtctgaggagaagctggccctggacaacaatgccagcgccagcggaaatgccacccagacagagagcggcagcgaggaggtgagcagcacagtgcacatcgagaccttcaccaccaggcatggagaggtgggcagcgccctgcaccgggagagcttcaccagccggcagaagaccagcggccccagcgtcatccaggagatccaccaggagagcggcaaggcccccagcacagatgaggccacctgggccgctgtggccgcctgcaccaaggagattgacacccagggccgccacctggcccacagcatgctgcagagggccatcgcctaccagcacagcggccacctggagagcaaggacatcaaccaggaggagctgcgggccctggaggaggtggagatgaagctgcagaagaacttcctgacccagcgggagaacaccatcgccggggccaaccacacccacaccttctacggccacagccaccacagccaccacggccaccccagccaccagagccacagcctgcccaacagaagacactag

SEQ ID NO: 147566 - DNA, 399 bp, synthetic construct
  misc_feature 1..399: note = Description of Artificial Sequence: Synthetic coding sequence
  source 1..399: mol_type = other DNA
atgggccgcacctggtgtggcatgtggaggagaagaagacctggccgccgctctgctgtgccccgctggccccacctgagcagccagagcggcgtggagcccccagaccgctggacaggcaccccaggctggcccagccgggaccaggaggcccctggctccatgatgcctcctgctgctgcccagcccagcgcccacggggccctggtgcccccagccacagcccacgagcctgtggaccacccagccctgcactggctggcctgctgctgctgcctgagcctgcccggccagctgcccctggccatccggctgggctgggacctggacctggaggccggccccagcagcggcaagctgtgcccccgggcccggcgctggcagcccctgcccagctag

SEQ ID NO: 147567 - DNA, 537 bp, synthetic construct
  misc_feature 1..537: note = Description of Artificial Sequence: Synthetic coding sequence
  source 1..537: mol_type = other DNA
atggccagcttcctggtgtggcccctgaggacagccctgcggggcggcaagtcctgggccggccctggggtgggctgtggaggagatggagcccggggcggcggggagctgagcctgagcaacctggacctgcctggagctggggaggccggcctggagcaccaccccctgctgggccacctgttcatctctgctgtgccccgctggccccacctgagcagccagagcggcgtggagcccccagaccgctggacaggcaccccaggctggcccagccgggaccaggaggcccctggctccatgatgcctcctgctgctgcccagcccagcgcccacggggccctggtgcccccagccacagcccacgagcctgtggaccacccagccctgcactggctggcctgctgctgctgcctgagcctgcccggccagctgcccctggccatccggctgggctgggacctggacctggaggccggccccagcagcggcaagctgtgcccccgggcccggcgctggcagcccctgcccagctag

SEQ ID NO: 147568 - DNA, 1350 bp, synthetic construct
  misc_feature 1..1350: note = Description of Artificial Sequence: Synthetic coding sequence
  source 1..1350: mol_type = other DNA
atgtggacagccctggtgctgatctggatcttcagcctgagcctgtctgagagccacgccgccagcaatgaccccaggaactttgtgcccaacaagatgtggaagggcctggtgaagagaaatgcctctgtggagaccgtggacaacaagaccagtgaagatgtgaccatggctgctgccagccctgtgaccctgaccaagggcaccagcgctgcccacctgaacagcatggaggtgaccacagaggacaccagcaggacagatgtgtctgagcccgccaccagcggcggcgctgctgatggagtgaccagcatcgcccccacagctgtggccagcagcaccacagctgccagcatcaccacagctgccagctccatgacagtggccagcagcgcccccaccacagctgccagcagcaccaccgtggccagcatcgcccccaccacagctgccagctccatgacagctgccagcagcacccccatgaccctggccctgcctgcccccaccagcaccagcacaggccgcacccccagcaccacagccaccggccaccccagcctgagcacagccctggcccaggtgcccaagagcagcgccctgcccaggacagccaccctggccaccctggccacccgggcccagacagtggccaccacagccaacaccagcagccccatgagcacccggcccagccccagcaagcacatgcccagcgacacagctgccagccctgtgccccccatgaggccccaggcccagggccccatcagccaggtgtctgtggaccagcctgtggtgaacaccaccaacaagagcacccccatgcccagcaacaccaccccagagcccgcccccacccccaccgtggtgaccaccaccaaggcccaggcccgggagcccacagccagccctgtgcctgtgccccacaccagccccatccctgagatggaggccatgagccccaccacccagcccagccccatgccctacacccagagagctgctggccctggcaccagccaggcccctgagcaggtggagacagaggccaccccaggcacagacagcacaggccccacccccaggagcagcggcggcaccaagatgcctgccacagacagctgccagcccagcacccagggccagtacatggtggtgaccacagagcccctgacccaggccgtggtggacaagaccctgctgctggtggtgctgctgctgggcgtgaccctcttcatcaccgtgctggtgctgtttgccctgcaggcctatgagagctacaagaagaaggactacacccaggtggactacctgatcaatggcatgtatgctgacagcgagatgtag

SEQ ID NO: 147569 - DNA, 78 bp, synthetic construct
  misc_feature 1..78: note = Description of Artificial Sequence: Synthetic coding sequence
  source 1..78: mol_type = other DNA
atgtggacagccctggtgctgatctggatcttcagcctgagcctgtctgagagccacgccgccagcaatgacccctag

SEQ ID NO: 147570 - DNA, 3969 bp, synthetic construct
  misc_feature 1..3969: note = Description of Artificial Sequence: Synthetic coding sequence
  source 1..3969: mol_type = other DNA
atgcctgtggtgtggcccaccctgctggacctgagcagagatgagtgcaagaggatcctgaggaagctggagctggaggcctatgctggggtcatcagcgccctgcgggcccagggcgacctgaccaaggagaagaaggacctgctgggggagctgagcaaggtgctgagcatcagcacagagcggcacagagctgaggtgcggcgggctgtgaatgatgagcggctgaccaccatcgcccacaacatgagcggccccaacagcagcagcgagtggagcattgagggccgccgcctggtgcccctgatgccccggctggtgccccagacagccttcaccgtgacagccaatgctgtggccaatgctgccatccagcacaatgccagcctgcctgtgcctgctgagaccggcagcaaggaggtggtgtgctacagctacaccagcaccaccagcacccccaccagcacccctgtgcccagcggcagcatcgccaccgtgaagagccccaggcctgccagccctgccagcaatgtggtggtgctgcccagcggcagcacagtgtatgtgaagtctgtgtcctgcagtgatgaagatgagaagcccaggaagagaagaaggaccaacagcagcagcagcagccctgtggtgctgaaggaggtgcccaaggctgtggtgcctgtgtccaagaccatcaccgtgcctgtgtctggcagccccaagatgagcaacatcatgcagagcatcgccaacagcctgcccccccacatgagccctgtgaagatcaccttcaccaagcccagcacccagaccaccaacaccaccacccagaaggtgatcatcgtgaccaccagccccagcagcacctttgtgcccaacatcctgagcaagagccacaactatgctgctgtgaccaagctggtgcccaccagcgtcatcgccagcaccacccagaagccccctgtggtgatcacagccagccagagcagcctggtgagcaacagcagcagcggcagcagcagcagcacccccagccccatccccaacacagtggccgtgacagctgtggtgagcagcaccccatctgtggtgatgagcacagtggcccagggcgtgtccaccagcgccatcaagatggccagcacccggctgcccagccccaagagcctggtgtctgcccccacccagatcctggcccagttccccaagcagcaccagcagagccccaagcagcagctgtaccaggtgcagcagcagacccagcagcaggtggcccagcccagccctgtgagccaccagcagcagccccagcagagccccctgcccccaggcatcaagcccaccatccagatcaagcaggagagcggcgtgaagatcatcacccagcaggtgcagcccagcaagatcctgcccaagcctgtgacagccaccctgcccaccagcagcaacagccccatcatggtggtgagcagcaatggagccatcatgaccaccaagctggtgaccacccccaccggcacccaggccacctacacccggcccaccgtgagccccagcattggaaggatggccgccacccctggggccgccacctacgtgaagaccaccagcggcagcatcatcaccgtggtgcccaagagcctggccaccctgggcggcaagatcatcagcagcaacatcgtgtctggcaccaccaccaagatcaccaccatccccatgaccagcaagcccaacgtgattgtggtgcagaagaccaccgggaagggcaccaccatccagggcctgcccgggaagaatgtggtgaccaccctgctgaatgctggaggagagaagaccatccagacagtgcccactggagccaagccagccatcctgacagccacccggcccatcaccaagatgattgtgacccagcccaagggcatcggcagcacagtgcagcctgctgccaagatcatccccaccaagatcgtgtatggccagcagggcaagacccaggtgctgatcaagcccaagcctgtgaccttccaggccaccgtggtgtctgagcagacccggcagctggtgacagagaccctgcagcaggccagccgggtggccgaggccggcaacagcagcatccaggagggcaaggaggagccccagaactacacagacagcagcagcagcagcacagagagcagccagagcagccaggacagccagcctgtggtgcacgtgattgccagccggcggcaggactggagcgagcacgagatcgccatggagaccagccccaccatcatctaccaggatgtgtcctctgagagccagagcgccaccagcaccatcaaggccctgctggagctgcagcagaccaccgtgaaggagaagctggagagcaagccccggcagcccaccatcgacctgagccagatggctgtgcccatccagatgacccaggagaagaggcacagccctgagagccccagcattgctgtggtggagagcgagctggtggccgagtacatcaccacagagaggacagatgagggcacagaggtggccttccccctgctggtgagccacaggagccagccccagcagcccagccagccccagaggaccctgctgcagcacgtggcccagagccagacagccacccagacctctgtggtggtgaagagcatcccagccagcagccctggggccatcacccacatcatgcagcaggccctgagcagccacacagccttcaccaagcacagcgaggagctgggcacagaggagggggaggtggaggagatggacaccctggacccccagacaggcctcttctacagaagtgccctgacccagagccagagcgccaagcagcagaagctgagccagccccccctggagcagacccagctgcaggtgaagaccctgcagtgcttccagaccaagcagaagcagaccatccacctgcaggccgaccagctgcagcacaagctgccccagatgccccagctgagcatccgccaccagaagctgacccccctgcagcaggagcaggcccagcccaagccagatgtgcagcacacccagcaccccatggtggccaaggaccggcagctgcccaccctgatggcccagcccccccagacagtggtgcaggtgctggccgtgaagaccacccagcagctgcccaagctgcagcaggcccccaaccagcccaagatctacgtgcagccccagaccccccagagccagatgagcctgcctgccagcagcgagaagcagacagccagccaggtggagcagcccatcatcacccagggcagctctgtgaccaagatcacctttgagggccggcagcccccaacagtgaccaagatcaccggcggcagctctgtgcccaagctgaccagccctgtgaccagcatcagccccatccaggccagcgagaagacagctgtgtctgacatcctgaagatgagcctgatggaggcccagattgacaccaacgtggagcacatgattgtggacccccccaagaaggccctggccacctccatgctgactggagaggccggcagcctgcccagcacccacatggtggtggccggcatggccaacagcaccccccagcagcagaagtgccgggagagctgcagcagccccagcacagtgggcagcagcctgaccaccaggaagattgaccccccagctgtgcctgccaccggccagttcatgaggatccagaatgtgggccagaagaaggccgaggagagccctgctgagatcatcatccaggccatcccccagtatgccatcccctgccacagcagcagcaatgtggtggtggagcccagcggcctgctggagctgaacaacttcaccagccagcagctggatgatgaggagacagccatggagcaggacatcgacagcagcacagaagatggaacagagcccagccccagccagagcagcgctgagaggagctag

SEQ ID NO: 147571 - DNA, 3468 bp, synthetic construct
  misc_feature 1..3468: note = Description of Artificial Sequence: Synthetic coding sequence
  source 1..3468: mol_type = other DNA
atgcctgtggtgtggcccaccctgctggacctgagcagagatgagtgcaagaggatcctgaggaagctggagctggaggcctatgctggggtcatcagcgccctgcgggcccagggcgacctgaccaaggagaagaaggacctgctgggggagctgagcaaggtgctgagcatcagcacagagcggcacagagctgaggtgcggcgggctgtgaatgatgagcggctgaccaccatcgcccacaacatgagcggccccaacagcagcagcgagtggagcattgagggccgccgcctggtgcccctgatgccccggctggtgccccagacagccttcaccgtgacagccaatgctgtggccaatgctgccatccagcacaatgccagcctgcctgtgcctgctgagaccggcagcaaggaggtggtgtgctacagctacaccagcaccaccagcacccccaccagcacccctgtgcccagcggcagcatcgccaccgtgaagagccccaggcctgccagccctgccagcaatgtggtggtgctgcccagcggcagcacagtgtatgtgaagtctgtgtcctgcagtgatgaagatgagaagcccaggaagagaagaaggaccaacagcagcagcagcagccctgtggtgctgaaggaggtgcccaaggctgtggtgcctgtgtccaagaccatcaccgtgcctgtgtctggcagccccaagatgagcaacatcatgcagagcatcgccaacagcctgcccccccacatgagccctgtgaagatcaccttcaccaagcccagcacccagaccaccaacaccaccacccagaaggtgatcatcgtgaccaccagccccagcagcacctttgtgcccaacatcctgagcaagagccacaactatgctgctgtgaccaagctggtgcccaccagcgtcatcgccagcaccacccagaagccccctgtggtgatcacagccagccagagcagcctggtgagcaacagcagcagcggcagcagcagcagcacccccagccccatccccaacacagtggccgtgacagctgtggtgagcagcaccccatctgtggtgatgagcacagtggcccagggcgtgtccaccagcgccatcaagatggccagcacccggctgcccagccccaagagcctggtgtctgcccccacccagatcctggcccagttccccaagcagcaccagcagagccccaagcagcagctgtaccaggtgcagcagcagacccagcagcaggtggcccagcccagccctgtgagccaccagcagcagccccagcagagccccctgcccccaggcatcaagcccaccatccagatcaagcaggagagcggcgtgaagatcatcacccagcaggtgcagcccagcaagatcctgcccaagcctgtgacagccaccctgcccaccagcagcaacagccccatcatggtggtgagcagcaatggagccatcatgaccaccaagctggtgaccacccccaccggcacccaggccacctacacccggcccaccgtgagccccagcattggaaggatggccgccacccctggggccgccacctacgtgaagaccaccagcggcagcatcatcaccgtggtgcccaagagcctggccaccctgggcggcaagatcatcagcagcaacatcgtgtctggcaccaccaccaagatcaccaccatccccatgaccagcaagcccaacgtgattgtggtgcagaagaccaccgggaagggcaccaccatccagggcctgcccgggaagaatgtggtgaccaccctgctgaatgctggaggagagaagaccatccagacagtgcccactggagccaagccagccatcctgacagccacccggcccatcaccaagatgattgtgacccagcccaagggcatcggcagcacagtgcagcctgctgccaagatcatccccaccaagatcgtgtatggccagcagggcaagacccaggtgctgatcaagcccaagcctgtgaccttccaggccaccgtggtgtctgagcagacccggcagctggtgacagagaccctgcagcaggccagccgggtggccgaggccggcaacagcagcatccaggagggcaaggaggagccccagaactacacagacagcagcagcagcagcacagagagcagccagagcagccaggacagccagcctgtggtgcacgtgattgccagccggcggcaggactggagcgagcacgagatcgccatggagaccagccccaccatcatctaccaggatgtgtcctctgagagccagagcgccaccagcaccatcaaggccctgctggagctgcagcagaccaccgtgaaggagaagctggagagcaagccccggcagcccaccatcgacctgagccagatggctgtgcccatccagatgacccaggagaagaggcacagccctgagagccccagcattgctgtggtggagagcgagctggtggccgagtacatcaccacagagaggacagatgagggcacagaggtggccttccccctgctggtgagccacaggagccagccccagcagcccagccagccccagaggaccctgctgcagcacgtggcccagagccagacagccacccagacctctgtggtggtgaagagcatcccagccagcagccctggggccatcacccacatcatgcagcaggccctgagcagccacacagccttcaccaagcacagcgaggagctgggcacagaggagggggaggtggaggagatggacaccctggacccccagacaggcctcttctacagaagtgccctgacccagagccagagcgccaagcagcagaagctgagccagccccccctggagcagacccagctgcaggtgaagaccctgcagtgcttccagaccaagcagaagcagaccatccacctgcaggccgaccagctgcagcacaagctgccccagatgccccagctgagcatccgccaccagaagctgacccccctgcagcaggagcaggcccagcccaagccagatgtgcagcacacccagcaccccatggtggccaaggaccggcagctgcccaccctgatggcccagcccccccagacagtggtgcaggtgctggccgtgaagaccacccagcagctgcccaagctgcagcaggcccccaaccagcccaagatctacgtgcagccccagaccccccagagccagatgagcctgcctgccagcagcgagaagcagacagccagccaggccatcccccagtatgccatcccctgccacagcagcagcaatgtggtggtggagcccagcggcctgctggagctgaacaacttcaccagccagcagctggatgatgaggagacagccatggagcaggacatcgacagcagcacagaagatggaacagagcccagccccagccagagcagcgctgagaggagctag

SEQ ID NO: 147572 - DNA, 3015 bp, synthetic construct
  misc_feature 1..3015: note = Description of Artificial Sequence: Synthetic coding sequence
  source 1..3015: mol_type = other DNA
atgcctgtggtgtggcccaccctgctggacctgagcagagatgagtgcaagaggatcctgaggaagctggagctggaggcctatgctggggtcatcagcgccctgcgggcccagggcgacctgaccaaggagaagaaggacctgctgggggagctgagcaaggtgctgagcatcagcacagagcggcacagagctgaggtgcggcgggctgtgaatgatgagcggctgaccaccatcgcccacaacatgagcggccccaacagcagcagcgagtggagcattgagggccgccgcctggtgcccctgatgccccggctggtgccccagacagccttcaccgtgacagccaatgctgtggccaatgctgccatccagcacaatgccagcctgcctgtgcctgctgagaccggcagcaaggagggcgtgtcctgcagtgatgaagatgagaagcccaggaagagaagaaggaccaacagcagcagcagcagccctgtggtgctgaaggaggtgcccaaggctgtggtgcctgtgtccaagaccatcaccgtgcctgtgtctggcagccccaagatgagcaacatcatgcagagcatcgccaacagcctgcccccccacatgagccctgtgaagatcaccttcaccaagcccagcacccagaccaccaacaccaccacccagaaggtgatcatcgtgaccaccagccccagcagcacctttgtgcccaacatcctgagcaagagccacaactatgctgctgtgaccaagctggtgcccaccagcgtcatcgccagcaccacccagaagccccctgtggtgatcacagccagccagagcagcctggtgagcaacagcagcagcggcagcagcagcagcacccccagccccatccccaacacagtggccgtgacagctgtggtgagcagcaccccatctgtggtgatgagcacagtggcccagggcgtgtccaccagcgccatcaagatggccagcacccggctgcccagccccaagagcctggtgtctgcccccacccagatcctggcccagttccccaagcagcaccagcagagccccaagcagcagctgtaccaggtgcagcagcagacccagcagcaggtggcccagcccagccctgtgagccaccagcagcagccccagcagagccccctgcccccaggcatcaagcccaccatccagatcaagcaggagagcggcgtgaagatcatcacccagcaggtgcagcccagcaagatcctgcccaagcctgtgacagccatcctgacagccacccggcccatcaccaagatgattgtgacccagcccaagggcatcggcagcacagtgcagcctgctgccaagatcatccccaccaagatcgtgtatggccagcagggcaagacccaggtgctgatcaagcccaagcctgtgaccttccaggccaccgtggtgtctgagcagacccggcagctggtgacagagaccctgcagcaggccagccgggtggccgaggccggcaacagcagcatccaggagggcaaggaggagccccagaactacacagacagcagcagcagcagcacagagagcagccagagcagccaggtgagccacaggagccagccccagcagcccagccagccccagaggaccctgctgcagcacgtggcccagagccagacagccacccagacctctgtggtggtgaagagcatcccagccagcagccctggggccatcacccacatcatgcagcaggccctgagcagccacacagccttcaccaagcacagcgaggagctgggcacagaggagggggaggtggaggagatggacaccctggacccccagacaggcctcttctacagaagtgccctgacccagagccagagcgccaagcagcagaagctgagccagccccccctggagcagacccagctgcaggtgaagaccctgcagtgcttccagaccaagcagaagcagaccatccacctgcaggccgaccagctgcagcacaagctgccccagatgccccagctgagcatccgccaccagaagctgacccccctgcagcaggagcaggcccagcccaagccagatgtgcagcacacccagcaccccatggtggccaaggaccggcagctgcccaccctgatggcccagcccccccagacagtggtgcaggtgctggccgtgaagaccacccagcagctgcccaagctgcagcaggcccccaaccagcccaagatctacgtgcagccccagaccccccagagccagatgagcctgcctgccagcagcgagaagcagacagccagccaggtggagcagcccatcatcacccagggcagctctgtgaccaagatcacctttgagggccggcagcccccaacagtgaccaagatcaccggcggcagctctgtgcccaagctgaccagccctgtgaccagcatcagccccatccaggccagcgagaagacagctgtgtctgacatcctgaagatgagcctgatggaggcccagattgacaccaacgtggagcacatgattgtggacccccccaagaaggccctggccacctccatgctgactggagaggccggcagcctgcccagcacccacatggtggtggccggcatggccaacagcaccccccagcagcagaagtgccgggagagctgcagcagccccagcacagtgggcagcagcctgaccaccaggaagattgaccccccagctgtgcctgccaccggccagttcatgaggatccagaatgtgggccagaagaaggccgaggagagccctgctgagatcatcatccaggccatcccccagtatgccatcccctgccacagcagcagcaatgtggtggtggagcccagcggcctgctggagctgaacaacttcaccagccagcagctggatgatgaggagacagccatggagcaggacatcgacagcagcacagaagatggaacagagcccagccccagccagagcagcgctgagaggagctag

SEQ ID NO: 147573 - DNA, 3969 bp, synthetic construct; identical to SEQ ID NO: 147570
  misc_feature 1..3969: note = Description of Artificial Sequence: Synthetic coding sequence
  source 1..3969: mol_type = other DNA

SEQ ID NO: 147574 - DNA, 624 bp, synthetic construct
  misc_feature 1..624: note = Description of Artificial Sequence: Synthetic coding sequence
  source 1..624: mol_type = other DNA
atggctgtgttccatgacatgctgctgcagcccctgggcatgttcctgtgcctgagcctgcagctgagcagcgccaccttcatccgctacagcagcacctgcttcacctttgatgagtactacaccatcaccctggacatcaaggccagcagccacatctatgagagcaatgctgtgtacagcgtgtttgtgcctgtgaatgattctgtgtatgctgtggtgatgaagaccctggatgagaacagcgacagcgctggcctgtggcagagagctgacaagaactgctacagcaacagcacctactacgtgaaggaccagtacatgacagtgctggaggcccagtggcaggcccctgagcctgagaacatcacagaggtggagatccaggccttcaccgtgcagatccgggccctgcccatcctgagcaccctgaagctgcgggagaagctgagcaccctggccctggccgccaagatcccccagagcagcgccttcaagcccttcttcatgatcacccccaagagcatccggctggagggcctggccaaccaggtgttcagcagccccatcacagaggccatctacatcctgctggccttcctgaccagcaccctgctcttctag

SEQ ID NO: 147575 - DNA, 3708 bp, synthetic construct
  misc_feature 1..3708: note = Description of Artificial Sequence: Synthetic coding sequence
  source 1..3708: mol_type = other DNA
atggaccacacagccagccagaatgcccaggacctgattggcatcccccacctgggcgtgtctggcagcagcaccaagtggcacagcgagctgagccccacagagggcccccacagcgctggcagcagcaccccaggcttcctgagccccatggccgagctgagccaccccagccccccacctccagccctgggcagcctgctgcagctgcctgatggcagccccagctggagcatgctggaggtggccagcggccctgccagcacccagcagatcaaggccggcgtgcccggccgggtgcacaacggggtgtccctgcccaccttcaagaacacagaaacagccacccatgaagctgagcccccactcttccagacagctgagagcggggccatcgagatgaccagcaggaagctggccagcgccacagccaatgattctgccaaccccctgcacctgtctgctgcccctgagaacagccggggccctgccctgtctgctgagcacaccagcagcctggtgcccagcctgcacatcaccaccctgggccaggagcaggccatcctgagcggggctgtgcctgccagccccagcactggaacagctgacttccccagcatcctgaccttcctgcagcccacagaaaatcatgccagccccagccctgtgcctgagatgcccaccctgcctgctgagggcagtgatggcagccccccagccacccgggacctgctgctgagcagcaaggtgcccaacctgctgagcacctcctggaccttcccccgctggaagaaggacagcgtgacagccatcctgggcaagaatgaggaggccaacgtgaccatccccctgcaggccttccccaggaaggaggtgctgagcctgcacacagtgaatggatttgtgtctgacttcagcactggatctgtgagcagccccatcatcacagcccccaggaccaaccccctgcccagcggcccccccctgcccagcatcctgagcatccaggccacccagaccgtcttccccagcctgggcttcagcagcaccaagccagaggcctatgctgctgctgtggaccacagcggcctgcctgccagcgccagcaagcaggtgcgggccagccccagctccatggatgtgtatgacagcctgaccatcggggacatgaagaagccagccaccacagatgtgttctggagcagcctgtctgctgagaccggcagcctgagcacagagagcatcatcagcggcctgcagcagcagaccaactatgacctgaatggccacaccatcagcaccacctcctgggagacccacctggcccccacagccccacccaacggcctgaccagcgctgctgatgccatcaagagccaggacttcaaggacacagctggccacagcgtgacagctgagggcttcagcatccaggacctggtgctgggcaccagcattgagcagcctgtgcagcagagcgacatgaccatggtgggcagccacatcgacctgtggcccaccagcaacaacaaccacagccgggacttccagacagctgaggtggcctactacagccccaccaccaggcacagcgtgagccacccccagctgcagctgcccaaccagcctgcccaccccctgctgctgaccagccctggccccaccagcacaggcagcctgcaggagatgctgagtgatggaacagacaccggcagcgagatcagcagtgacatcaacagcagccctgagagaaatgccagcacccccttccagaacatcctgggctaccacagcgctgctgagagcagcatcagcacctctgtgttccccaggaccagcagccgggtgctgcgggccagccagcaccccaagaagtggacaggagctgccaccaatgctgctgacacagtgagcagcaaggtgcagcccacagctgctgctgctgtgaccctcttcctgaggaagagcagccccccagccctgtctgctgccctggtggccaagggcaccagcagcagccccctggccgtggccagcggccctgccaagagcagctccatgaccaccctggccaagaatgtgaccaacaaggccgccagcggccccaagaggaccccaggagctgtgcacacagccttccccttcacccccacctacatgtatgccaggacaggccacaccaccagcacccacacagccatgcagggcaacatggacacagccagcggcctgctgagcaccacctacctgcccaggaagccccaggccatgcacacaggcctgcccaaccccaccaacctggagatgccccgggccagcaccccccggcccctgactgtgacagctgccctgaccagcatcacagcctctgtgaaggccacccggctgccccccctgcgggcagagaacacagatgctgtgctgcctgctgccagcgctgctgtggtgaccaccgggaagatggccagcaacctggagtgccagatgagcagcaagctgctggtgaagacagtgctcttcctgacccagaggagagtgcagatcagcgagagcctgaagttcagcatcgccaagggcctgacccaggccctgaggaaggccttccaccagaatgatgtgtctgcccacgtggacatcctggagtacagccacaacgtgacagtgggctactatgccaccaagggcaagctggtgtacctgcctgctgtggtgattgagatgctgggcgtgtatggagtgtccaatgtgacagctgacctgaagcagcacaccccccacctgcagagcgtggccgtgctggccagcccctggaacccccagcctgctggctacttccagctgaagacagtgctgcagtttgtgtcccaggccgacaacatccagagctgcaagtttgcccagaccatggagcagaggctgcagaaggccttccaggatgctgagaggaaggtgctgaacaccaagagcaacctgaccatccagatcgtgtccaccagcaatgccagccaggccgtgaccctggtgtatgtggtgggcaaccagagcaccttcctgaatggaacagtggccagcagcctgctgagccagctgtctgctgagctggtgggcttctacctgacctacccacccctgaccatcgccgagcccctggagtaccccaacctggacatcagcgagaccacccgggactactgggtgatcaccgtgctgcagggcgtggacaacagcctggtgggcctgcacaaccagagctttgcccgggtgatggagcagaggctggcccagctgttcatgatgagccagcagcagggccgccgcttcaagagggccaccaccctgggcagctacacagtgcagatggtgaagatgcagagggtgcccggccccaaggaccctgctgagctgacctactacaccctgtacaacgggaagcccctgctgggcacagctgctgccaagatcctgagcaccatcgacagccagaggatggccctgaccctgcaccacgtggtgctgctgcaggccgaccctgtggtgaagaacccccccaacaacctgtggatcatcgctgctgtgctggcccccatcgctgtggtgaccgtcatcatcatcatcatcacagctgtgctgtgcaggaagaacaagaatgacttcaagccagacaccatgatcaacctgccccagagggccaagcaggtggcccagtag

SEQ ID NO: 147576 - DNA, 5550 bp, synthetic construct
  misc_feature 1..5550: note = Description of Artificial Sequence: Synthetic coding sequence
  source 1..5550: mol_type = other DNA
atggaccacacagccagccagaatgcccaggacctgattggcatcccccacctgggcgtgtctggcagcagcaccaagtggcacagcgagctgagccccacagagggcccccacagcgctggcagcagcaccccaggcttcctgagccccatggccgagctgagccaccccagccccccacctccagccctgggcagcctgctgcagctgcctgatggcagccccagctggagcatgctggaggtggccagcggccctgccagcacccagcagatcaaggccggcgtgcccggccgggtgcacaacggggtgtccctgcccaccttcaagaacacagaaacagccacccatgaagctgagcccccactcttccagacagctgagagcggggccatcgagatgaccagcaggaagctggccagcgccacagccaatgattctgccaaccccctgcacctgtctgctgcccctgagaacagccggggccctgccctgtctgctgagcacaccagcagcctggtgcccagcctgcacatcaccaccctgggccaggagcaggccatcctgagcggggctgtgcctgccagccccagcactggaacagctgacttccccagcatcctgaccttcctgcagcccacagaaaatcatgccagccccagccctgtgcctgagatgcccaccctgcctgctgagggcagtgatggcagccccccagccacccgggacctgctgctgagcagcaaggtgcccaacctgctgagcacctcctggaccttcccccgctggaagaaggacagcgtgacagccatcctgggcaagaatgaggaggccaacgtgaccatccccctgcaggccttccccaggaaggaggtgctgagcctgcacacagtgaatggatttgtgtctgacttcagcactggatctgtgagcagccccatcatcacagcccccaggaccaaccccctgcccagcggcccccccctgcccagcatcctgagcatccaggccacccagaccgtcttccccagcctgggcttcagcagcaccaagccagaggcctatgctgctgctgtggaccacagcggcctgcctgccagcgccagcaagcaggtgcgggccagccccagctccatggatgtgtatgacagcctgaccatcggggacatgaagaagccagccaccacagatgtgttctggagcagcctgtctgctgagaccggcagcctgagcacagagagcatcatcagcggcctgcagcagcagaccaactatgacctgaatggccacaccatcagcaccacctcctgggagacccacctggcccccacagccccacccaacggcctgaccagcgctgctgatgccatcaagagccaggacttcaaggacacagctggccacagcgtgacagctgagggcttcagcatccaggacctggtgctgggcaccagcattgagcagcctgtgcagcagagcgacatgaccatggtgggcagccacatcgacctgtggcccaccagcaacaacaaccacagccgggacttccagacagctgaggtggcctactacagccccaccaccaggcacagcgtgagccacccccagctgcagctgcccaaccagcctgcccaccccctgctgctgaccagccctggccccaccagcacaggcagcctgcaggagatgctgagtgatggaacagacaccggcagcgagatcagcagtgacatcaacagcagccctgagagaaatgccagcacccccttccagaacatcctgggctaccacagcgctgctgagagcagcatcagcacctctgtgttccccaggaccagcagccgggtgctgcgggccagccagcaccccaagaagtggacagctgacacagtgagcagcaaggtgcagcccacagctgctgctgctgtgaccctcttcctgaggaagagcagccccccagccctgtctgctgccctggtggccaagggcaccagcagcagccccctggccgtggccagcggccctgccaagagcagctccatgaccaccctggccaagaatgtgaccaacaaggccgccagcggccccaagaggaccccaggagctgtgcacacagccttccccttcacccccacctacatgtatgccaggacaggccacaccaccagcacccacacagccatgcagggcaacatggacacagccagcggcctgctgagcaccacctacctgcccaggaagccccaggccatgcacacaggcctgcccaaccccaccaacctggagatgccccgggccagcaccccccggcccctgactgtgacagctgccctgaccagcatcacagcctctgtgaaggccacccggctgccccccctgcgggcagagaacacagatgctgtgctgcctgctgccagcgctgctgtggtgaccaccgggaagatggccagcaacctggagtgccagatgagcagcaagctgctggtgaagacagtgctcttcctgacccagaggagagtgcagatcagcgagagcctgaagttcagcatcgccaagggcctgacccaggccctgaggaaggccttccaccagaatgatgtgtctgcccacgtggacatcctggagtacagccacaacgtgacagtgggctactatgccaccaagggcaagctggtgtacctgcctgctgtggtgattgagatgctgggcgtgtatggagtgtccaatgtgacagctgacctgaagcagcacaccccccacctgcagagcgtggccgtgctggccagcccctggaacccccagcctgctggctacttccagctgaagacagtgctgcagtttgtgtcccaggccgacaacatccagagctgcaagtttgcccagaccatggagcagaggctgcagaaggccttccaggatgctgagaggaaggtgctgaacaccaagagcaacctgaccatccagatcgtgtccaccagcaatgccagccaggccgtgaccctggtgtatgtggtgggcaaccagagcaccttcctgaatggaacagtggccagcagcctgctgagccagctgtctgctgagctggtgggcttctacctgacctacccacccctgaccatcgccgagcccctggagtaccccaacctggacatcagcgagaccacccgggactactgggtgatcaccgtgctgcagggcgtggacaacagcctggtgggcctgcacaaccagagctttgcccgggtgatggagcagaggctggcccagctgttcatgatgagccagcagcagggccgccgcttcaagagggccaccaccctgggcagctacacagtgcagatggtgaagatgcagagggtgcccggccccaaggaccctgctgagctgacctactacaccctgtacaacgggaagcccctgctgggcacagctgctgccaagatcctgagcaccatcgacagccagaggatggccctgaccctgcaccacgtggtgctgctgcaggccgaccctgtggtgaagaacccccccaacaacctgtggatcatcgctgctgtgctggcccccatcgctgtggtgaccgtcatcatcatcatcatcacagctgtgctgtgcaggaagaacaagaatgacttcaagccagacaccatgatcaacctgccccagagggccaagcctgtgcagggctttgattatgccaagcagcacctgggccagcagggcgcagatgaggaggtgattcctgtgacccaggagaccgtggtgctgcccctgcccatcagagatgccccccaggagagagatgtggcccaggacggcagcaccatcaagacagccaagagcacagagaccaggaagagccgcagccccagtgaaaatggatctgtcatcagcaatgaaagtggcaagcccagcagcggccgccgcagcccccagaatgtgatggcccagcagaaggtgaccaaggaggaggccaggaagagaaatgtgcctgccagtgatgaggaggagggcgctgtgctgtttgacaacagcagcaaggtggccgctgagccctttgacaccagcagcggctctgtgcagctgattgccatcaagcccacagccctgcccatggtgccccccaccagtgacaggagccaggagagcagcgctgtgctgaatggagaggtgaacaaggccctgaagcagaagagtgacatcgagcactacagaaacaagctgcggctgaaggccaagaggaagggctactatgacttccctgctgtggagaccagcaagggcctgacagagaggaagaagatgtatgagaaggcccccaaggagatggagcacgtgctggaccctgattctgagctgtgtgcccccttcacagagagcaagaaccggcagcagatgaagaacagcgtgtaccgcagccggcagagcctgaacagccccagccctggagaaacagagatggacctgctggtgacccgggagcggccccggcggggcatcagaaattctggctatgacacagagcctgagatcatcgaggagaccaacatcgacagagtgcctgagccccggggctacagccgcagccggcaggtgaagggccacagcgagaccagcaccctgagcagccagcccagcattgatgaggtgcggcagcagatgcacatgctgctggaggaggccttcagcctggccagcgctggccacgccggccagagccgccaccaggaggcctacggcagcgcccagcacctgccctacagcgaggtggtgaccagcgcccctggcaccatgacccggcccagggctggggtgcagtgggtgcccacctacagacctgagatgtaccagtacagcctgcccaggcctgcctaccgcttcagccagctgcctgagatggtgatgggcagccccccacctcctgtgccccccaggacaggccctgtggccgtggccagcctgcggcgcagcaccagtgacatcggcagcaagaccaggatggccgagagcactggacctgagcccgcccagctgcatgattctgccagcttcacccagatgagccggggccctgtgtctgtgacccagctggaccagagcgccctgaactacagcggcaacacagtgcctgctgtgtttgccatcccagctgccaacagacctggcttcaccggctacttcatccccaccccacccagcagctacagaaaccaggcctggatgtcctatgctggggagaatgagctgcccagccagtgggccgacagcgtgcccctgcccggctacatcgaggcctaccccaggagccgctacccccagagcagccccagccggctgccccggcagtacagccagcctgccaacctgcaccccagcctggagcaggccccagcccccagcacagctgccagccagcagagcctggccgagaatgaccccagtgatgcccccctgaccaacatcagcacagctgccctggtgaaggccatccgggaggaggtggccaagctggccaagaagcagacagacatgtttgagttccaggtgtag

SEQ ID NO: 147577 - DNA, 5568 bp, synthetic construct
  misc_feature 1..5568: note = Description of Artificial Sequence: Synthetic coding sequence
  source 1..5568: mol_type = other DNA
atggaccacacagccagccagaatgcccaggacctgattggcatcccccacctgggcgtgtctggcagcagcaccaagtggcacagcgagctgagccccacagagggcccccacagcgctggcagcagcaccccaggcttcctgagccccatggccgagctgagccaccccagccccccacctccagccctgggcagcctgctgcagctgcctgatggcagccccagctggagcatgctggaggtggccagcggccctgccagcacccagcagatcaaggccggcgtgcccggccgggtgcacaacggggtgtccctgcccaccttcaagaacacagaaacagccacccatgaagctgagcccccactcttccagacagctgagagcggggccatcgagatgaccagcaggaagctggccagcgccacagccaatgattctgccaaccccctgcacctgtctgctgcccctgagaacagccggggccctgccctgtctgctgagcacaccagcagcctggtgcccagcctgcacatcaccaccctgggccaggagcaggccatcctgagcggggctgtgcctgccagccccagcactggaacagctgacttccccagcatcctgaccttcctgcagcccacagaaaatcatgccagccccagccctgtgcctgagatgcccaccctgcctgctgagggcagtgatggcagccccccagccacccgggacctgctgctgagcagcaaggtgcccaacctgctgagcacctcctggaccttcccccgctggaagaaggacagcgtgacagccatcctgggcaagaatgaggaggccaacgtgaccatccccctgcaggccttccccaggaaggaggtgctgagcctgcacacagtgaatggatttgtgtctgacttcagcactggatctgtgagcagccccatcatcacagcccccaggaccaaccccctgcccagcggcccccccctgcccagcatcctgagcatccaggccacccagaccgtcttccccagcctgggcttcagcagcaccaagccagaggcctatgctgctgctgtggaccacagcggcctgcctgccagcgccagcaagcaggtgcgggccagccccagctccatggatgtgtatgacagcctgaccatcggggacatgaagaagccagccaccacagatgtgttctggagcagcctgtctgctgagaccggcagcctgagcacagagagcatcatcagcggcctgcagcagcagaccaactatgacctgaatggccacaccatcagcaccacctcctgggagacccacctggcccccacagccccacccaacggcctgaccagcgctgctgatgccatcaagagccaggacttcaaggacacagctggccacagcgtgacagctgagggcttcagcatccaggacctggtgctgggcaccagcattgagcagcctgtgcagcagagcgacatgaccatggtgggcagccacatcgacctgtggcccaccagcaacaacaaccacagccgggacttccagacagctgaggtggcctactacagccccaccaccaggcacagcgtgagccacccccagctgcagctgcccaaccagcctgcccaccccctgctgctgaccagccctggccccaccagcacaggcagcctgcaggagatgctgagtgatggaacagacaccggcagcgagatcagcagtgacatcaacagcagccctgagagaaatgccagcacccccttccagaacatcctgggctaccacagcgctgctgagagcagcatcagcacctctgtgttccccaggaccagcagccgggtgctgcgggccagccagcaccccaagaagtggacaggagctgccaccaatgctgctgacacagtgagcagcaaggtgcagcccacagctgctgctgctgtgaccctcttcctgaggaagagcagccccccagccctgtctgctgccctggtggccaagggcaccagcagcagccccctggccgtggccagcggccctgccaagagcagctccatgaccaccctggccaagaatgtgaccaacaaggccgccagcggccccaagaggaccccaggagctgtgcacacagccttccccttcacccccacctacatgtatgccaggacaggccacaccaccagcacccacacagccatgcagggcaacatggacacagccagcggcctgctgagcaccacctacctgcccaggaagccccaggccatgcacacaggcctgcccaaccccaccaacctggagatgccccgggccagcaccccccggcccctgactgtgacagctgccctgaccagcatcacagcctctgtgaaggccacccggctgccccccctgcgggcagagaacacagatgctgtgctgcctgctgccagcgctgctgtggtgaccaccgggaagatggccagcaacctggagtgccagatgagcagcaagctgctggtgaagacagtgctcttcctgacccagaggagagtgcagatcagcgagagcctgaagttcagcatcgccaagggcctgacccaggccctgaggaaggccttccaccagaatgatgtgtctgcccacgtggacatcctggagtacagccacaacgtgacagtgggctactatgccaccaagggcaagctggtgtacctgcctgctgtggtgattgagatgctgggcgtgtatggagtgtccaatgtgacagctgacctgaagcagcacaccccccacctgcagagcgtggccgtgctggccagcccctggaacccccagcctgctggctacttccagctgaagacagtgctgcagtttgtgtcccaggccgacaacatccagagctgcaagtttgcccagaccatggagcagaggctgcagaaggccttccaggatgctgagaggaaggtgctgaacaccaagagcaacctgaccatccagatcgtgtccaccagcaatgccagccaggccgtgaccctggtgtatgtggtgggcaaccagagcaccttcctgaatggaacagtggccagcagcctgctgagccagctgtctgctgagctggtgggcttctacctgacctacccacccctgaccatcgccgagcccctggagtaccccaacctggacatcagcgagaccacccgggactactgggtgatcaccgtgctgcagggcgtggacaacagcctggtgggcctgcacaaccagagctttgcccgggtgatggagcagaggctggcccagctgttcatgatgagccagcagcagggccgccgcttcaagagggccaccaccctgggcagctacacagtgcagatggtgaagatgcagagggtgcccggccccaaggaccctgctgagctgacctactacaccctgtacaacgggaagcccctgctgggcacagctgctgccaagatcctgagcaccatcgacagccagaggatggccctgaccctgcaccacgtggtgctgctgcaggccgaccctgtggtgaagaacccccccaacaacctgtggatcatcgctgctgtgctggcccccatcgctgtggtgaccgtcatcatcatcatcatcacagctgtgctgtgcaggaagaacaagaatgacttcaagccagacaccatgatcaacctgccccagagggccaagcctgtgcagggctttgattatgccaagcagcacctgggccagcagggcgcagatgaggaggtgattcctgtgacccaggagaccgtggtgctgcccctgcccatcagagatgccccccaggagagagatgtggcccaggacggcagcaccatcaagacagccaagagcacagagaccaggaagagccgcagccccagtgaaaatggatctgtcatcagcaatgaaagtggcaagcccagcagcggccgccgcagcccccagaatgtgatggcccagcagaaggtgaccaaggaggaggccaggaagagaaatgtgcctgccagtgatgaggaggagggcgctgtgctgtttgacaacagcagcaaggtggccgctgagccctttgacaccagcagcggctctgtgcagctgattgccatcaagcccacagccctgcccatggtgccccccaccagtgacaggagccaggagagcagcgctgtgctgaatggagaggtgaacaaggccctgaagcagaagagtgacatcgagcactacagaaacaagctgcggctgaaggccaagaggaagggctactatgacttccctgctgtggagaccagcaagggcctgacagagaggaagaagatgtatgagaaggcccccaaggagatggagcacgtgctggaccctgattctgagctgtgtgcccccttcacagagagcaagaaccggcagcagatgaagaacagcgtgtaccgcagccggcagagcctgaacagccccagccctggagaaacagagatggacctgctggtgacccgggagcggccccggcggggcatcagaaattctggctatgacacagagcctgagatcatcgaggagaccaacatcgacagagtgcctgagccccggggctacagccgcagccggcaggtgaagggccacagcgagaccagcaccctgagcagccagcccagcattgatgaggtgcggcagcagatgcacatgctgctggaggaggccttcagcctggccagcgctggccacgccggccagagccgccaccaggaggcctacggcagcgcccagcacctgccctacagcgaggtggtgaccagcgcccctggcaccatgacccggcccagggctggggtgcagtgggtgcccacctacagacctgagatgtaccagtacagcctgcccaggcctgcctaccgcttcagccagctgcctgagatggtgatgggcagccccccacctcctgtgccccccaggacaggccctgtggccgtggccagcctgcggcgcagcaccagtgacatcggcagcaagaccaggatggccgagagcactggacctgagcccgcccagctgcatgattctgccagcttcacccagatgagccggggccctgtgtctgtgacccagctggaccagagcgccctgaactacagcggcaacacagtgcctgctgtgtttgccatcccagctgccaacagacctggcttcaccggctacttcatccccaccccacccagcagctacagaaaccaggcctggatgtcctatgctggggagaatgagctgcccagccagtgggccgacagcgtgcccctgcccggctacatcgaggcctaccccaggagccgctacccccagagcagccccagccggctgccccggcagtacagccagcctgccaacctgcaccccagcctggagcaggccccagcccccagcacagctgccagccagcagagcctggccgagaatgaccccagtgatgcccccctgaccaacatcagcacagctgccctggtgaaggccatccgggaggaggtggccaagctggccaagaagcagacagacatgtttgagttccaggtgtag

SEQ ID NO: 147578 - DNA, 5067 bp, synthetic construct
  misc_feature 1..5067: note = Description of Artificial Sequence: Synthetic coding sequence
  source 1..5067: mol_type = other DNA
atccctgagggcctgtctgctgagcacaccagcagcctggtgcccagcctgcacatcaccaccctgggccaggagcaggccatcctgagcggggctgtgcctgccagccccagcactggaacagctgacttccccagcatcctgaccttcctgcagcccacagaaaatcatgccagccccagccctgtgcctgagatgcccaccctgcctgctgagggcagtgatggcagccccccagccacccgggacctgctgctgagcagcaaggtgcccaacctgctgagcacctcctggaccttcccccgctggaagaaggacagcgtgacagccatcctgggcaagaatgaggaggccaacgtgaccatccccctgcaggccttccccaggaaggaggtgctgagcctgcacacagtgaatggatttgtgtctgacttcagcactggatctgtgagcagccccatcatcacagcccccaggaccaaccccctgcccagcggcccccccctgcccagcatcctgagcatccaggccacccagaccgtcttccccagcctgggcttcagcagcaccaagccagaggcctatgctgctgctgtggaccacagcggcctgcctgccagcgccagcaagcaggtgcgggccagccccagctccatggatgtgtatgacagcctgaccatcggggacatgaagaagccagccaccacagatgtgttctggagcagcctgtctgctgagaccggcagcctgagcacagagagcatcatcagcggcctgcagcagcagaccaactatgacctgaatggccacaccatcagcaccacctcctgggagacccacctggcccccacagccccacccaacggcctgaccagcgctgctgatgccatcaagagccaggacttcaaggacacagctggccacagcgtgacagctgagggcttcagcatccaggacctggtgctgggcaccagcattgagcagcctgtgcagcagagcgacatgaccatggtgggcagccacatcgacctgtggcccaccagcaacaacaaccacagccgggacttccagacagctgaggtggcctactacagccccaccaccaggcacagcgtgagccacccccagctgcagctgcccaaccagcctgcccaccccctgctgctgaccagccctggccccaccagcacaggcagcctgcaggagatgctgagtgatggaacagacaccggcagcgagatcagcagtgacatcaacagcagccctgagagaaatgccagcacccccttccagaacatcctgggctaccacagcgctgctgagagcagcatcagcacctctgtgttccccaggaccagcagccgggtgctgcgggccagccagcaccccaagaagtggacagctgacacagtgagcagcaaggtgcagcccacagctgctgctgctgtgaccctcttcctgaggaagagcagccccccagccctgtctgctgccctggtggccaagggcaccagcagcagccccctggccgtggccagcggccctgccaagagcagctccatgaccaccctggccaagaatgtgaccaacaaggccgccagcggccccaagaggaccccaggagctgtgcacacagccttccccttcacccccacctacatgtatgccaggacaggccacaccaccagcacccacacagctgccaggaagcacggccactgcctgtggcctgtggtgtacaacctgccccccaggaagccccaggccatgcacacaggcctgcccaaccccaccaacctggagatgccccgggccagcaccccccggcccctgactgtgacagctgccctgaccagcatcacagcctctgtgaaggccacccggctgccccccctgcgggcagaaaatacagatgctgtgctgcctgctgccagcgctgctgtggtgaccaccgggaagatggccagcaacctggagtgccagatgagcagcaagctgctggtgaagacagtgctcttcctgacccagaggagagtgcagatcagcgagagcctgaagttcagcatcgccaagggcctgacccaggccctgaggaaggccttccaccagaatgatgtgtctgcccacgtggacatcctggagtacagccacaacgtgacagtgggctactatgccaccaagggcaagctggtgtacctgcctgctgtggtgattgagatgctgggcgtgtatggagtgtccaatgtgacagctgacctgaagcagcacaccccccacctgcagagcgtggccgtgctggccagcccctggaacccccagcctgctggctacttccagctgaagacagtgctgcagtttgtgtcccaggccgacaacatccagagctgcaagtttgcccagaccatggagcagaggctgcagaaggccttccaggatgctgagaggaaggtgctgaacaccaagagcaacctgaccatccagatcgtgtccaccagcaatgccagccaggccgtgaccctggtgtatgtggtgggcaaccagagcaccttcctgaatggcaccgtggccagcagcctgctgagccagctgtctgctgagctggtgggcttctacctgacctacccacccctgaccatcgccgagcccctggagtaccccaacctggacatcagcgagaccacccgggactactgggtgatcaccgtgctgcagggcgtggacaacagcctggtgggcctgcacaaccagagctttgcccgggtgatggagcagaggctggcccagctgttcatgatgagccagcagcagggccgccgcttcaagagggccaccaccctgggcagctacacagtgcagatggtgaagatgcagagggtgcccggccccaaggaccctgctgagctgacctactacaccctgtacaacgggaagcccctgctgggcacagctgctgccaagatcctgagcaccatcgacagccagaggatggccctgaccctgcaccacgtggtgctgctgcaggccgaccctgtggtgaagaacccccccaacaacctgtggatcatcgctgctgtgctggcccccatcgctgtggtgaccgtcatcatcatcatcatcacagctgtgctgtgcaggaagaacaagaatgacttcaagccagacaccatgatcaacctgccccagagggccaagcctgtgcagggctttgattatgccaagcagcacctgggccagcagggcgcagatgaggaggtgattcctgtgacccaggagaccgtggtgctgcccctgcccatcagagatgccccccaggagagagatgtggcccaggacggcagcaccatcaagacagccaagagcacagagaccaggaagagccgcagccccagtgaaaatggcagcgtcatcagcaatgaaagtggcaagcccagcagtggaagaagaagcccccagaatgtgatggcccagcagaaggtgaccaaggaggaggccaggaagagaaatgtgcctgccagtgatgaggaggagggcgctgtgctgtttgacaacagcagcaaggtggccgctgagccctttgacaccagcagcggctctgtgcagctgattgccatcaagcccacagccctgcccatggtgccccccaccagtgacaggagccaggagagcagcgctgtgctgaatggagaggtgaacaaggccctgaagcagaagagtgacatcgagcactacagaaacaagctgcggctgaaggccaagaggaagggctactatgacttccctgctgtggagaccagcaagggcctgacagagaggaagaagatgtatgagaaggcccccaaggagatggagcacgtgctggaccctgacagcgagctgtgtgcccccttcacagagagcaagaaccggcagcagatgaagaacagcgtgtaccgcagccggcagagcctgaacagccccagccctggagaaacagagatggacctgctggtgacccgggagcggccccggcggggcatccggaacagcggctatgacacagagcctgagatcatcgaggagaccaacatcgacagagtgcctgagccccggggctacagccgcagccggcaggtgaagggccacagcgagaccagcaccctgagcagccagcccagcattgatgaggtgcggcagcagatgcacatgctgctggaggaggccttcagcctggccagcgctggccatgctggccagagccgccaccaggaggcctacggcagcgcccagcacctgccctacagcgaggtggtgaccagcgcccctggcaccatgacccggccccgggccggcgtgcagtgggtgcccacctacagacctgagatgtaccagtacagcctgcccaggcctgcctaccgcttcagccagctgcctgagatggtgatgggcagccccccacctcctgtgccccccaggactggacctgtggccgtggccagcctgcggcgcagcaccagtgacatcggcagcaagaccaggatggccgagagcacaggccctgagcccgcccagctgcatgacagcgccagcttcacccagatgagccggggccctgtgtctgtgacccagctggaccagagcgccctgaactacagcggcaacacagtgcctgctgtgtttgccatcccagctgccaaccggcccggcttcaccggctacttcatccccaccccacccagcagctacagaaaccaggcctggatgtcctatgctggagaaaatgagctgcccagccagtgggccgacagcgtgcccctgcccggctacatcgaggcctaccccaggagccgctacccccagagcagccccagccggctgccccggcagtacagccagcctgccaacctgcaccccagcctggagcaggccccagcccccagcacagctgccagccagcagagcctggctgaaaatgaccccagtgatgcccccctgaccaacatcagcacagctgccctggtgaaggccatccgggaggaggtggccaagctggccaagaagcagacagacatgtttgagttccaggtgtag

SEQ ID NO: 147579 - DNA, 783 bp, synthetic construct
  misc_feature 1..783: note = Description of Artificial Sequence: Synthetic coding sequence
  source 1..783: mol_type = other DNA
atgatggacccctgcagcgtgggcgtgcagctgcggaccaccaatgaatgccacaagacctactacaccaggcacacaggcttcaagaccctgcaggagctgagcagcaatgacatgctgctgctgcagctgaggacaggcatgaccctgagcggcaacaacaccatctgcttccaccacgtgaagatctacatcgacagatttgaggacctgcagaagagctgctgtgaccccttcaacatccacaagaagctggccaagaagaacctgcacgtgattgacctggatgatgccaccttcctgagcgccaagtttggccggcagctggtgcccggctggaagctgtgccccaagtgcacccagatcatcaatggatctgtggatgtggacacagaggaccggcagaagaggaagccagagagtgatggccgcacagccaaggccctgcggagcctgcagttcaccaaccctggccggcagacagaatttgcccctgagaccgggaagcgggagaagaggcggctgaccaagaatgccacagctggcagtgaccggcaggtgatcccagccaagagcaaggtgtatgacagccagggcctgctgatcttcagcggcatggacctgtgtgactgcctggatgaggactgcctgggctgcttctacgcctgcccagcctgtggcagcaccaagtgtggggctgagtgccgctgtgacaggaagtggctgtatgagcagatcgagattgagggcggggagatcatccacaacaagcatgctggatag

SEQ ID NO: 147580 - DNA, 507 bp, synthetic construct
  misc_feature 1..507: note = Description of Artificial Sequence: Synthetic coding sequence
  source 1..507: mol_type = other DNA
atgatggacccctgcagcgtgggcgtgcagctgcggaccaccaatgaatgccacaagacctactacaccaggcacacaggcttcaagaccctgcaggagctgagcagcaatgacatgctgctgctgcagctgaggacaggcatgaccctgagcggcaacaacaccatctgcttccaccacgtgaagatctacatcgacagatttgaggacctgcagaagagctgctgtgaccccttcaacatccacaagaagctggccaagaagaacctgcacgtgattgacctggatgatgccaccttcctgagcgccaagtttggccggcagctggtgcccggctggaagctgtgccccaagtgcacccagatcatcaatggatctgtggatgtggacacagaggaccggcagaagaggaagccagagagtgatggccgcacagccaaggccctgcggagcctgcagttcaccaaccctggccggcagacagaatttgcccctgagactggatag

SEQ ID NO: 147581 - DNA, 180 bp, synthetic construct
  misc_feature 1..180: note = Description of Artificial Sequence: Synthetic coding sequence
  source 1..180: mol_type = other DNA
atgaggcagctgaagggcaagcccaagaaggagaccagcaaggacaagaaggagaggaagcaggccatgcaggaggcccggcagcagatcaccaccgtggtgctgcccaccctggccgtggtggtgctgctgattgtggtgtttgtgtatgtggccacccggcccaccatcacagaatag

SEQ ID NO: 147582 - DNA, 180 bp, synthetic construct; identical to SEQ ID NO: 147581
  misc_feature 1..180: note = Description of Artificial Sequence: Synthetic coding sequence
  source 1..180: mol_type = other DNA

SEQ ID NO: 147583 - DNA, 144 bp, synthetic construct
  misc_feature 1..144: note = Description of Artificial Sequence: Synthetic coding sequence
  source 1..144: mol_type = other DNA
atgaggcagctgaagggcaagcccaagaaggagaccagcaaggacaagaaggagaggaagcaggccatgcaggaggcccggcagcagatcaccaccgtggtgctgcccaccctggccgtggtggtgctgctgattgtggtgtag

SEQ ID NO: 147584 - DNA, 180 bp, synthetic construct; identical to SEQ ID NO: 147581
  misc_feature 1..180: note = Description of Artificial Sequence: Synthetic coding sequence
  source 1..180: mol_type = other DNA

SEQ ID NO: 147585 - DNA, 159 bp, synthetic construct
  misc_feature 1..159: note = Description of Artificial Sequence: Synthetic coding sequence
  source 1..159: mol_type = other DNA
atgaggcagctgaagggcaagcccaagaaggagaccagcaaggacaagaaggagaggaagcaggccatgcaggaggcccggcagcagatcaccaccgtggtgctgcccaccctggccgtggtggtgctgctgattgtggtgtttgtgtatgtggcctag

SEQ ID NO: 147586 - DNA, 3336 bp, synthetic construct
  misc_feature 1..3336: note = Description of Artificial Sequence: Synthetic coding sequence
  source 1..3336: mol_type = other DNA
atgcactggctgcctgctggccatgacatcaatggagccctggagcccagcaacatcgacaccagcatcctggaggagtacatcagcaaagaagatgccagtgacctgtgcttcccagacatcagcgccccagccagcagcgccagctacagccacggccagcctgccatgcctggcagcagtggagtgcaccacctgagccccccaggcggcggccccagccctggccgccacggccccctgcccccacctggctacggcacccccctgaactgcaacaacaacaacggcatgggcgccgcccccaagcccttccctgggggcactggaccacccatcaaggccgagcccaaggccccctatgcccctggcaccctgcctgacagccccccagattctggcagcgaggcctacagcccccagcaggtgaatgagccccacctgctgcggaccatcaccccagagaccctgtgccacgtgggcgtgcccagccggctggagcaccccccacctcctccagcccacctgcccggccccccacctcctcctcctcctccaccccactaccctgtgctgcagagggacctgtacatgaaggccgagccccccatcccccactacgccgccatgggccagggcctggtgcccacagacctgcaccacacccagcagagccagatgctgcaccagctgctgcagcagcacggggctgagctgcccacccaccccagcaagaagaggaagcacagcgagagcccccccagcaccctgaatgcccagatgctgaatggcatgatcaagcaggagcccggcaccgtgacagccctgcccctgcaccccacccgggcccccagccccccctggccaccccagggccccctgagccctggccctggcagcctgcccctgagcatcgcccgggtgcagaccccaccctggcaccccccaggggcccccagccctggcctgctgcaggacagcgacagcctgagcggcagctacctggaccccaactaccagagcatcaagtggcagccccaccagcagaacaagtgggccaccctgtatgatgccaactacaaggagctgcccatgctgacctacagagtggatgctgacaagggcttcaacttctctgtgggagatgatgcctttgtgtgccagaagaagaaccacttccaggtgacagtgtacatcggcatgctgggggagcccaagtatgtgaagaccccagagggcctgaagcccctggactgcttctacctgaagctgcatggagtgaagctggaggccctgaaccagagcatcaacatcgagcagagccagagcgacaggagcaagaggcccttcaaccctgtgacagtgaacctgcccccagagcaggtgaccaaggtgacagtgggccgcctgcacttcagcgagaccacagccaacaacatgaggaagaagggcaagcccaacccagaccagcgctacttcatgctggtggtggccctgcaggcccacgcccagaaccagaactacaccctggccgcccagatcagcgagcgcatcatcgtgcgggccagcaaccctggccagtttgaaagtgacagtgatgtgctgtggcagagggcccaggtgcctgacaccgtcttccaccacggccgggtgggcatcaacacagacagaccagatgaggccctggtggtgcatggaaatgtgaaggtgatgggcagcctgatgcaccccagcgacctgcgggccaaggagcacgtgcaggaggtggacaccacagagcagctgaagaggatcagcaggatgaggctggtgcactaccgctacaagccagagtttgctgccagcgctggcatcgaggccacagcccctgagactggagtcatcgcccaggaggtgaaggagatcctgcctgaggccgtgaaggacacaggagacatggtgtttgccaacgggaagaccatcgagaacttcctggtggtgaacaaggagcgcatcttcatggagaatgtgggcgctgtgaaggagctgtgcaagctgacagacaacctggagaccagaattgatgagctggagcgctggagccacaagctggccaagctgcggcggctggacagcctgaagagcacaggcagcagcggggccttcagccacgccggcagccagttcagcagagctggctctgtgccccacaagaagaggcctcccaaggtggccagcaagagcagctctgtggtgcctgaccaggcctgcatcagccagcgcttcctgcagggcaccatcatcgccctggtggtggtgatggccttctctgtggtgtccatgagcaccctgtatgtgctgagcctgaggacagaggaggacctggtggacacagatggccgcagcagccagagctttggcaccacccagctgcggcagagccccctgaccaccggcctgcccggcatccagcccagcctgctgctggtgaccaccagcctgaccagcagcgcccctggcagcgctgtgaggaccctggacatgtgcagcagccacccctgccctgtgatctgctgcagcagccccaccaccaaccccaccaccggccccagcctgggccccagcttcaaccctggccacgtgctgagccccagccccagccccagcaccaacagaagtggccccagccagatggccctgctgcctgtgaccaacatccgggccaagtcctggggcctgtctgtgaatggaattggccacagcaagcaccacaagagcctggagcccctggccagccctgctgtgcccttccctgggggccagggcaaggccaagaacagccccagcctgggcttccacggccgggcccggcggggggccctgcagagctctgtgggccctgctgagcccacctgggcccagggccagagcgagcctgtgcccagcctgaccagcatccaggtgctggagaacagcatgagcatcaccagccagtactgtgcccctggagatgcctgcaggcctggcaacttcacctaccacatccctgtgagcagcggcacccccctgcacctgagcctgaccctgcagatgaacagcagcagccctgtgtctgtggtgctgtgcagcctgcggagcaaggaggagccctgtgaggagggcagcctgccccagagcctgcacacccaccaggacacccagggcaccagccaccgctggcccatcaccatcctgtccttccgggagttcacctaccacttccgggtggccctgctgggccaggccaactgcagcagcgaggccctggcccagcctgccacagactaccacttccacttctaccgcctgtgtgactag

SEQ ID NO: 147587 - DNA, 3456 bp, synthetic construct
  misc_feature 1..3456: note = Description of Artificial Sequence: Synthetic coding sequence
  source 1..3456: mol_type = other DNA
atggaggtggtggatgaaacagaggccctgcagcgcttctttgagggccatgacatcaacggggccctggagcccagcaacatcgacaccagcatcctggaggagtacatcagcaaggaggatgccagtgacctgtgcttcccagacatcagcgccccagccagcagcgccagctacagccacggccagcctgccatgcctggcagcagcggcgtgcaccacctgagccccccaggcggcggccccagccctggaagacatggccccctgcccccacctggctacggcacccccctgaactgcaacaacaacaacggcatgggcgccgcccccaagcccttccctgggggcaccggcccccccatcaaggccgagcccaaggccccctatgcccctggcaccctgcctgacagccccccagacagcggcagcgaggcctacagcccccagcaggtgaatgagccccacctgctgcggaccatcaccccagagaccctgtgccacgtgggcgtgcccagccggctggagcaccccccacctcctccagcccacctgcccggccccccacctcctcctcctcctccaccccactaccctgtgctgcagagggacctgtacatgaaggccgagccccccatcccccactatgctgccatgggccagggcctggtgcccacagacctgcaccacacccagcagagccagatgctgcaccagctgctgcagcagcacggggctgagctgcccacccaccccagcaagaagaggaagcacagcgagagcccccccagcaccctgaatgcccagatgctgaatggcatgatcaagcaggagcccggcaccgtgacagccctgcccctgcaccccacccgggcccccagccccccctggccaccccagggccccctgagccctggccctggcagcctgcccctgagcatcgcccgggtgcagaccccaccctggcaccccccaggggcccccagccctggcctgctgcaggacagcgacagcctgagcggcagctacctggaccccaactaccagagcatcaagtggcagccccaccagcagaacaagtgggccaccctgtatgatgccaactacaaggagctgcccatgctgacctacagagtggatgctgacaagggcttcaacttctctgtgggagatgatgcctttgtgtgccagaagaagaaccacttccaggtgacagtgtacatcggcatgctgggggagcccaagtatgtgaagaccccagagggcctgaagcccctggactgcttctacctgaagctgcacggcgtgaagctggaggccctgaaccagagcatcaacatcgagcagagccagagcgacaggagcaagaggcccttcaaccctgtgacagtgaacctgcccccagagcaggtgaccaaggtgacagtgggccgcctgcacttcagcgagaccacagccaacaacatgaggaagaagggcaagcccaacccagaccagcgctacttcatgctggtggtggccctgcaggcccacgcccagaaccagaactacaccctggccgcccagatcagcgagcgcatcatcgtgcgggccagcaaccctggccagtttgaaagtgacagtgatgtgctgtggcagagggcccaggtgcctgacacagtgttccaccacggccgggtgggcatcaacacagacagaccagatgaggccctggtggtgcacggcaatgtgaaggtgatgggcagcctgatgcaccccagcgacctgcgggccaaggagcacgtgcaggaggtggacaccacagagcagctgaagaggatcagcaggatgaggctggtgcactaccgctacaagccagagtttgctgccagcgctggcatcgaggccacagcccctgagaccggggtgattgcccaggaggtgaaggagatcctgcctgaggccgtgaaggacaccggggacatggtgtttgccaacgggaagaccatcgagaacttcctggtggtgaacaaggagcgcatcttcatggagaatgtgggcgctgtgaaggagctgtgcaagctgacagacaacctggagaccagaattgatgagctggagcgctggagccacaagctggccaagctgcggcggctggacagcctgaagagcacaggcagcagcggggccttcagccatgctggcagccagttcagccgggccggctctgtgccccacaagaagaggcctcccaaggtggccagcaagagcagctctgtggtgcctgaccaggcctgcatcagccagcgcttcctgcagggcaccatcatcgccctggtggtggtgatggccttctctgtggtgtccatgagcaccctgtatgtgctgagcctgaggacagaggaggacctggtggacacagatggcagctttgctgtgtccaccagctgcctgctggccctgctgcggccccagcccccaggcggcagcgaggccctgtgcccctggagcagccagagctttggcaccacccagctgcggcagagccccctgaccaccggcctgcccggcatccagcccagcctgctgctggtgaccaccagcctgaccagcagcgcccctggcagcgctgtgaggaccctggacatgtgcagcagccacccctgccctgtgatctgctgcagcagccccaccaccaaccccaccaccggccccagcctgggccccagcttcaaccctggccacgtgctgagccccagccccagccccagcaccaacagaagtggccccagccagatggccctgctgcctgtgaccaacatccgggccaagtcctggggcctgtctgtgaatggcatcggccacagcaagcaccacaagagcctggagcccctggccagccctgctgtgcccttccctgggggccagggcaaggccaagaacagccccagcctgggcttccacggccgggccaggagaggagccctgcagagctctgtgggccctgctgagcccacctgggcccagggccagagcgccagcctgctggccgagcctgtgcccagcctgaccagcatccaggtgctggagaacagcatgagcatcaccagccagtactgtgcccctggagatgcctgcaggcctggcaacttcacctaccacatccctgtgagcagcggcacccccctgcacctgagcctgaccctgcagatgaacagcagcagccctgtgtctgtggtgctgtgcagcctgcggagcaaggaggagccctgtgaggagggcagcctgccccagagcctgcacacccaccaggacacccagggcaccagccaccgctggcccatcaccatcctgtccttccgggagttcacctaccacttccgggtggccctgctgggccaggccaactgcagcagcgaggccctggcccagcctgccacagactaccacttccacttctaccgcctgtgtgactag

SEQ ID NO: 147588 - DNA, 1449 bp, synthetic construct
  misc_feature 1..1449: note = Description of Artificial Sequence: Synthetic coding sequence
  source 1..1449: mol_type = other DNA
atgctgacctacagagtggatgctgacaagggcttcaacttctctgtgggagatgatgcctttgtgtgccagaagaagaaccacttccaggtgacagtgtacatcggcatgctgggggagcccaagtatgtgaagaccccagagggcctgaagcccctggactgcttctacctgaagctgcacggcctggaggccctgaaccagagcatcaacatcgagcagagccagagcgacaggagcaagaggcccttcaaccctgtgacagtgaacctgcccccagagcaggtgaccaaggtgacagtgggccgcctgcacttcagcgagaccacagccaacaacatgaggaagaagggcaagcccaacccagaccagcgctacttcatgctggtggtggccctgcaggcccacgcccagaaccagaactacaccctggccgcccagatcagcgagcgcatcatcgtgcgggccagcaaccctggccagtttgaaagtgacagtgatgtgctgtggcagagggcccaggtgcctgacaccgtcttccaccacggccgggtgggcatcaacacagacagaccagatgaggccctggtggtgcatggaaatgtgaaggtgatgggcagcctgatgcaccccagcgacctgcgggccaaggagcacgtgcaggaggtggacaccacagagcagctgaagaggatcagcaggatgaggctggtgcactaccgctacaagccagagtttgctgccagcgctggcatcgaggccacagcccctgagactggagtcatcgcccaggaggtgaaggagatcctgcctgaggccgtgaaggacacaggagacatggtgtttgccaacgggaagaccatcgagaacttcctggtggtgaacaaggtgtgtggcctgaagtatgtggtgtactgtgaagatgatgtgtgccacctgcctgtgctgagcctgggcgccaaggaggcctgggccgtgaaggagctgtgcaagctgacagacaacctggagaccagaattgatgagctggagcgctggagccacaagctggccaagctgcggcggctggacagcctgaagagcacaggcagcagcggggccttcagccatgctggcagccagttcagccgggccggctctgtgccccacaagaagaggcctcccaaggtggccagcaaggtgggcagcagctctgtggtgcctgaccaggcctgcatcagccagcgcttcctgcagggcaccatcatcgccctggtggtggtgatggccttccgccaccacctgggcgcccagccccaggagcagggcccccagccctgcccccgggagcgggccctggatggcggcagcagcagcaatggccaccccttcctgtggctgcagaggggcgtgcacgtgcacacagtgcgggcagagcccgcccacagaggaggccctggccgccactag

SEQ ID NO: 147589 - DNA, 789 bp, synthetic construct
  misc_feature 1..789: note = Description of Artificial Sequence: Synthetic coding sequence
  source 1..789: mol_type = other DNA
atggccgcccccagcggcaccgtgtctgattctgagagcagcaacagcagcagtgatgctgaggagctggagcgctgccgggaggccgccatgcctgcctggggcctggagcagaggcctcatgtggccggcaagccccgggccggggccgccaacagccagctgagcaccagccagcccagcctgcggcacaaggtgaatgaacatgagcaggatggaaatgagctgcagaccaccccagagttccgggcccacgtggccaagaagctgggcgccctgctggacagcttcatcaccatcagcgaggccgccaaggagcccgccaaggccaaggtgcagaaggtggccctggaggatgatggcttccgcctcttcttcacctctgtgcctgggggccgggagaaggaggagagcccccagcccaggaggaagaggcagcccagcagcagcagcgaggacagtgatgaggagtggaggcgctgccgggaggccgctgtgtctgccagtgacatcctgcaggagagcgccatccacagccctggcaccgtggagaaggaggccaagaagaagaggaagctgaagaagaaggccaagaaggtggcctctgtggacagcgctgtggccgccaccacccccacctccatggccaccgtgcagaagcagaagtctggagagctgaatggagaccaggtgtccctgggcaccaagaagaagaagaaggccaagaaggccagcgagaccagccccttccccccagccaagagcgccacagccatcccagccaactag

SEQ ID NO: 147590 - DNA, 666 bp, synthetic construct
  misc_feature 1..666: note = Description of Artificial Sequence: Synthetic coding sequence
  source 1..666: mol_type = other DNA
atgttctgccagaaccctggggccgccaacagccagctgagcaccagccagcccagcctgcggcacaaggtgaatgaacatgagcaggatggaaatgagctgcagaccaccccagagttccgggcccacgtggccaagaagctgggcgccctgctggacagcttcatcaccatcagcgaggccgccaaggagcccgccaaggccaaggtgcagaaggtggccctggaggatgatggcttccgcctcttcttcacctctgtgcctgggggccgggagaaggaggagagcccccagcccaggaggaagaggcagcccagcagcagcagcagtgaagattctgatgaggagtggaggcgctgccgggaggccgctgtgtctgccagtgacatcctgcaggagagcgccatccacagccctggcaccgtggagaaggaggccaagaagaagaggaagctgaagaagaaggccaagaaggtggcctctgtggacagcgctgtggccgccaccacccccacctccatggccaccgtgcagaagcagaagagcggggagctgaatggagaccaggtgtccctgggcaccaagaagaagaagaaggccaagaaggccagcgagaccagccccttccccccagccaagagcgccacagccatcccagccaactag

SEQ ID NO: 147591 - DNA, 699 bp, synthetic construct
  misc_feature 1..699: note = Description of Artificial Sequence: Synthetic coding sequence
  source 1..699: mol_type = other DNA
atgcctgcctggggcctggagcagaggcctcatgtggccggcaagccccgggccggggccgccaacagccagctgagcaccagccagcccagcctgcggcacaaggtgaatgaacatgagcaggatggaaatgagctgcagaccaccccagagttccgggcccacgtggccaagaagctgggcgccctgctggacagcttcatcaccatcagcgaggccgccaaggagcccgccaaggccaaggtgcagaaggtggccctggaggatgatggcttccgcctcttcttcacctctgtgcctgggggccgggagaaggaggagagcccccagcccaggaggaagaggcagcccagcagcagcagcgaggacagtgatgaggagtggaggcgctgccgggaggccgctgtgtctgccagtgacatcctgcaggagagcgccatccacagccctggcaccgtggagaaggaggccaagaagaagaggaagctgaagaagaaggccaagaaggtggcctctgtggacagcgctgtggccgccaccacccccacctccatggccaccgtgcagaagcagaagtctggagagctgaatggagaccaggtgtccctgggcaccaagaagaagaagaaggccaagaaggccagcgagaccagccccttccccccagccaagagcgccacagccatcccagccaactag

SEQ ID NO: 147592 - DNA, 1497 bp, synthetic construct
  misc_feature 1..1497: note = Description of Artificial Sequence: Synthetic coding sequence
  source 1..1497: mol_type = other DNA
atggatgtgacagaccactatgaagatgtgaggaagatctatgatgacttcctgaagaacagcaacatgctggacctgattgatgtgtaccagaagtgccgggccctgaccagcaactgtgagaactacaacacagtgagccccagccagctgctggacttcctgagcggcaagcagtatgctgtgggagatgaaacagacctgagcatccccaccagccccaccagcaagtacaacagagacaatgagaaggtgcagctgctggccaggaagatcatcttctcctacctgaacctgctggtgaacagcaagaatgacctggccgtggcctacatcctgaacatcccagaccggggcctgggccgggaggccttcacagacctgaagcatgctgcccgggagaagcagatgagcatcttcctggtggccaccagcttcatccgcaccatcgagctgggcggcaagggctacgcccccccacccagcgaccccctgcggacccacgtgaagggcctgagcaacttcatcaacttcatcgacaagctggatgagatcctgggggagatccccaaccccagcattgctgggggccagatcctgagcgtcatcaagatgcagctgatcaagggccagaacagccgggaccccttctgcaaggccatcgaggaggtggcccaggacctggacctgcgcatcaagaacatcatcaacagccaggagggcgtggtggccctgagcaccacagacatcagccctgcccggcccaagagccacgccatcaaccacggcacagcctactgcggccgggacacagtgaaggccctgctggtgctgctggatgaggaggccgccaatgcccccaccaagaacaaggccgagctgctgtatgatgaggagaacaccatccaccaccacggcaccagcatcctgaccctcttccgcagccccacccaggtgaacaacagcatcaagcccctgcgggagcgcatctgtgtgtccatgcaggagaagaagatcaagatgaagcagaccctcatccgcagccagtttgcctgcacctacaaggatgactacatgatcagcaaggacaactggaacaacgtgaacctggccagcaagcccctgtgtgtgctgtacatggagaatgacctgtctgaaggagtgaaccccagcgtgggccgcagcaccatcggcaccagctttggaaatgtgcacctggacaggagcaagaatgagaaggtgtccaggaagagcaccagccagacaggcaacaagagcagcaagaggaagcaggtggacctggatggagagaacatcctgtgtgacaacagaaatgaaccaccccagcacaagaatgccaagatccccaagaagagcaatgacagccagaaccggctgtatggcaagctggccaaggtggccaagagcaacaagtgcacagccaaggacaagctgatcagcggccaggccaagctgacccagttcttccggctgtag

SEQ ID NO: 147593 - DNA, 1740 bp, synthetic construct
  misc_feature 1..1740: note = Description of Artificial Sequence: Synthetic coding sequence
  source 1..1740: mol_type = other DNA
atggctgtgttcaaccagaagtctgtgtctgacatgatcaaggagttcaggaagaactggagggccctgtgcaacagcgagaggaccaccctgtgtggggctgacagcatgctgctggccctgcagctgtccatggccgagaacaacaagcagcacagcggggagttcaccgtgtccctgagtgatgtgctgctgacctggaagtacctgctgcacgagaagctgaacctgcctgtggagaacatggatgtgacagaccactatgaagatgtgaggaagatctatgatgacttcctgaagaacagcaacatgctggacctgattgatgtgtaccagaagtgccgggccctgaccagcaactgtgagaactacaacacagtgagccccagccagctgctggacttcctgagcggcaagcagtatgctgtgggagatgaaacagacctgagcatccccaccagccccaccagcaagtacaacagagacaatgagaaggtgcagctgctggccaggaagatcatcttctcctacctgaacctgctggtgaacagcaagaatgacctggccgtggcctacatcctgaacatcccagaccggggcctgggccgggaggccttcacagacctgaagcacgccgcccgggagaagcagatgagcatcttcctggtggccaccagcttcatccgcaccatcgagctgggcggcaagggctacgcccctcctccaagtgaccccctgcggacccacgtgaagggcctgagcaacttcatcaacttcatcgacaagctggatgagatcctgggggagatccccaaccccagcattgctgggggccagatcctgagcgtcatcaagatgcagctgatcaagggccagaacagccgggaccccttctgcaaggccatcgaggaggtggcccaggacctggacctgcgcatcaagaacatcatcaacagccaggagggcgtggtggccctgagcaccacagacatcagccctgcccggcccaagagccacgccatcaaccacggcacagcctactgcggccgggacacagtgaaggccctgctggtgctgctggatgaggaggccgccaatgcccccaccaagaacaaggccgagctgctgtatgatgaggagaacaccatccaccaccacggcaccagcatcctgaccctcttccgcagccccacccaggtgaacaacagcatcaagcccctgcgggagcgcatctgtgtgtccatgcaggagaagaagatcaagatgaagcagaccctcatccgcagccagtttgcctgcacctacaaggatgactacatgatcagcaaggacaactggaacaacgtgaacctggccagcaagcccctgtgtgtgctgtacatggagaatgacctgtctgagggcgtgaaccccagcgtgggccgcagcaccatcggcaccagctttggaaatgtgcacctggacaggagcaagaatgagaaggtgtccaggaagagcaccagccagacaggcaacaagagcagcaagaggaagcaggtggacctggatggagagaacatcctgtgtgacaacagaaatgagcccccccagcacaagaatgccaagatccccaagaagagcaatgacagccagaaccggctgtatggcaagctggccaaggtggccaagagcaacaagtgcacagccaaggacaagctgatcagcggccaggccaagctgacccagttcttccggctgtag

SEQ ID NO: 147594 - DNA, 894 bp, synthetic construct
  misc_feature 1..894: note = Description of Artificial Sequence: Synthetic coding sequence
  source 1..894: mol_type = other DNA
atggctgtgttcaaccagaagtctgtgtctgacatgatcaaggagttcaggaagaactggagggccctgtgcaacagcgagaggaccaccctgtgtggggctgacagcatgctgctggccctgcagctgtccatggccgagaacaacaagcagcacagcggggagttcaccgtgtccctgagtgatgtgctgctgacctggaagtacctgctgcacgagaagctgaacctgcctgtggagaacatggatgtgacagaccactatgaagatgtgaggaagatctatgatgacttcctgaagaacagcaacatgctggacctgattgatgtgtaccagaagtgccgggccctgaccagcaactgtgagaactacaacacagtgagccccagccagctgctggacttcctgagcggcaagcagtatgctgtgggagatgaaacagacctgagcatccccaccagccccaccagcaagtacaacagagacaatgagaaggtgcagctgctggccaggaagatcatcttctcctacctgaacctgctggtgaacagcaagaatgacctggccgtggcctacatcctgaacatcccagaccggggcctgggccgggaggccttcacagacctgaagcacgccgcccgggagaagcagatgagcatcttcctggtggccaccagcttcatccgcaccatcgagctgggcggcaagggctacgcccctcctccaagtgaccccctgcggacccacgtgaagggcctgagcaacttcatcaacttcatcgacaagctggatgagatcctgggggagatccccaacccccggggctgcaagagcatctgctggaagatcaacaactggaatgagttctggaagtgcagcagcggccagaagtag

SEQ ID NO: 147595 - DNA, 1497 bp, synthetic construct; identical to SEQ ID NO: 147592
  misc_feature 1..1497: note = Description of Artificial Sequence: Synthetic coding sequence
  source 1..1497: mol_type = other DNA

SEQ ID NO: 147596 - DNA, 813 bp, synthetic construct
  misc_feature 1..813: note = Description of Artificial Sequence: Synthetic coding sequence
  source 1..813: mol_type = other DNA
atggccaggtttgccctgactgtggtgagacatggagagacccgcttcaacaaggagaagatcatccagggccagggcgtggatgagcccctgtctgagaccggcttcaagcaggccgctgctgctggcatcttcctgaacaacgtgaagttcacccacgccttcagcagtgacctgatgaggaccaagcagaccatgcacggcatcctggagaggagcaagttctgcaaggacatgacagtgaagtatgacagccggctgcgggagaggaaatatggagtggtggagggcaaggccctgtctgagctgcgggccatggccaaggccgcccgggaggagtgccctgtgttcaccccacctggaggagagaccctggaccaggtgaagatgaggggcatcgacttctttgagttcctgtgccagctgatcctgaaggaggccgaccagaaggagcagttcagccagggcagccccagcaactgcctggagaccagcctggccgagatcttccccctgggcaagaaccacagcagcaaggtgaacagcgacagcggcatccctggcctggccgcctctgtgctggtggtgagccacggggcctacatgaggagcctgtttgactacttcctgacagacctgaagtgcagcctgcctgccaccctgagccgctctgagctgatgtctgtgacccccaacacaggcatgagcctcttcatcatcaactttgaggagggccgggaggtgaagcccaccgtgcagtgcatctgcatgaacctgcaggaccacctgaatggcctgacagagaccaggtag

SEQ ID NO: 147597 - DNA, 501 bp, synthetic construct
  misc_feature 1..501: note = Description of Artificial Sequence: Synthetic coding sequence
  source 1..501: mol_type = other DNA
atgagcacagtgggcctcttccacttccccacccccctgacccgcatctgcccagccccctggggcctgcggctgtgggagaagctgaccctgctgagccctggcattgctgtgacccctgtgcagatggccggcaagaaggactacccagccctgctgagcctggatgaaaatgagctggaggagcagtttgtgaagggccacggccctgggggccaggccaccaacaagaccagcaactgtgtggtgctgaagcacatccccagcggcatcgtggtgaagtgccaccagaccaggtctgtggaccagaacaggaagctggccaggaagatcctgcaggagaaggtggatgtgttctacaatggagagaacagccctgtgcacaaggagaagcgggaggccgccaagaagaagcaggagaggaagaagagggccaaggagaccctggagaagaagaagctgctgaaggagctgtgggagagcagcaagaaggtgcactag

SEQ ID NO: 147598 - DNA, 501 bp, synthetic construct; identical to SEQ ID NO: 147597
  misc_feature 1..501: note = Description of Artificial Sequence: Synthetic coding sequence
  source 1..501: mol_type = other DNA

SEQ ID NO: 147599 - DNA, 501 bp, synthetic construct; identical to SEQ ID NO: 147597
  misc_feature 1..501: note = Description of Artificial Sequence: Synthetic coding sequence
  source 1..501: mol_type = other DNA

SEQ ID NO: 147600 - DNA, 111 bp, synthetic construct
  misc_feature 1..111: note = Description of Artificial Sequence: Synthetic coding sequence
  source 1..111: mol_type = other DNA
atgagcacagtgggcctcttccacttccccacccccctgacccgcatctgcccagccccctggggcctgcggctgtgggagaagctgaccctgctgagccctggcatctag

SEQ ID NO: 147601 - DNA, 417 bp, synthetic construct
  misc_feature 1..417: note = Description of Artificial Sequence: Synthetic coding sequence
  source 1..417: mol_type = other DNA
atgagcacagtgggcctcttccacttccccacccccctgacccgcatctgcccagccccctggggcctgcggctgtgggagaagctgaccctgctgagccctggcattgctgtgacccctgtgcagatggccggcaagaaggactacccagccctgctgagcctggatgaaaatgagctggaggagcagtttgtgaagggccacggccctgggggccaggccaccaacaagaccagcaactgtgtggtgctgaagcacatccccagcggcatcgtggtgaagtgccaccagaccaggtctgtggaccagaacaggaagctggccaggaagatcctgcaggagaaggtggatgtgttctacaatggagagaacagccctgtgcacaaggagaagcgggaggccgccaagaagaagtag

SEQ ID NO: 147602 - DNA, 291 bp, synthetic construct
  misc_feature 1..291: note = Description of Artificial Sequence: Synthetic coding sequence
  source 1..291: mol_type = other DNA
atgagcacagtgggcctcttccacttccccacccccctgacccgcatctgcccagccccctggggcctgcggctgtgggagaagctgaccctgctgagccctggcattgctgtgacccctgtgcagatggccggcaagaaggactacccagccctgctgagcctggatgaaaatgagctggaggagcagtttgtgaagggccacggccctgggggccaggccaccaacaagaccagcaactgtgtggtgctgaagcacatccccagcggcatcgtggtgaaggtggactag

SEQ ID NO: 147603 - DNA, 423 bp, synthetic construct
  misc_feature 1..423: note = Description of Artificial Sequence: Synthetic coding sequence
  source 1..423: mol_type = other DNA
atgagccgcttcctgaatgtgctgcgctcctggctggtgatggtgtccatcatcgccatgggcaacaccctgcagagcttccgggaccacaccttcctgtatgagaagctgtacacaggcaagcccaacctggtgaatggcctgcaggcccggaccttcggcatctggaccctgctgagcagcgtcatccgctgcctgtgtgccatcgacatccacaacaagaccctgtaccacatcaccctgtggaccttcctgctggccctgggccacttcctgtctgagctgtttgtgtatggaacagctgcccccaccatcggcgtgctggcccccctgatggtggccagcttcagcatcctgggcatgctggtgggcctgcgctacctggaggtggagcctgtgtcccggcagaagaagagaaattag

SEQ ID NO: 147604 - DNA, 1443 bp, synthetic construct
  misc_feature 1..1443: note = Description of Artificial Sequence: Synthetic coding sequence
  source 1..1443: mol_type = other DNA
atgaacagaaccaagggagatgaggaggagtactggaacagcagcaagttcaaggccttcacctttgatgatgaagatgatgagctgagccagctgaaggagagcaagagagctgtgaacagcctgcgggactttgtggatgatgatgatgatgatgacctggagcgggtgtcctggagcggggagcctgtgggcagcatctcctggagcatccgggagacagctggcaacagcggcagcacccatgagggccgggagcagctgaagagcagaaattccttcagcagctatgcccagctgcccaagcccaccagcacctacagcctgagcagcttcttccgggccctgagtgacaccccagccaagagctatgcccctgagctgggccggcccaagggggagtacagagactacagcaatgactggagccccagcgacacagtgcggcggctgaggaagggcaaggtgtgcagcctggagcgcttccgcagcctgcaggacaagctgcagctgctggaggaggccgtgtccatgcatgatggaaatgtcatcacagctgtgctgatcttcctgaagaggaccctgagcaaggagatcctcttccgggagctggaggtgcggcaggtggccctgcggcacctgatccacttcctgaaggagattggagaccagaagctgctgctggacctcttccgcttcctggacagaacagaggagctggccctgagccactaccgggagcacctgaacatccaggaccctgacaagaggaaggagttcctgaagacctgtgtgggcctgcccttctctgctgaggacagcgcccacatccaggaccactacaccctgctggagcggcagatcatcatcgaggccaatgacagacacctggagagcgctggccagacagagatcttcaggaagcaccccaggaaggccagcatcctgaacatgcccctggtgaccaccctcttctacagctgcttctaccactacacagaagctgagggcaccttcagcagccctgtgaacctgaagaagaccttcaagatcccagacaagcagtatgtgctgacagccctggccgcccgggccaagctgcgggcctggaatgatgtggatgccctcttcaccaccaagaactggctgggctacaccaagaagagggcccccatcggcttccaccgggtggtggagatcctgcacaagaacaatgcccctgtgcagatcctgcaggagtatgtgaacctggtggaggatgtggacaccaagctgaacctggccaccaagttcaagtgccatgatgtggtgattgacacctacagagacctgaaggaccggcagcagctgctggcctaccgcagcaaggtggacaagggcagcgctgaggaggagaagattgatgccctgctgagcagcagccagatccgctggaagaactag

SEQ ID NO: 147605 - DNA, 1482 bp, synthetic construct
  misc_feature 1..1482: note = Description of Artificial Sequence: Synthetic coding sequence
  source 1..1482: mol_type = other DNA
atgaacagaaccaagggagatgaggaggagtactggaacagcagcaagttcaaggccttcacctttgatgatgaagatgatgagctgagccagctgaaggagagcaagagagctgtgaacagcctgcgggactttgtggatgatgatgatgatgatgacctggagcgggtgtcctggagcggggagcctgtgggcagcatctcctggagcatccgggagacagctggcaacagcggcagcacccatgagggccgggagcagctgaagagcagaaattccttcagcagctatgcccagctgcccaagcccaccagcacctacagcctgagcagcttcttccggggccgcaccaggcctggcagcttccagagcctgagtgatgccctgagtgacaccccagccaagagctatgcccctgagctgggccggcccaagggggagtacagagactacagcaatgactggagccccagcgacacagtgcggcggctgaggaagggcaaggtgtgcagcctggagcgcttccgcagcctgcaggacaagctgcagctgctggaggaggccgtgtccatgcatgatggaaatgtcatcacagctgtgctgatcttcctgaagaggaccctgagcaaggagatcctcttccgggagctggaggtgcggcaggtggccctgcggcacctgatccacttcctgaaggagatcggggaccagaagctgctgctggacctcttccgcttcctggacagaacagaggagctggccctgagccactaccgggagcacctgaacatccaggaccctgacaagaggaaggagttcctgaagacctgtgtgggcctgcccttcagcgcagaagattctgcccacatccaggaccactacaccctgctggagcggcagatcatcatcgaggccaatgacagacacctggagagcgctggccagacagagatcttcaggaagcaccccaggaaggccagcatcctgaacatgcccctggtgaccaccctcttctacagctgcttctaccactacacagaggccgagggcaccttcagcagccctgtgaacctgaagaagaccttcaagatcccagacaagcagtatgtgctgacagccctggccgcccgggccaagctgcgggcctggaatgatgtggatgccctcttcaccaccaagaactggctgggctacaccaagaagagggcccccatcggcttccaccgggtggtggagatcctgcacaagaacaatgcccctgtgcagatcctgcaggagtatgtgaacctggtggaggatgtggacaccaagctgaacctggccaccaagttcaagtgccatgatgtggtgattgacacctacagagacctgaaggaccggcagcagctgctggcctaccgcagcaaggtggacaagggcagcgctgaggaggagaagattgatgccctgctgagcagcagccagatccgctggaagaactag

SEQ ID NO: 147606 - DNA, 1335 bp, synthetic construct
  misc_feature 1..1335: note = Description of Artificial Sequence: Synthetic coding sequence
  source 1..1335: mol_type = other DNA
atgaacagaaccaagggagatgaggaggagtactggaacagcagcaagttcaaggccttcacctttgatgatgaagatgatgagctgagccagctgaaggagagcaagagagctgtgaacagcctgcgggactttgtggatgatgatgatgatgatgacctggagcgggtgtcctggagcggggagcctgtgggcagcaggacccggcccggcagcttccagagcctgagtgatgccctgagtgacaccccagccaagagctatgcccctgagctgggccggcccaagggggagtacagagactacagcaatgactggagccccagcgacacagtgcggcggctgaggaagggcaaggtgtgcagcctggagcgcttccgcagcctgcaggacaagctgcagctgctggaggaggccgtgtccatgcatgatggaaatgtcatcacagctgtgctgatcttcctgaagaggaccctgagcaaggagatcctcttccgggagctggaggtgcggcaggtggccctgcggcacctgatccacttcctgaaggagattggagaccagaagctgctgctggacctcttccgcttcctggacagaacagaggagctggccctgagccactaccgggagcacctgaacatccaggaccctgacaagaggaaggagttcctgaagacctgtgtgggcctgcccttctctgctgaggacagcgcccacatccaggaccactacaccctgctggagcggcagatcatcatcgaggccaatgacagacacctggagagcgctggccagacagagatcttcaggaagcaccccaggaaggccagcatcctgaacatgcccctggtgaccaccctcttctacagctgcttctaccactacacagaagctgagggcaccttcagcagccctgtgaacctgaagaagaccttcaagatcccagacaagcagtatgtgctgacagccctggccgcccgggccaagctgcgggcctggaatgatgtggatgccctcttcaccaccaagaactggctgggctacaccaagaagagggcccccatcggcttccaccgggtggtggagatcctgcacaagaacaatgcccctgtgcagatcctgcaggagtatgtgaacctggtggaggatgtggacaccaagctgaacctggccaccaagttcaagtgccatgatgtggtgattgacacctacagagacctgaaggaccggcagcagctgctggcctaccgcagcaaggtggacaagggcagcgctgaggaggagaagattgatgccctgctgagcagcagccagatccgctggaagaactag

SEQ ID NO: 147607 - DNA, 1482 bp, synthetic construct; identical to SEQ ID NO: 147605
  misc_feature 1..1482: note = Description of Artificial Sequence: Synthetic coding sequence
  source 1..1482: mol_type = other DNA

SEQ ID NO: 147608 - DNA, 1560 bp, synthetic construct
  misc_feature 1..1560: note = Description of Artificial Sequence: Synthetic coding sequence
  source 1..1560: mol_type = other DNA
atgaccaccggcctcatcctcttcttccagagcggccggcccctgggcgccggcgtgcggctgggcctgggcctgaggatgaacagaaccaagggagatgaggaggagtactggaacagcagcaagttcaaggccttcacctttgatgatgaagatgatgagctgagccagctgaaggagagcaagagagctgtgaacagcctgcgggactttgtggatgatgatgatgatgatgacctggagcgggtgtcctggagcggggagcctgtgggcagcatctcctggagcatccgggagacagctggcaacagcggcagcacccatgagggccgggagcagctgaagagcagaaattccttcagcagctatgcccagctgcccaagcccaccagcacctacagcctgagcagcttcttccggggccgcaccaggcctggcagcttccagagcctgagtgatgccctgagtgacaccccagccaagagctatgcccctgagctgggccggcccaagggggagtacagagactacagcaatgactggagccccagcgacacagtgcggcggctgaggaagggcaaggtgtgcagcctggagcgcttccgcagcctgcaggacaagctgcagctgctggaggaggccgtgtccatgcatgatggaaatgtcatcacagctgtgctgatcttcctgaagaggaccctgagcaaggagatcctcttccgggagctggaggtgcggcaggtggccctgcggcacctgatccacttcctgaaggagatcggggaccagaagctgctgctggacctcttccgcttcctggacagaacagaggagctggccctgagccactaccgggagcacctgaacatccaggaccctgacaagaggaaggagttcctgaagacctgtgtgggcctgcccttcagcgcagaagattctgcccacatccaggaccactacaccctgctggagcggcagatcatcatcgaggccaatgacagacacctggagagcgctggccagacagagatcttcaggaagcaccccaggaaggccagcatcctgaacatgcccctggtgaccaccctcttctacagctgcttctaccactacacagaggccgagggcaccttcagcagccctgtgaacctgaagaagaccttcaagatcccagacaagcagtatgtgctgacagccctggccgcccgggccaagctgcgggcctggaatgatgtggatgccctcttcaccaccaagaactggctgggctacaccaagaagagggcccccatcggcttccaccgggtggtggagatcctgcacaagaacaatgcccctgtgcagatcctgcaggagtatgtgaacctggtggaggatgtggacaccaagctgaacctggccaccaagttcaagtgccatgatgtggtgattgacacctacagagacctgaaggaccggcagcagctgctggcctaccgcagcaaggtggacaagggcagcgctgaggaggagaagattgatgccctgctgagcagcagccagatccgctggaagaactag

SEQ ID NO: 147609 - DNA, 138 bp, synthetic construct
  misc_feature 1..138: note = Description of Artificial Sequence: Synthetic coding sequence
  source 1..138: mol_type = other DNA
atgaacagaaccaagggagatgaggaggagtactggaacagcagcaagttcaaggccttcacctttgatgatgaagatgatgagctgagccagctgaaggagagcaagagagctgtgaacagcctgcgggacttctag

SEQ ID NO: 147610 - DNA, 1482 bp, synthetic construct; identical to SEQ ID NO: 147605
  misc_feature 1..1482: note = Description of Artificial Sequence: Synthetic coding sequence
  source 1..1482: mol_type = other DNA

SEQ ID NO: 147611 - DNA, 735 bp, synthetic construct
  misc_feature 1..735: note = Description of Artificial Sequence: Synthetic coding sequence
  source 1..735: mol_type = other DNA
atgttccggaggaagctgacagccctggactaccacaacccagctggcttcaactgcaaggatgaaacagagttcaggaacttcatcgtgtggctggaggaccagaagatccgccactacaagattgaagatcggggcaacctgaggaacatccacagcagtgactggcccaagttctttgagaagtacctgagagatgtgaactgccccttcaagatccaggaccggcaggaggccatcgactggctgctgggcctggccgtgcggctggagtatggagacaatgctgagaagtacaaggacctggtgcctgacaacagcaagacagctgacaatgccaccaagaatgctgagcccctcatcaacctggatgtgaacaacccagacttcaaggccggcgtgatggccctggccaacctgctgcagatccagagacatgatgactacctggtgatgctgaaggccatccgcatcctggtgcaggagcggctgacccaggatgctgtggccaaggccaaccagaccaaggagggcctgcctgtggccctggacaagcacatcctgggctttgacacaggagatgctgtgctgaatgaggccgcccagatcctgcggctgctgcacatcgaggagctgcgggagctgcagaccaagatcaatgaggccatcgtggccgtgcaggccatcatcgctgaccccaagacagaccaccggctgggcaaggtgggccgctag

SEQ ID NO: 147612 - DNA, 177 bp, synthetic construct
  misc_feature 1..177: note = Description of Artificial Sequence: Synthetic coding sequence
  source 1..177: mol_type = other DNA
atgctgcagagcatcatcaagaacatctggatccccatgaagccctactacaccaaggtgtaccaggagatctggattggcatgggcctgatgggcttcatcgtgtacaagatccgggctgctgacaagaggagcaaggccctgaaggccagcgccccagcccctggccaccactag

SEQ ID NO: 147613 - DNA, 228 bp, synthetic construct
  misc_feature 1..228: note = Description of Artificial Sequence: Synthetic coding sequence
  source 1..228: mol_type = other DNA
atgaagctgtatggcacccggggcagtgacatcagccacttccagtgccagatgctgcagagcatcatcaagaacatctggatccccatgaagccctactacaccaaggtgtaccaggagatctggattggcatgggcctgatgggcttcatcgtgtacaagatccgggctgctgacaagaggagcaaggccctgaaggccagcgccccagcccctggccaccactag

SEQ ID NO: 147614 - DNA, 177 bp, synthetic construct; identical to SEQ ID NO: 147612
  misc_feature 1..177: note = Description of Artificial Sequence: Synthetic coding sequence
  source 1..177: mol_type = other DNA

SEQ ID NO: 147615 - DNA, 177 bp, synthetic construct; identical to SEQ ID NO: 147612
  misc_feature 1..177: note = Description of Artificial Sequence: Synthetic coding sequence
  source 1..177: mol_type = other DNA

SEQ ID NO: 147616 - DNA, 2928 bp, synthetic construct
  misc_feature 1..2928: note = Description of Artificial Sequence: Synthetic coding sequence
  source 1..2928: mol_type = other DNA
atgacccagcagccccaggatgactttgacagatctgtggaggatgcccaggcctggatgaaggctgtgcaggaccagctgcaggtgaatgacaacacccagggcccccgggccgccctggaggcccggctgtgggagacagagaagatctgccagctggagcctgagggccgggtgcgggtggacctggtgctgaggatggccgaggccctgctggcctgctgccctggggaccagaagccaggcatcctggcccggctgaaggacatcaaggcccagtgggaggagaccgtgacctacatgacccactgccacagccgcatcgagtgggtgtggctgcactggagcgagtacctgctggccagagatgagttctaccgctggttccagaagatgatggtgaccctggagccccacatcgagctgcagctgggcctgaaggagaagcagtggcagctgagccacgcccaggtgctgctgcacaacgtggacaaccaggccgtgctgctggaccggctgctggaggaggccgccagcctcttcaaccgcatcggggaccccagcgtggatgaagatgcccagaagaggatgaaggccgagtatgatgctgtgaaggccaaggcccagaagagggtggacctgctggagcaggtggcccgggagcacgaggagtaccaggccggcgtggatgagttccagctgtggctgaaggctgtggtggagaaggtgaatggctgcctgggcaggaactgcaagctgcccatcacccagaggctgagcaccctgcaggacatcgccaaggacttccccagaggagaggagagcctggagaccctggaggagcagagcgctggggtcatccggaacaccagccccctgggcgctgagaagatcactggagagctggaggagatgaggaaggtgctggagaagctgcgggccctgtgggaggaggaggaggagcggctgcggggcctgctgcggagcagaggagcctgggagcagcagatcaagcagctggaggccgagctgtctgagttcaggatggtgctgcagaggctggcccaggagggcctgcagcctgctgccaaggccggcacagaagatgagctggtggcccactggaggcgctacagcgccaccagggctgccctggccagcgaggagccccgggtggaccggctgcaggcccagctgaaggagctgattgtgttcccccacaacctgaagcccctgagtgacagcgtgattgccaccatccaggagtaccagagcctgaaggtgaagagcgcccggctgagaaatgctgctgctgtggagctgtggcagcacttccagaggcccctgcaggacctgcagctgtggaaggccctggcccagaggctgctggaggtgacagccagcctgcctgacctgcccagcctgcacaccttcctgccccagatcgaggccgccctgatggagagcagccggctgaaggagctgctgaccatgctgcagctgaagaaggacctgctgattggcatcttcggccaggagcgggccacagccctgctggagcaggtggccggctccatgagggaccgggacctgctgcacaacagcctgctgcagaggaagagcaagctgcagagcctgctggcccagcacaaggactttggagctgcctttgagcccctgcagaggaagctgctggacctgcaggtgcgggtgcaggccgagaagggcctgcagagggacctgcccgggaagcaggcccagctgagccggctgcagggcctgcaggaggagggcctggacctgggcgcccagatggaggccgcccggcccctggtgcaggagaaccccaaccaccagcacaagatggaccagctgagcagtgacttccaggccctgcagaggagcctggaggacctggtggaccgctgccggcagagcgtgcaggagcactgcaccttcagccaccagctgctggagctgcggcagtggatcgtggtgaccacccagaagctggaggcccacagaggagaggccggccctggagatgctgagagccaggaggccgagtttgagcggctggtggccgagttccctgagaaggaggcccagctgagcctggtggaggcccagggctggctggtgatggagaagagcagccctgagggcgctgctgtggtgcaggaggagctgcgggagctggccgagagctggagggccctgcggctgctggaggagagcctgctgagcctcatccggaactggcacctgcagaggatggaggtggacagcggcaagaagatggtgttcaccaacaacatccccaagagcggcttcctgatcaaccccatggaccccatccccaggcacagaagaagagccaacctgctgcaggaggaggagggcagccatgaggacttcagccagctgctgaggaactttggccagtggctgcaggtggagaacagcaagctggtgcgcatcatcgccatgaggaccagcacagctgaggacctgcggaccaggaagagcaagctgcaggagctggaggcccgggtgcctgagggccagcacctgtttgagaacctgctgcggctgggccctgcccggggcaccagtgatgagctggaggacctgcgctaccagtggatgctgtacaagagcaagctgaaggacagcggccacctgctgacccagagcagccctggagagcccaccggcttccagaagacccggcgctggaggggcctgggcagcctcttcagaagagcctgctgcgtggccctgcccctgcagctgctgctgctgctcttcctgctgctgctcttcctgctgcccatccgggaggaggacaggagctgcaccctggccaacaactttgcccggagcttcaccctgatgctgcgctacaacggccccccacccacctag

SEQ ID NO: 147617 - DNA, 1791 bp, synthetic construct
  misc_feature 1..1791: note = Description of Artificial Sequence: Synthetic coding sequence
  source 1..1791: mol_type = other DNA
atgacccagcagccccaggatgactttgacagatctgtggaggatgcccaggcctggatgaaggctgtgcaggaccagctgcaggtgaatgacaacacccagggcccccgggccgccctggaggcccggctgtgggagacagagaagatctgccagctggagcctgagggccgggtgcgggtggacctggtgctgaggatggccgaggccctgctggcctgctgccctggggaccagaagccaggcatcctggcccggctgaaggacatcaaggcccagtgggaggagaccgtgacctacatgacccactgccacagccgcatcgagtgggtgtggctgcactggagcgagtacctgctggccagagatgagttctaccgctggttccagaagatgatggtgaccctggagccccacatcgagctgcagctgggcctgaaggagaagcagtggcagctgagccacgcccaggtgctgctgcacaacgtggacaaccaggccgtgctgctggaccggctgctggaggaggccgccagcctcttcaaccgcatcggggaccccagcgtggatgaagatgcccagaagaggatgaaggccgagtatgatgctgtgaaggccaaggcccagaagagggtggacctgctggagcaggtggcccgggagcacgaggagtaccaggccggcgtggatgagttccagctgtggctgaaggctgtggtggagaaggtgaatggctgcctgggcaggaactgcaagctgcccatcacccagaggctgagcaccctgcaggacatcgccaaggacttccccagaggagaggagagcctggagaccctggaggagcagagcgctggggtcatccggaacaccagccccctgggcgctgagaagatcactggagagctggaggagatgaggaaggtgctggagaagctgcgggccctgtgggaggaggaggaggagcggctgcggggcctgctgcggagcagaggagcctgggagcagcagatcaagcagctggaggccgagctgtctgagttcaggatggtgctgcagaggctggcccaggagggcctgcagcctgctgccaaggccggcacagaagatgagctggtggcccactggaggcgctacagcgccaccagggctgccctggccagcgaggagccccgggtggaccggctgcaggcccagctgaaggagctgattgtgttcccccacaacctgaagcccctgagtgacagcgtgattgccaccatccaggagtaccagagcctgaaggtgaagagcgcccggctgagaaatgctgctgctgtggagctgtggcagcacttccagaggcccctgcaggacctgcagctgtggaaggccctggcccagaggctgctggaggtgacagccagcctgcctgacctgcccagcctgcacaccttcctgccccagatcgaggccgccctgatggagagcagccggctgaaggagctgctgaccatgctgcagctgaagaaggacctgctgattggcatcttcggccaggagcgggccacagccctgctggagcaggtggccggctccatgagggaccgggacctgctgcacaacagcctgctgcagaggaagagcaagctgcagagcctgctggcccagcacaaggactttggagctgcctttgagcccctgcagaggaagctgctggacctgcaggtgcgggtgcaggccgagaagggcctgcagagggacctgcccgggaagcaggcccagctgagccggctgcaggtgcggggcctgtag

SEQ ID NO: 147618 - DNA, 2913 bp, synthetic construct
  misc_feature 1..2913: note = Description of Artificial Sequence: Synthetic coding sequence
  source 1..2913: mol_type = other DNA
atgacccagcagccccaggatgactttgacagatctgtggaggatgcccaggcctggatgaaggctgtgcaggaccagctgcaggtgaatgacaacacccagggcccccgggccgccctggaggcccggctgtgggagacagagaagatctgccagctggagcctgagggccgggtgcgggtggacctggtgctgaggatggccgaggccctgctggcctgctgccctggggaccagaagccaggcatcctggcccggctgaaggacatcaaggcccagtgggaggagaccgtgacctacatgacccactgccacagccgcatcgagtgggtgtggctgcactggagcgagtacctgctggccagagatgagttctaccgctggttccagaagatgatggtgaccctggagccccacatcgagctgcagctgggcctgaaggagaagcagtggcagctgagccacgcccaggtgctgctgcacaacgtggacaaccaggccgtgctgctggaccggctgctggaggaggccgccagcctcttcaaccgcatcggggaccccagcgtggatgaagatgcccagaagaggatgaaggccgagtatgatgctgtgaaggccaaggcccagaagagggtggacctgctggagcaggtggcccgggagcacgaggagtaccaggccggcgtggatgagttccagctgtggctgaaggctgtggtggagaaggtgaatggctgcctgggcaggaactgcaagctgcccatcacccagaggctgagcaccctgcaggacatcgccaaggacttccccagaggagaggagagcctggagaccctggaggagcagagcgctggggtcatccggaacaccagccccctgggcgctgagaagatcactggagagctggaggagatgaggaaggtgctggagaagctgcgggccctgtgggaggaggaggaggagcggctgcggggcctgctgcggagcagaggagcctgggagcagcagatcaagcagctggaggccgagctgtctgagttcaggatggtgctgcagaggctggcccaggagggcctgcagcctgctgccaaggccggcacagaagatgagctggtggcccactggaggcgctacagcgccaccagggctgccctggccagcgaggagccccgggtggaccggctgcaggcccagctgaaggagctgattgtgttcccccacaacctgaagcccctgagtgacagcgtgattgccaccatccaggagtaccagagcctgaaggtgaagagcgcccggctgagaaatgctgctgctgtggagctgtggcagcacttccagaggcccctgcaggacctgcagctgtggaaggccctggcccagaggctgctggaggtgacagccagcctgcctgacctgcccagcctgcacaccttcctgccccagatcgaggccgccctgatggagagcagccggctgaaggagctgctgaccatgctgcagctgaagaaggacctgctgattggcatcttcggccaggagcgggccacagccctgctggagcaggtggccggctccatgagggaccgggacctgctgcacaacagcctgctgcagaggaagagcaagctgcagagcctgctggcccagcacaaggactttggagctgcctttgagcccctgcagaggaagctgctggacctgcaggtgcgggtgcaggccgagaagggcctgcagagggacctgcccgggaagcaggcccagctgagccggctgcagggcctgcaggaggagggcctggacctgggcgcccagatggaggccgcccggcccctggtgcaggagaaccccaaccaccagcacaagatggaccagctgagcagtgacttccaggccctgcagaggagcctggaggacctggtggaccgctgccggcagagcgtgcaggagcactgcaccttcagccaccagctgctggagctgcggcagtggatcgtggtgaccacccagaagctggaggcccacagaggagaggccggccctggagatgctgagagccaggaggccgagtttgagcggctggtggccgagttccctgagaaggaggcccagctgagcctggtggaggcccagggctggctggtgatggagaagagcagccctgagggcgctgctgtggtgcaggaggagctgcgggagctggccgagagctggagggccctgcggctgctggaggagagcctgctgagcctcatccggaactggcacctgcagaggatggaggtggacagcggcaagaagatggtgttcaccaacaacatccccaagagcggcttcctgatcaaccccatggaccccatccccaggcacagaagaagagaggaggagggcagccatgaggacttcagccagctgctgaggaactttggccagtggctgcaggtggagaacagcaagctggtgcgcatcatcgccatgaggaccagcacagctgaggacctgcggaccaggaagagcaagctgcaggagctggaggcccgggtgcctgagggccagcacctgtttgagaacctgctgcggctgggccctgcccggggcaccagtgatgagctggaggacctgcgctaccagtggatgctgtacaagagcaagctgaaggacagcggccacctgctgacccagagcagccctggagagcccaccggcttccagaagacccggcgctggaggggcctgggcagcctcttccggcgggcctgctgcgtggccctgcccctgcagctgctgctgctgctcttcctgctgctgctcttcctgctgcccatccgggaggaggacaggagctgcaccctggccaacaactttgcccgctccttcaccctgatgctgcgctacaatggacctccacccacctag

SEQ ID NO: 147619 - DNA, 3471 bp, synthetic construct
  misc_feature 1..3471: note = Description of Artificial Sequence: Synthetic coding sequence
  source 1..3471: mol_type = other DNA
atgggcaacctgctgagcaagttccggcccggctgcagaagaagacccctgcccggccctggccgcggggccccagcccccctgagcagagatgccagccccccaggccgggcccacagcgtgcccaccccccggcccttccggggcctcttcagaagaaatgccaggagaagacccagcgctgccagcatctttgtggcccccaagaggccctgccccctgcccagggctgctgctgcccccctgggcgtgctgcctgctgtgggctggggcctggccatcaggaagacccccatgctgcctgccagaaatccaccccgcttcggccaccccagctctgtgcgcatccccccacccagcaggatgttcaccctgctgctgcccagcccccgggagcctgctgtgaaggccaggaagcccatcccagccaccctgctggaggagacagaggtgtgggcccaggagggcccccggcgggtgaagaaggatgaggaccctgtgcagattgaaggagaagatgatgagaagaggacccccctgagcagcggggaggccagcagcaccagccgcagccagggcacccagggagatgtggccagcttccgctgcagccctggccccctggagggcaatgtgtaccacaagttcagcgagaacagcatgtctgagaaggcccaggccagccctgccagcagctgcctggagggccctgccatgcccagcacccacagccaggccggctgtgcccggcacctgggcaagccagaccctgatgccacagcccctcctgagcctgctgtgggctgcagcctgctgcagcagaagctggccgctgaggtgctgaatgaggagcccccacccagcagcctgggcctgcccatccccctgatgtctgggaagaggatgccagatgagaagcccttctgcatccccccaagatctgctgccccaccccgggccgccaggaaccggccctgcaagaggaagatgagcatccccctgctgctgcccctgccccccagcctgcccctgctgtgggacagaggagagctgcccccaccagccaagctgccctgcctgtctgtggagggggacctgcacaccctggagaagagccctgagtacaagaggaacagccgcatcctggaggacaagacagagaccatgaccaacagcagcatcacccagcctgcccccagcttcagccagcctgtgcagaccacagacagcctgcccctgaccacctacaccagccaggtgtctgcccccctgcccatcccagacctggccgacctggccaccggccccctcatcctgcccatcccccccctgagcaccacccccaagatggatgagaagatcgccttcaccatccccaacagccccctggccctgcctgctgacctggtgcccatcctgggggaccagagcaatgagaagggcggcagctacaacagcgtggtgggcgccgcccccctgaccagtgacccccccaccccacccagcagcacccccagcttcaagccccctgtgacccgggagagccccatctccatgtgtgtggacagccccccacccctgtccttcctgaccctgctgcctgtgcccagcacaggcaccagcgtcatcaccagcaagcccatgaacagcaccagcgtcatcagcacagtgaccaccaatgccagcgcccacctgaccagccagacagctgtggaccctgaggtggtgaacatggacaccacagcccccagccaggtggtgatcttcaccagcagcctgagcagccgggtgagcagcctgcccaacagccagatccactgcagcgctgagcagaggcaccctgggaagacctctgtgtacaccagccccctgcccttcatcttccacaacaccacccccagcttcaaccagctgtttgggaaggaggccaccccccagcccaagtttgaggccccagatggccagccccagaaggccagcctgcccagcgcctgtgtgttcctgagcctgcccatcatccccccaccagacaccagcaccctggtgaacagcgccagcacagccagcagcagcaagccacccatcgagaccaatgccatgcacaccaccccacccagcaaggccgtcatcctgcagagcgcctctgtgtccaagaagtacctgcccttctacctgggcctgcccggcagcggcaacacccagcccagcggcaacacagcctctgtgcagggcagcaccagcctgcctgcccagagcgtgcgggccccagccacagccagcaaccaccccctgaaccctggggccaccccccagcccaagtttggagccccagatggcccccagcagaagaccagcctgcccagcgcccatgacttcctgagcctgcccatcatggtgcccccagacaccagcaccctggtgtcctctgccagcgctgccagcctgagcaagccagccatcgacaccagtgacatgaacaccaccccacccagcaagacagtcatcctgcagagcacctttgtgtccaggaaggaggagtacatccgcttctacatgggcctgcccggcagcggcaacaccctgcacagcgacagcatcgccagcgcccaggtgtccaccagcttccctgcccaggccgacagaagacccaccaccaccagcagccaccccctgaacacaggcagcatcagccacagcaccctgggcgccacagatggccagcagaagagtgacagcagcttcatcctgggcaacccagccaccccagcccctgtgattggcctgaccagccccagcgtgcagcccctgagcggcagcatcatccccccaggctttgctgagctgaccagcccctacacagccctgggcacccctgtgaatgctgagcctgtggagggccacaatgccagcgccttccccaacggcacagccaagaccagcggcttccgcatcgccaccggcatgcctggcactggagacagcaccctgctggtgggcaacaccatccctggcccccaggtgatcatgggccctggcacccccatggatggcggcagcatcggcttctccatgtctgcccctggccccagcagcaccagcggggagctgaacatcggccagggccagagcggcacccccagcaccaccagcgtcttccccttcggccaggccgcctgggaccccaccggccacagcatggccgccgccccccagggcgccagcaacatccctgtgtttggctacaccagcgctgctgcctacatccctggcctggacccccccacccagaacagctgcagcggcatgggaggagatggcaccaggagcatcgtgggcggcccctgtgtgcctgccttccagcagtgcatcctgcagcacacctggacagagaggaagttctacaccagcagcacccactactacggccaggagacctacgtgcggcggcacgtgtgcttccagctgccctag

SEQ ID NO: 147620 - DNA, 5733 bp, synthetic construct
  misc_feature 1..5733: note = Description of Artificial Sequence: Synthetic coding sequence
  source 1..5733: mol_type = other DNA
atggcctgctgccacaaggtgatgctgctgctggacacagctgggggcgccgcccggcacagccgggtgcggcgggccgccctgcggctgctgacctacctgagctgccgcttcggcctggcccgggtgcactgggccttcaagttctttgacagccagggcgcccggagccggcccagccgggtgtctgacttccgggagctgggcagccgctcctgggaggactttgaggaggagctggaggcccggctggaggaccgggcccacctgcccggccctgccccccgggccacccacacccatggagccctgatggagaccctgctggactaccagtgggacaggcctgagatcaccagccccaccaagcccatcctgcggagcagtggaagaaggctgctggatgtggagagcgaggccaaggaggccgaggccgccctgggcggcctggtgaatgctgtgttcctgctggccccctgcccccacagccagcgggagctgctgcagtttgtgtctggctgtgaggcccaggcccagaggctgccccccacccccaagcaggtgatggagaagctgctgcccaagagggtgcgggaggtgatggtggccaggaagatcaccttctactgggtggacaccacagagtggagcaagctgtgggagagcccagaccacctgggctactggacagtgtgtgagctgctgcaccacggcggcggcaccgtgctgcccagcgagagcttctcctgggactttgcccaggccggggagatgctgctgcggagcggcatcaagctgagcagcgagccccacctgagcccctggatctccatgctgcccacagatgccaccctgaaccggctgctgtacaacagcccagaatatgaggccagcttccccaggatggagggcatgctgttcctgcctgtggaggccggcaaggagatccaggagacctggacagtgaccctggagcccctggccatgcaccagaggcacttccagaagcctgtgcgcatcttcctgaagggctctgtggcccagtggagcctgcccaccagcagcaccctgggcacagacagctggatgctgggcagccctgaggagagcacagccacccagaggctgctcttccagcagctggtgtcccggctgacagctgaggagctgcacctggtggctgatgtggaccccggggagggccggccccccatcaccggggtcatcagccccctgagcgccagcgccatgatcctgactgtgtgcaggaccaaggaggccgagttccagagacatgtgctgcagacagctgtggccgacagcccccgggacacagccagcctcttcagtgatgtggtggacagcatcctgaaccagacccatgacagcctggccgacacagccagcgctgccagccctgtgcctgagtgggcccagcaggagctgggccacaccaccccctggagccctgctgtggtggagaagtggttccccttctgcaacatcagcggggccagcagtgacctgatggagagctttggcctgctgcaggccgccagcgccaacaaggaggagagcagcaagacagaaggagagctgatccactgcctggccgagctgtaccagaggaagagccgggaggagagcaccatcgcccaccaggaggacagcaagaagaagaggggcgtgcccaggacccctgtgcggcagaagatgaacaccatgtgccgcagcctgaagatgctgaatgtggcccggctgaatgtgaaggcccagaagctgcacccagatggcagcccagatgtggccggggagaagggcatccagaagatccccagcggccgcacagtggacaagctggaggaccggggccgcaccctgcggagcagcaagcccaaggacttcaagacagaggaggagctgctgagctacatccgggagaactaccagaagacagtggccactggagagatcatgctgtatgcctgtgccaggaacatgatcagcacagtgaagatgttcctgaagagcaagggcaccaaggagctggaggtgaactgcctgaaccaggtgaagagcagcctgctgaagaccagcaagagcctgcggcagaacctgggcaagaagctggacaaggaggacaaggtgcgggagtgccagctgcaggtgttcctgcggctggagatgtgcctgcagtgccccagcatcaatgaaagcacagatgacatggagcaggtggtggaggaggtgacagacctgctgaggatggtgtgcctgacagaagattctgcctacctggccgagttcctggaggagatcctgcggctgtacatcgacagcatccccaagaccctgggcaacctgtacaacagcctgggcttcgtcatcccccagaagctggccggcgtgctgcccacagacttcttcagtgatgacagcatgacccaggagaacaagagccccctgctgtctgtgcccttcctgagcagcgcccggcgctctgtgtctggcagccctgagagtgatgagctgcaggagctgcggaccaggtctgccaagaagaggaggaagaatgccctgatccgccacaagagcattgctgaggtgtcccagaacctgcggcagatcgagatccccaaggtgtccaagagggccaccaagaaggagaacagccacccagccccccagcagcccagccagcctgtgaaggacacagtgcaggaggtgaccaaggtgagaagaaacctcttcaaccaggagctgctgagccccagcaagaggagcctgaagaggggcctgcccaggagccacagcgtgtctgctgtggatggcctggaggacaagctggacaacttcaagaagaacaagggctaccacaagctgctgaccaagtctgtggccgagacccctgtgcacaagcagatcagcaagaggctgctgcaccggcagatcaagggccgcagcagtgaccccggccctgacattggagtggtggaggagagccctgagaagggagatgagatcagcctgcggcgcagcccccgcatcaagcagctgtccttcagcaggacccacagcgccagcttctacagcgtgtcccagcccaagagccgctctgtgcagagggtgcacagcttccagcaggacaagagtgaccagcgggagaacagccctgtgcagagcatccgcagccccaagagcctgctgtttggagccatgtctgagatgatcagccccagcgagaagggcagcgccaggatgaagaagaggagcaggaacaccctggacagcgaggtgcctgctgcctaccagacccccaagaagagccaccagaagagcctgtccttcagcaagaccaccccccggcgcatcagccacaccccccagacccccctgtacaccccagagcggctgcagaagagccctgccaagatgacccccaccaagcaggccgccttcaaggagagcctgaaggacagcagcagccctggccatgacagccccctggacagcaagatcaccccccagaagaggcacacccaggccggggagggcaccagcctggagaccaagacccccaggacccccaagaggcagggcacccagcccccaggcttcctgcccaactgcacctggccccacagcgtgaacagcagccctgagagccccagctgcccagccccacccaccagcagcacagcccagcccaggagagaatgtctgacccccatccgggaccccctgcggaccccacccagggctgctgccttcatgggcaccccccagaaccagacccaccagcagccccacgtgctgcgggccgcccgggcagaggagcccgcccagaagctgaaggacaaggccatcaagacccccaagaggcctggcaacagcacagtgaccagcagcccccctgtgacccccaagaagctgttcaccagccccctgtgtgatgtgtccaagaagagccccttcaggaagagcaagattgaatgtcccagccctggagagctggaccagaaggagccccagatgagccccagcgtggccgccagcctgagctgccctgtgcccagcaccccacctgagctgagccagagggccaccctggacacagtgcccccacctccacccagcaaggtgggcaagcgctgcaggaagaccagtgacccccggcgcagcatcgtggagtgccagccagatgccagcgccaccccaggagtgggcacagctgacagccctgctgcccccacagacagcagagatgaccagaagggcctgagcctgagcccccagagccccccagagcggcggggctacccaggccctggcctgcggagtgactggcacgccagcagccccctgctgatcaccagtgacacagaacatgtgaccctgctgtctgaggccgagcaccacggcattggagacctgaagagcaatgtgctgtctgtggaggagggggagggcctgaggacagcagatgctgagaagagcagcctgagccaccctggcatcccccccagcccccccagctgtggccctggcagccccctgatgcccagcagagatgtgcactgcaccacagatggccggcagtgccaggccagcgcccagctggacaacctgcctgccagcgcctggcacagcacagattctgccagcccccagacctatgaggtggagctggagatgcaggccagcggcctgcccaagctgcgcatcaagaagattgaccccagcagcagcctggaggccgagcccctgagcaaggaggagagcagcctgggggaggagagcttcctgcctgccctgtccatgccccgggccagccgcagcctgagcaagccagagcccacctacgtgagccccccctgcccccggctgagccacagcacccctgggaagagccggggccagacctacatctgccaggcctgcacccccacccacggccccagcagcacccccagccccttccagacagatggagtgccctggacccccagccccaagcacagcggcaagaccaccccagacatcatcaaggactggcccaggaggaagagagctgtgggctgtggggccggcagcagcagcggccgcggggaggtgggcgctgacctgcccggcagcctgagcctgctggagagcgagggcaaggaccacggcctggagctgagcatccacaggacccccatcctggaggactttgagctggagggcgtgtgccagctgcctgaccagagccccccaagaaattccatgcccaaggccgaggaggccagctcctggggccagtttggcctgagcagcaggaagagggtgctgctggccaaggaggaggccgacagaggagccaagaggatctgtgacctgagagaagattctgaggtgtccaagagcaaggagggcagccccagctggagcgcctggcagctgcccagcactggagatgaggaggtgtttgtgtctggcagcaccccaccacccagctgtgctgtgcgcagctgcctgagcgccagcgccctgcaggccctgacccagagccccctgctcttccagggcaagacccccagcagccagagcaaggaccccagagatgaagatgtggatgtgctgcccagcacagtggaggacagccccttcagccgggccttcagcagaagaagacccatcagcaggacctacaccaggaagaagctgatgggcacctggctggaggacctgtag

SEQ ID NO: 147621 - DNA, 354 bp, synthetic construct
  misc_feature 1..354: note = Description of Artificial Sequence: Synthetic coding sequence
  source 1..354: mol_type = other DNA
atgaagctgagcagcgctgctggccaggagagccctggccacccccaccccagccccccagcctggaccctgaagaagcccagcgagagcgtggcccagagggccatgtgcagcgcccgggcctgccctgtggcctgccctgtgggctgccccatcgcctgccctgtgtcctgccctgtggcctgccctgtgggctgccctgtgggctccatggccacagccccccagggcctgagcccccaggagtgggaggccgaccgggagaccggcagcagcagccatgctggcaccacccagtgcagcatccacagccccagcagcagcagccgccacctgagcaggacccagacctag

SEQ ID NO: 147622 - DNA, 627 bp, synthetic construct; identical to SEQ ID NO: 146959
  misc_feature 1..627: note = Description of Artificial Sequence: Synthetic coding sequence
  source 1..627: mol_type = other DNA

SEQ ID NO: 147623 - DNA, 765 bp, synthetic construct
  misc_feature 1..765: note = Description of Artificial Sequence: Synthetic coding sequence
  source 1..765: mol_type = other DNA
atgagcctggcccggggccatggagacacagctgccagcacagctgcccccctgtctgaggagggggaggtgaccagcggcctgcaggccctggccgtggaggacaccggcggccccagcgccagcgctgggaaggcagaagatgaaggagagggcggccgggaggagacagagcgggagggcagcggcggggaggaggcccagggcgaggtgcccagcgctggaggagaggagcctgctgaggaggacagcgaggactggtgtgtgccctgcagtgatgaggaggtggagctgcctgcagatggccagccctggatgcccccacccagcgagatccagaggctgtatgagctgctggccgcccacggcaccctggagctgcaggccgagatcctgccccggcggccccccaccccagaggcccagagcgaggaggagaggagtgatgaggagcctgaggccaaggaggaggaggaggagaagccccacatgcccacagaatttgattttgatgatgagcctgtgacccccaaggacagcctgattgacagaagaaggaccccaggcagcagcgcccggagccagaagcgggaggcccggctggacaaggtgctgagtgacatgaagaggcacaagaagctggaggagcagatcctgaggacaggccgggacctcttcagcctggacagcgaggaccccagccctgccagcccccccctgcggagcagcggcagcagcctcttcccccggcagaggaagtactag

SEQ ID NO: 147624 - DNA, 2010 bp, synthetic construct
  misc_feature 1..2010: note = Description of Artificial Sequence: Synthetic coding sequence
  source 1..2010: mol_type = other DNA
atgggcagtgaccccagcgcccctggccggcccggctggacaggcagcctgctgggggaccgggaggaggccgcccggccccggctgctgcccctgctgctggtgctgctgggctgcctgggcctgggcgtggccgcagaagatgctgaggtgcatgctgagaactggctgcggctgtatggctacctgccccagcccagccgccacatgagcaccatgaggtctgcccagatcctggccagcgccctggccgagatgcagcgcttctacggcatccctgtgactggagtgctggatgaggagaccaaggagtggatgaagaggccccgctgtggggtgcctgaccagtttggagtgcgggtgaaggccaacctgcggcggcggaggaagagatatgccctgactggaaggaagtggaacaaccaccacctgaccttcagcatccagaactacacagagaagctgggctggtaccacagcatggaggccgtgagaagagccttccgggtgtgggagcaggccacccccctggtgttccaggaggtgccctatgaggacatccggctgcggcggcagaaggaggccgacatcatggtgctgtttgccagcggcttccacggggacagcagcccctttgatggcactggaggcttcctggcccacgcctacttccctggccctggcctgggcggggacacccactttgatgctgatgagccctggaccttcagcagcacagacctgcacggcaacaacctcttcctggtggccgtgcatgagctgggccacgccctgggcctggagcacagcagcaaccccaatgccatcatggcccccttctaccagtggaaggatgtggacaacttcaagctgcctgaagatgacctgcggggcatccagcagctgtatggcaccccagatggccagccccagcccacccagcccctgcccaccgtgaccccccggcggcccggccgcccagaccacaggcctccccggcccccccagcccccacctcctgggggcaagccagagaggcctcccaagccaggcccccctgtgcagccccgggccacagagaggccagaccagtatggccccaacatctgtgatggagactttgacacagtggccatgctgcggggggagatgtttgtgttcaagggccgctggttctggagggtgcgccacaacagagtgctggacaactaccccatgcccatcggccacttctggaggggcctgcccggggacatctctgctgcctatgagcggcaggacggccgctttgtgttcttcaagggggaccgctactggctgttccgggaggccaacctggagcccggctacccccagcccctgaccagctatggcctgggcatcccctatgacagaattgacacagccatctggtgggagcccaccggccacaccttcttcttccaggaggaccgctactggaggttcaatgaggagacccagagaggagaccccggctaccccaagcccatctctgtgtggcagggcatcccagccagccccaagggggccttcctgagcaatgatgctgcctacacctacttctacaagggcaccaagtactggaagtttgacaatgaaaggctgaggatggagcccggctaccccaagagcatcctgcgggacttcatgggctgccaggagcacgtggagcccggcccccgctggccagatgtggcccggccccccttcaacccccacggcggcgctgagcctggagctgacagcgcagaaggagatgtgggagatggagatggagactttggagctggggtgaacaaggatggcggcagccgggtggtggtgcagatggaggaggtggccaggacagtgaatgtggtgatggtgctggtgcccctgctgctgctgctgtgtgtgctgggcctgacctacgccctggtgcagatgcagaggaagggggccccccgggtgctgctgtactgcaagaggagcctgcaggagtgggtgtag

SEQ ID NO: 147625 - DNA, 561 bp, synthetic construct
  misc_feature 1..561: note = Description of Artificial Sequence: Synthetic coding sequence
  source 1..561: mol_type = other DNA
atgtctgctgcccccctggtgggctacagcagcagcggctctgaagatgaaagtgaagatggcatgaggaccaggcctggagatggcagccaccggcggggccagagccccctgccccggcagcgcttccctgtgcctgacagcgtgctgaacatgtttcctggaacagaggagggcccagaagatgacagcaccaagcatggaggccgggtgaggaccttcccccatgagcggggcaactgggccacccacgtgtatgtgccctatgaggccaaggaggagttcctggacctgctggatgtgctgctgccccacgcccagacctacgtgccccggctggtgaggatgaaggtgttccacctgagcctgagccagagcgtggtgctgcggcaccactggatcctgccctttgtgcaggccctgaaggccaggatgaccagcttccacagcccccaccctggcccccactgcctgattggcaccaaggatgcccctgtgacccaggagatccccaaggacctgggcgccctgcggcaggagcccggcagccagaccaggtag

SEQ ID NO: 147626 - DNA, 744 bp, synthetic construct
  misc_feature 1..744: note = Description of Artificial Sequence: Synthetic coding sequence
  source 1..744: mol_type = other DNA
atgtctgctgcccccctggtgggctacagcagcagcggctctgaagatgaaagtgaagatggcatgaggaccaggcctggagatggcagccaccggcggggccagagccccctgccccggcagcgcttccctgtgcctgacagcgtgctgaacatgtttcctggaacagaggagggcccagaagatgacagcaccaagcatggaggccgggtgaggaccttcccccatgagcggggcaactgggccacccacgtgtatgtgccctatgaggccaaggaggagttcctggacctgctggatgtgctgctgccccacgcccagacctacgtgccccggctggtgaggatgaaggtgttccacctgagcctgagccagagcgtggtgctgcggcaccactggatcctgccctttgtgcaggccctgaaggccaggatgaccagcttccacaggaccttcatcggcctggaggtgaccagcggccacgcccagttcctggacctggtgtctgaggtggacagagtgatggaggagttcaacctgaccaccttctaccaggaccccagcttccacctgagcctggcctggtgtgtgggagatgcccggctgcagctggagggccagtgcctgcaggagctgcaggccatcgtggatggctttgaagatgctgaggtgctgctgcgggtgcacacagagcaggtgcgctgcaagagcggcaacaagttcttctccatgcccctgaagtag

SEQ ID NO: 147627 - DNA, 642 bp, synthetic construct
  misc_feature 1..642: note = Description of Artificial Sequence: Synthetic coding sequence
  source 1..642: mol_type = other DNA
atgagccccctgccccggcagcgcttccctgtgcctgacagcgtgctgaacatgtttcctggaacagaggagggcccagaagatgacagcaccaagcatggaggccgggtgaggaccttcccccatgagcggggcaactgggccacccacgtgtatgtgccctatgaggccaaggaggagttcctggacctgctggatgtgctgctgccccacgcccagagcgtggtgctgcggcaccactggatcctgccctttgtgcaggccctgaaggccaggatgaccagcttccaccgcttcttcttcaccgccaaccaggtgaagatctacaccaaccaggagaagaccaggaccttcatcggcctggaggtgaccagcggccacgcccagttcctggacctggtgtctgaggtggacagagtgatggaggagttcaacctgaccaccttctaccaggaccccagcttccacctgagcctggcctggtgtgtgggagatgcccggctgcagctggagggccagtgcctgcaggagctgcaggccatcgtggatggctttgaagatgctgaggtgctgctgcgggtgcacacagagcaggtgcgctgcaagagcggcaacaagttcttctccatgcccctgaagtag

SEQ ID NO: 147628 - DNA, 1683 bp, synthetic construct
  misc_feature 1..1683: note = Description of Artificial Sequence: Synthetic coding sequence
  source 1..1683: mol_type = other DNA
atgggcagcacagacagcaagctgaacttcaggaaggctgtgatccagctgaccaccaagacccagcctgtggaggccacagatgatgcctatgaccctgtgggctacggcatcccctacaaccacctgctcttcagtgactaccgggagcccctggtggaggaggccgcccaggtgctgattgtgaccctggaccatgacagcgccagcagcgccagccccaccgtggatggcaccaccactggaacagccatggatgatgctgaccccccaggccctgagaacctgtttgtgaactacctgagccgcatccaccgggaggaggacttccagttcatcctgaagggcatcgcccggctgctgagcaaccccctgctgcagacctacctgcccaacagcaccaagaagatccagttccaccaggagctgctggtgctcttctggaagctgtgtgacttcaacaagaagttcctgttctttgtgctgaagagcagtgatgtgctggacatcctggtgcccatcctcttcttcctgaatgatgcccgggctgaccagagccgggtgggcctgatgcacatcggggtcttcatcctgctgctgctgagcggggagaggaactttggagtgcggctgaacaagccctacagcatccgggtgcccatggacatccctgtgttcaccggcacccatgctgacctgctgattgtggtgttccacaagatcatcaccagcggccaccagaggctgcagcccctgtttgactgcctgctgaccatcgtggtgaatgtgagcccctacctgaagagcctgtccatggtgacagccaacaagctgctgcacctgctggaggccttcagcaccacctggttcctgttctctgctgcccagaaccaccacctggtgttcttcctgctggaggtgttcaacaacatcatccagtaccagtttgatggcaacagcaacctggtgtatgccatcatcaggaagaggagcatcttccaccagctggccaacctgcccacagatcctcccaccatccacaaggccctgcagaggagaagaaggaccccagagcccctgagcaggacaggcagccaggagggcacctccatggagggcagcaggcctgctgccccagctgagcccggcaccctgaagaccagcctggtggccaccccaggcatcgacaagctgacagagaagagccaggtgtctgaagatggcaccctgcggagcctggagcctgagccccagcagagcctggaggatggcagccctgccaagggggagcccagccaggcctggagggagcagaggcggcccagcaccagcagcgccagcggccagtggagccccaccccagagtgggtgctgtcctggaagagcaagctgcccctgcagaccatcatgaggctgctgcaggtgctggtgccccaggtggagaagatctgcatcgacaagggcctgacagatgaaagtgagatcctgcgcttcctgcagcacggcaccctggtgggcctgctgcctgtgccccaccccatcctgatcaggaagtaccaggccaacagcggcacagccatgtggttccgcacctacatgtggggcgtcatctacctgagaaatgtggacccccctgtgtggtatgacacagatgtgaagctgtttgagatccagagggtgtag

SEQ ID NO: 147629 - DNA, 2367 bp, synthetic construct
  misc_feature 1..2367: note = Description of Artificial Sequence: Synthetic coding sequence
  source 1..2367: mol_type = other DNA
atgggcagcacagacagcaagctgaacttcaggaaggctgtgatccagctgaccaccaagacccagcctgtggaggccacagatgatgccttctgggaccagttctgggccgacacagccacctctgtgcaggatgtgtttgccctggtgcctgctgctgagatccgggctgtgcgggaggagagccccagcaacctggccaccctgtgctacaaggctgtggagaagctggtgcagggcgctgagagcggctgccacagcgagaaggagaagcagatcgtgctgaactgcagccggctgctgaccagggtgctgccctacatctttgaggaccctgactggaggggcttcttctggagcacagtgcctggagctggccggggcggccagggcgaggaggatgatgaacatgcccggcccctggccgagagcctgctgctggccatcgctgacctgctcttctgcccagacttcaccgtgcagagccaccggcgcagcacagtggacagcgcagaagatgtgcacagcctggacagctgtgagtacatctgggaggccggcgtgggctttgcccacagcccccagcccaactacatccatgacatgaacaggatggagctgctgaagctgctgctgacctgcttcagcgaggccatgtacctgcccccagcccctgagagcggcagcaccaacccctgggtgcagttcttctgcagcacagaaaatagacatgccctgcccctcttcaccagcctgctgaacacagtgtgtgcctatgaccctgtgggctacggcatcccctacaaccacctgctcttcagtgactaccgggagcccctggtggaggaggccgcccaggtgctgattgtgaccctggaccatgacagcgccagcagcgccagccccaccgtggatggcaccaccactggaacagccatggatgatgctgaccccccaggccctgagaacctgtttgtgaactacctgagccgcatccaccgggaggaggacttccagttcatcctgaagggcatcgcccggctgctgagcaaccccctgctgcagacctacctgcccaacagcaccaagaagatccagttccaccaggagctgctggtgctcttctggaagctgtgtgacttcaacaagaagttcctgttctttgtgctgaagagcagtgatgtgctggacatcctggtgcccatcctcttcttcctgaatgatgcccgggctgaccagagccgggtgggcctgatgcacatcggggtcttcatcctgctgctgctgagcggggagaggaactttggagtgcggctgaacaagccctacagcatccgggtgcccatggacatccctgtgttcaccggcacccatgctgacctgctgattgtggtgttccacaagatcatcaccagcggccaccagaggctgcagcccctgtttgactgcctgctgaccatcgtggtgaatgtgagcccctacctgaagagcctgtccatggtgacagccaacaagctgctgcacctgctggaggccttcagcaccacctggttcctgttctctgctgcccagaaccaccacctggtgttcttcctgctggaggtgttcaacaacatcatccagtaccagtttgatggcaacagcaacctggtgtatgccatcatcaggaagaggagcatcttccaccagctggccaacctgcccacagatcctcccaccatccacaaggccctgcagaggagaagaaggaccccagagcccctgagcaggacaggcagccaggagggcacctccatggagggcagcaggcctgctgccccagctgagcccggcaccctgaagaccagcctggtggccaccccaggcatcgacaagctgacagagaagagccaggtgtctgaagatggcaccctgcggagcctggagcctgagccccagcagagcctggaggatggcagccctgccaagggggagcccagccaggcctggagggagcagaggcggcccagcaccagcagcgccagcggccagtggagccccaccccagagtgggtgctgtcctggaagagcaagctgcccctgcagaccatcatgaggctgctgcaggtgctggtgccccaggtggagaagatctgcatcgacaagggcctgacagatgaaagtgagatcctgcgcttcctgcagcacggcaccctggtgggcctgctgcctgtgccccaccccatcctgatcaggaagtaccaggccaacagcggcacagccatgtggttccgcacctacatgtggggcgtcatctacctgagaaatgtggacccccctgtgtggtatgacacagatgtgaagctgtttgagatccagagggtgtag

SEQ ID NO: 147630 - DNA, 810 bp, synthetic construct
  misc_feature 1..810: note = Description of Artificial Sequence: Synthetic coding sequence
  source 1..810: mol_type = other DNA
atgagcagtgaccacctgaacaacagcaccctgaaggaggcccagttcaaggacctcttcctgaagaaggccgagctggagtttgcccagatcatcatcatcgtggtggtggtgacagtgatggtggtggtgattgtgtgcctgctgaaccactacaaggtgtccaccaggagcttcatcaaccggcccaaccagagcagaagaagagaagatggcctgccccaggagggctgcctgtggcccagcgacagcgctgccccccggctgggcgccagcgagatcatgcacgcccccaggagccgggaccgcttcaccgcccccagcttcatccagagggaccgcttcagccgcttccagcccacctacccctacgtgcagcatgaaattgacctgccccccaccatcagcctgagtgatggagaggagcccccaccctaccagggcccctgcaccctgcagctgcgggaccctgagcagcagatggagctgaaccgggagagcgtgcgggccccacccaacagaaccatctttgacagcgacctgattgacatcgccatgtacagcggcggcccctgcccccccagcagcaacagcggcatcagcgccagcacctgcagcagcaatggccgcatggagggccccccacccacctacagcgaggtgatgggccaccaccctggggccagcttcctgcaccaccagaggagcaatgcccaccggggcagccggctgcagttccagcagaacaatgctgagagcaccatcgtgcccatcaagggcaaggacaggaagccaggcaacctggtgtag

SEQ ID NO: 147631 - DNA, 921 bp, synthetic construct
  misc_feature 1..921: note = Description of Artificial Sequence: Synthetic coding sequence
  source 1..921: mol_type = other DNA
atgcctgaggccggcttccaggccaccaatgccttcacagagtgcaagttcacctgcaccagcggcaagtgcctgtacctgggcagcctggtgtgcaaccagcagaatgactgtggggacaacagtgatgaggagaactgcctgctggtgacagagcaccccccacctggcatcttcaacagcgagctggagtttgcccagatcatcatcatcgtggtggtggtgacagtgatggtggtggtgattgtgtgcctgctgaaccactacaaggtgtccaccaggagcttcatcaaccggcccaaccagagcagaagaagagaagatggcctgccccaggagggctgcctgtggcccagcgacagcgctgccccccggctgggcgccagcgagatcatgcacgcccccaggagccgggaccgcttcaccgcccccagcttcatccagagggaccgcttcagccgcttccagcccacctacccctacgtgcagcacgagattgacctgccccccaccatcagcctgagtgatggagaggagcccccaccctaccagggcccctgcaccctgcagctgcgggaccctgagcagcagatggagctgaaccgggagagcgtgcgggccccacccaacagaaccatctttgacagcgacctgattgatattgccatgtacagcggcggcccctgcccccccagcagcaacagcggcatcagcgccagcacctgcagcagcaatggaaggatggagggccccccacccacctacagcgaggtgatgggccaccaccctggggccagcttcctgcaccaccagaggagcaatgcccaccggggcagccggctgcagttccagcagaacaatgctgagagcaccatcgtgcccatcaagggcaaggacaggaagccaggcaacctggtgtag

SEQ ID NO: 147632 - DNA, 747 bp, synthetic construct
  misc_feature 1..747: note = Description of Artificial Sequence: Synthetic coding sequence
  source 1..747: mol_type = other DNA
atggctgctgagctggagtttgcccagatcatcatcatcgtggtggtggtgacagtgatggtggtggtgattgtgtgcctgctgaaccactacaaggtgtccaccaggagcttcatcaaccggcccaaccagagcagaagaagagaagatggcctgccccaggagggctgcctgtggcccagcgacagcgctgccccccggctgggcgccagcgagatcatgcacgcccccaggagccgggaccgcttcaccgcccccagcttcatccagagggaccgcttcagccgcttccagcccacctacccctacgtgcagcacgagattgacctgccccccaccatcagcctgagtgatggagaggagcccccaccctaccagggcccctgcaccctgcagctgcgggaccctgagcagcagatggagctgaaccgggagagcgtgcgggccccacccaacagaaccatctttgacagcgacctgattgatattgccatgtacagcggcggcccctgcccccccagcagcaacagcggcatcagcgccagcacctgcagcagcaatggaaggatggagggccccccacccacctacagcgaggtgatgggccaccaccctggggccagcttcctgcaccaccagaggagcaatgcccaccggggcagccggctgcagttccagcagaacaatgctgagagcaccatcgtgcccatcaagggcaaggacaggaagccaggcaacctggtgtag

SEQ ID NO: 147633 - DNA, 756 bp, synthetic construct
  misc_feature 1..756: note = Description of Artificial Sequence: Synthetic coding sequence
  source 1..756: mol_type = other DNA
atgagcagtgaccacctgaacaacagcaccctgaaggaggcccagttcaaggacctcttcctgaagaaggccgagctggagtttgcccagatcatcatcatcgtggtggtggtgacagtgatggtggtggtgattgtgtgcctgctgaaccactacaaggtgtccaccaggagcttcatcaaccggcccaaccagagcagaagaagagaagatggcctgccccagatcatgcacgcccccaggagccgggaccgcttcaccgcccccagcttcatccagagggaccgcttcagccgcttccagcccacctacccctacgtgcagcatgaaattgacctgccccccaccatcagcctgagtgatggagaggagcccccaccctaccagggcccctgcaccctgcagctgcgggaccctgagcagcagatggagctgaaccgggagagcgtgcgggccccacccaacagaaccatctttgacagcgacctgattgacatcgccatgtacagcggcggcccctgcccccccagcagcaacagcggcatcagcgccagcacctgcagcagcaatggccgcatggagggccccccacccacctacagcgaggtgatgggccaccaccctggggccagcttcctgcaccaccagaggagcaatgcccaccggggcagccggctgcagttccagcagaacaatgctgagagcaccatcgtgcccatcaagggcaaggacaggaagccaggcaacctggtgtag

SEQ ID NO: 147634 - DNA, 867 bp, synthetic construct
  misc_feature 1..867: note = Description of Artificial Sequence: Synthetic coding sequence
  source 1..867: mol_type = other DNA
atgcctgaggccggcttccaggccaccaatgccttcacagagtgcaagttcacctgcaccagcggcaagtgcctgtacctgggcagcctggtgtgcaaccagcagaatgactgtggggacaacagtgatgaggagaactgcctgctggtgacagagcaccccccacctggcatcttcaacagcgagctggagtttgcccagatcatcatcatcgtggtggtggtgacagtgatggtggtggtgattgtgtgcctgctgaaccactacaaggtgtccaccaggagcttcatcaaccggcccaaccagagcagaagaagagaagatggcctgccccagatcatgcacgcccccaggagccgggaccgcttcaccgcccccagcttcatccagagggaccgcttcagccgcttccagcccacctacccctacgtgcagcacgagattgacctgccccccaccatcagcctgagtgatggagaggagcccccaccctaccagggcccctgcaccctgcagctgcgggaccctgagcagcagatggagctgaaccgggagagcgtgcgggccccacccaacagaaccatctttgacagcgacctgattgatattgccatgtacagcggcggcccctgcccccccagcagcaacagcggcatcagcgccagcacctgcagcagcaatggaaggatggagggccccccacccacctacagcgaggtgatgggccaccaccctggggccagcttcctgcaccaccagaggagcaatgcccaccggggcagccggctgcagttccagcagaacaatgctgagagcaccatcgtgcccatcaagggcaaggacaggaagccaggcaacctggtgtag

SEQ ID NO: 147635 - DNA, 693 bp, synthetic construct
  misc_feature 1..693: note = Description of Artificial Sequence: Synthetic coding sequence
  source 1..693: mol_type = other DNA
atggctgctgagctggagtttgcccagatcatcatcatcgtggtggtggtgacagtgatggtggtggtgattgtgtgcctgctgaaccactacaaggtgtccaccaggagcttcatcaaccggcccaaccagagcagaagaagagaagatggcctgccccagatcatgcacgcccccaggagccgggaccgcttcaccgcccccagcttcatccagagggaccgcttcagccgcttccagcccacctacccctacgtgcagcacgagattgacctgccccccaccatcagcctgagtgatggagaggagcccccaccctaccagggcccctgcaccctgcagctgcgggaccctgagcagcagatggagctgaaccgggagagcgtgcgggccccacccaacagaaccatctttgacagcgacctgattgatattgccatgtacagcggcggcccctgcccccccagcagcaacagcggcatcagcgccagcacctgcagcagcaatggaaggatggagggccccccacccacctacagcgaggtgatgggccaccaccctggggccagcttcctgcaccaccagaggagcaatgcccaccggggcagccggctgcagttccagcagaacaatgctgagagcaccatcgtgcccatcaagggcaaggacaggaagccaggcaacctggtgtag

SEQ ID NO: 147636 - DNA, 1119 bp, synthetic construct
  misc_feature 1..1119: note = Description of Artificial Sequence: Synthetic coding sequence
  source 1..1119: mol_type = other DNA
atggccaagagcaagaccaagcaccggctgtgcagccaggagagctctgtgtctgccctgctggccagctgcaccctgagcggcagcaacagcagcaacagtgatggcagcttccactacaaggacaagctgtacagaagtgccagccaggccctgcaggcctacattgatgactttgacctgggccagatctacccaggggccagcacaggcaagatcaacattgatgaggacttcaccaacatgagccagttctgcaactacatctacaagcccaacaatgcctttgagaacctggaccacaagaagcacagcaacttcatcagctgcagaagacacacagtgaatgacatcgacagcatgagcctgaccacagatgacctgctgcggctgcctgcagatggcagcttctcctacacctacgtgggccccagccacaggaccagcaagaagaacaagaagtgccggggccgcctgggcagcctggacatcgagaagaacccccacttccagggcccctacacctccatgggcaaggacaactttgtgacccctgtgatccgcagcaacatcaacgggaagcagtgtggggacaagattgagctgctgatcctgaaggccaagaggaacctggagcagtgcacagaggagctgcccaagtccatgaagaaggatgacagcccctgcagcctggacaagctggaggccgaccgctcctgggagaacatccctgtgaccttcaagagccctgtgcctgtgaacagtgatgacagcccccagcagaccagccgggccaagagcgccaagggcgtgctggaggacttcctgaacaatgacaaccagagctgcaccctgagcggcggcaagcaccacggccctgtggaggccctgaagcagatgctgttcaacctgcaggccgtgcaggagcgcttcaaccagaacaagaccacagaccccaaggaggagatcaagcaggtgtctgaagatgacttcagcaagctgcagctgaaggagagcatgatccccatcaccaggagcctgcagaaggccctgcaccacctgagccggctgcgggacctggtggatgacaccaatggagagaggagccccaagatgtag

SEQ ID NO: 147637 - DNA, 1602 bp, synthetic construct
  misc_feature 1..1602: note = Description of Artificial Sequence: Synthetic coding sequence
  source 1..1602: mol_type = other DNA
atggccaagagcaagaccaagcaccggctgtgcagccaggagagctctgtgtctgccctgctggccagctgcaccctgagcggcagcaacagcagcaacagtgatggcagcttccactacaaggacaagctgtacagaagtgccagccaggccctgcaggcctacattgatgactttgacctgggccagatctacccaggggccagcacaggcaagatcaacattgatgaggacttcaccaacatgagccagttctgcaactacatctacaagcccaacaatgcctttgagaacctggaccacaagaagcacagcaacttcatcagctgcagaagacacacagtgaatgacatcgacagcatgagcctgaccacagatgacctgctgcggctgcctgcagatggcagcttctcctacacctacgtgggccccagccacaggaccagcaagaagaacaagaagtgccggggccgcctgggcagcctggacatcgagaagaacccccacttccagggcccctacacctccatgggcaaggacaactttgtgacccctgtgatccgcagcaacatcaacgggaagcagtgtggccgcctgaagaaccccaagctgatgaacagaaccaacaactgcatcagcgagagcagcctgtccttccccaagaagagcagcttcaaggacagcagcgagcacagcctggagaagaactacccccgctggctgaccagccagaagagtgacctgaatgtgtctggcatcaccagcatcccagacttcaagtaccctgtgtggctgcacaaccaggacctgctgcctgatgccaacagccagagggtgtaccagatcttcaaggatgaccagtgcagccccaggcacagccaccaggcccagggcaccagccgcctcatcaacaagctggactgctttgaatatgcctttgagcccagcaacttcagcaacagcctgagtgatgacaaggagctggtgaatgagtacaagtgtgactttgagcacagccagtgccagtgtgagaaccccctgctgcccggccagagcaccaagcccttcagcggggacaagattgagctgctgatcctgaaggccaagaggaacctggagcagtgcacagaggagctgcccaagtccatgaagaaggatgacagcccctgcagcctggacaagctggaggccgaccgctcctgggagaacatccctgtgaccttcaagagccctgtgcctgtgaacagtgatgacagcccccagcagaccagccgggccaagagcgccaagggcgtgctggaggacttcctgaacaatgacaaccagagctgcaccctgagcggcggcaagcaccacggccctgtggaggccctgaagcagatgctgttcaacctgcaggccgtgcaggagcgcttcaaccagaacaagaccacagaccccaaggaggagatcaagcaggtgtctgaagatgacttcagcaagctgcagctgaaggagagcatgatccccatcaccaggagcctgcagaaggccctgcaccacctgagccggctgcgggacctggtggatgacaccaacggggagaggagccccaagatgtag

SEQ ID NO: 147638 - DNA, 522 bp, synthetic construct
  misc_feature 1..522: note = Description of Artificial Sequence: Synthetic coding sequence
  source 1..522: mol_type = other DNA
atggccgcccccagcggcggctggaatggagtgggcgccagcctgtgggccgccctgctgctgggcgctgtggccctgcggcctgctgaggccgtgtctgagcccaccaccgtggcctttgatgtgcggcctgggggcgtggtgcacagcttcagccacaacgtgggccctggggacaagtacacctgcatgttcacctacgccagccagggcggcaccaatgagcagtggcagatgagcctgggcaccagcgaggaccaccagcacttcacctgcaccatctggaggccccagggcaagagctacctgtacttcacccagttcaaggccgaggtgagaggagctgagattgaatatgccatggcctacagcaaggccgcctttgagcgggagagtgatgtgcccctgaagacagaggagtttgaggtgaccaagacagctgtggcccacaggcctggggccttcaaggccgagctgagcaagctggtgattgtggccaaggccagcaggacagagctgtag

SEQ ID NO: 147639 - DNA, 426 bp, synthetic construct
  misc_feature 1..426: note = Description of Artificial Sequence: Synthetic coding sequence
  source 1..426: mol_type = other DNA
atgaccatcatggtggaggacatcatgaagctgctgtgcagcctgagcggggagaggaagatgaaggctgctgtgaagcacagcggcaagggggccctggtgactggagccatggcctttgtgggcggcctggtgggcggccccccaggcctggccgtgggcggcgctgtgggcggcctgctgggcgcctggatgaccagcggccagttcaagcctgtgccccagatcctgatggagctgcccccagctgagcagcagaggctcttcaatgaggccgccgccatcatccgccacctggagtggacagatgctgtgcagctgacagccctggtgatgggcagcgaggccctgcagcagcagctgctggccatgctggtgaactacgtgaccaaggagctgcgggcagagatccagtatgatgactag

SEQ ID NO: 147640 - DNA, 324 bp, synthetic construct
  misc_feature 1..324: note = Description of Artificial Sequence: Synthetic coding sequence
  source 1..324: mol_type = other DNA
atgaccatcatggtggaggacatcatgaagctgctgtgcagcctgagcggggagaggaagatgaaggctgctgtgaagcacagcggcaagggggccctggtgactggagccatggcctttgtgggcggcctggtgggcggccccccaggcctggccgtgggcggcgctgtgggcggcctgctgggcgcctggatgaccagcggccagttcaagcctgtgccccagatcctgatggagctgcccccagctgagcagcagaggctcttcaatgaggccgccgccatcacccggccctgcagcagcagctgctggccctgctggtag

SEQ ID NO: 147641 - DNA, 459 bp, synthetic construct
  misc_feature 1..459: note = Description of Artificial Sequence: Synthetic coding sequence
  source 1..459: mol_type = other DNA
atggagcggctgaagagccacaagccagccaccatgaccatcatggtggaggacatcatgaagctgctgtgcagcctgtctggagagaggaagatgaaggctgctgtgaagcacagcgggaaaggagccctggtgactggagccatggcctttgtgggcggcctggtgggcggccccccaggcctggccgtgggcggcgctgtgggcggcctgctgggcgcctggatgaccagcggccagttcaagcctgtgccccagatcctgatggagctgcccccagctgagcagcagaggctcttcaatgaagctgctgccatcatccgccacctggagtggacagatgctgtgcagctgacagccctggtgatgggcagcgaggccctgcagcagcagctgctggccatgctggtgaactacgtgaccaaggagctgcgggcagagatccagtatgatgactag

SEQ ID NO: 147642 - DNA, 648 bp, synthetic construct
  misc_feature 1..648: note = Description of Artificial Sequence: Synthetic coding sequence
  source 1..648: mol_type = other DNA
atggagaagaaccccccagatgacaccggccctgtgcacgtgcccctgggccacatcgtggccaatgagaagtggaggggcagccagctggcccaggagatgcagggcaagatcaagctgatctttgaagatggcctgaccccagacttctacctgagcaaccgctgctgcatcctgtatgtgacagaggccgacctggtggccggaaatggctacaggaagaggctggtgcgggtgaggaacagcaacaacctgaagggcatcgtggtggtggagaagaccaggatgtctgagcagtacttccctgccctgcagaagttcaccgtgctggacctgggcatggtgctgctgcctgtggccagccagatggaggccagctgcctggtgatccagctggtgcaggagcagaccaaggagcccagcaagaaccccctgctgggcaagaagagggccctgctgctgtctgagcccagcctgctgaggacagtgcagcagatccctggggtgggcaaggtgaaggcccccctgctgctgcagaagttccccagcatccagcagctgagcaatgccagcatcggggagctggagcaggtggtgggccaggccgtggcccagcagatccacgccttcttcacccagcccaggtag

SEQ ID NO: 147643 - DNA, 648 bp, synthetic construct; identical to SEQ ID NO: 147642
  misc_feature 1..648: note = Description of Artificial Sequence: Synthetic coding sequence
  source 1..648: mol_type = other DNA

SEQ ID NO: 147644 - DNA, 1227 bp, synthetic construct
  misc_feature 1..1227: note = Description of Artificial Sequence: Synthetic coding sequence
  source 1..1227: mol_type = other DNA
atgtctgagcacgtggagcctgctgcccctggccctggccccaatggaggcggcggcggccctgccccagcccggggccccaggacccccaacctgaaccccaaccccctcatcaacgtgcgggacaggctcttccacgccctcttcttcaagatggctgtgacctacagccgcctcttccccccagccttcagaagactctttgagttctttgtgctgctgaaggccctgtttgtgctgtttgtgctggcctacatccacatcgtgttcagccgcagccccatcaactgcctggagcacgtgcgggacaagtggccccgggagggcatcctgcgggtggaggtgcgccacaacagcagccgggcccctgtgttcctgcagttctgtgacagcggcggccggggcagcttccctggcctggccgtggagcccggcagcaacctggacatggaggatgaggaggaggaggagctgaccatggagatgtttggaaacagcagcatcaagtttgagctggacatcgagcccaaggtgttcaagccacccagcagcacagaggccctgaatgacagccaggagttccccttccctgagacccccaccaaggtgtggccccaggatgagtacatcgtggagtacagcctggagtatggcttcctgcggctgagccaggccacccggcagaggctgagcatccctgtgatggtggtgaccctggaccccacccgggaccagtgctttggagaccgcttcagccggctgctgctggatgagttcctgggctatgatgacatcctgatgagctctgtgaagggcctggctgaaaatgaggagaacaagggcttcctgagaaatgtggtgtctggagagcactacagatttgtgtccatgtggatggcccggaccagctacctggccgcctttgccatcatggtgatcttcaccctgtctgtgtccatgctgctgcgctacagccaccaccagatctttgtgttcatcgtggacctgctgcagatgctggagatgaacatggccatcgccttccctgctgcccccctgctgaccgtcatcctggccctggtgggcatggaggccatcatgtctgagttcttcaatgacaccaccacagccttctacatcatcctgattgtgtggctggccgaccagtatgatgccatctgctgccacaccagcaccagcaagaggcactggctgcgcatcccctag

SEQ ID NO: 147645 - DNA, 1863 bp, synthetic construct
  misc_feature 1..1863: note = Description of Artificial Sequence: Synthetic coding sequence
  source 1..1863: mol_type = other DNA
atgtctgagcacgtggagcctgctgcccctggccctggccccaatggaggcggcggcggccctgccccagcccggggccccaggacccccaacctgaaccccaaccccctcatcaacgtgcgggacaggctcttccacgccctcttcttcaagatggctgtgacctacagccgcctcttccccccagccttcagaagactctttgagttctttgtgctgctgaaggccctgtttgtgctgtttgtgctggcctacatccacatcgtgttcagccgcagccccatcaactgcctggagcacgtgcgggacaagtggccccgggagggcatcctgcgggtggaggtgcgccacaacagcagccgggcccctgtgttcctgcagttctgtgacagcggcggccggggcagcttccctggcctggccgtggagcccggcagcaacctggacatggaggatgaggaggaggaggagctgaccatggagatgtttggaaacagcagcatcaagtttgagctggacatcgagcccaaggtgttcaagccacccagcagcacagaggccctgaatgacagccaggagttccccttccctgagacccccaccaaggtgtggccccaggatgagtacatcgtggagtacagcctggagtatggcttcctgcggctgagccaggccacccggcagaggctgagcatccctgtgatggtggtgaccctggaccccacccgggaccagtgctttggagaccgcttcagccggctgctgctggatgagttcctgggctatgatgacatcctgatgagctctgtgaagggcctggctgaaaatgaggagaacaagggcttcctgagaaatgtggtgtctggagagcactacagatttgtgtccatgtggatggcccggaccagctacctggccgcctttgccatcatggtgatcttcaccctgtctgtgtccatgctgctgcgctacagccaccaccagatctttgtgttcatcgtggacctgctgcagatgctggagatgaacatggccatcgccttccctgctgcccccctgctgaccgtcatcctggccctggtgggcatggaggccatcatgtctgagttcttcaatgacaccaccacagccttctacatcatcctgattgtgtggctggccgaccagtatgatgccatctgctgccacaccagcaccagcaagaggcactggctgcgcttcttctacctgtaccactttgccttctacgcctaccactaccgcttcaacggccagtacagcagcctggccctggtgacctcctggctgttcatccagcacagcatgatctacttcttccaccactatgagctgcctgccatcctgcagcaggtgcgcatccaggagatgctgctgcaggccccacccctgggccctggcacccccacagccctgcctgatgacatgaacaacaacagcggggccccagccacagccccagattctgctggccagcccccagccctgggccctgtgtcccctggggccagcggcagccctggccctgtggccgccgcccccagcagcctggtggccgctgctgcctctgtggccgctgctgctggaggagacctgggctggatggccgagacagctgccatcatcacagatgccagcttcctgagcggcctgagcgccagcctgctggagcggcggcctgccagccccctgggccctgctgggggcctgccccacgccccccaggacagcgtgcccccaagtgacagcgctgccagtgacaccacccccctgggcgctgctgtgggcggccccagccctgcctccatggcccccacagaggcccccagcgaggtgggcagctag

SEQ ID NO: 147646 - DNA, 447 bp, synthetic construct
  misc_feature 1..447: note = Description of Artificial Sequence: Synthetic coding sequence
  source 1..447: mol_type = other DNA
atggccgccagccctgcccggcctgctgtgctggccctgaccggcctggccctgctgctgctgctgtgctggggccctgggggcatcagcggcaacaagctgaagctgatgctgcagaagcgggaggcccctgtgcccaccaagaccaaggtggccgtggatgagaacaaggccaaggagttcctgggcagcctgaagaggcagaagaggcagctgtgggacaggaccaggcctgaggtgcagcagtggtaccagcagttcctgtacatgggctttgatgaggccaagtttgaagatgacatcacctactggctgaacagagacagaaatggccacgagtactatggagactactaccagaggcactatgatgaagattctgccatcggccccaggagcccctacggcttcagacatggagcctctgtgaactatgatgactactag

SEQ ID NO: 147647 - DNA, 2964 bp, synthetic construct
  misc_feature 1..2964: note = Description of Artificial Sequence: Synthetic coding sequence
  source 1..2964: mol_type = other DNA
atgaccccagccctgcgggaggccacagccaagggcatctccttcagcagcctgcccagcaccatggagagtgacaagatgctgtacatggagagccccaggacagtggatgagaagctgaagggggacaccttcagccagatgctgggcttccccaccccagagcccaccctgaacaccaactttgtgaacctgaagcacttcggcagcccccagagcagcaagcactaccagacagtgttcctgatgaggagcaacagcaccctgaacaagcacaatgaaaactacaagcagaagaagctgggggagcccagctgcaacaagctgaagaacatcctgtacaacggcagcaacatccagctgagcaagatctgcctgagccacagcgaggagttcatcaagaaggagcccctgagtgacaccaccagccagtgcatgaaggatgtgcagatcatcctggacagcaacatcaccaaggacaccaacgtggacaaggtgcagctgcagaactgcaagtggtaccaggagaatgccctgctggacaaggtgacagatgctgagatcaagaagggcctgctgcactgcacccagaagaagatcgtgcccggccacagcaatgtgcctgtgagcagcagcgctgctgagaaggaggaggaggtgcacgcccggctgctgcactgtgtgtccaagcagaagatcctgctgagccaggcccggaggacccagaagcacctgcagatgctgctggccaagcacgtggtgaagcactacggccagcagatgaagctgtccatgaagcaccagctgcccaagatgaagaccttccacgagcccaccaccatcctgggcaacagcctgcccaagtgcacagagatcaagccagaggtgaacaccctgacagctgagaacaagctgtgggatgatgccaagaatggatttgcccgctgcacagctgctgagatccagagatttgccttcagcgccaccggcctgctgagccacgtggaggagggcctggacagtgatgccacagacagcagcagtgatgatgacctggatgagtacaccctgaggaagaatgtggccgtgaactgcagcacagagtggaagtggctggtggaccgggcccgggtgggcagccgctggacctggctgcaggcccagatcagtgacctggagtgcaagatccagcagctgacagacatccaccggcagatccgggccagcaagggcatcgtggtgctggaggagtgccagctgcccaaggacatcctgaagaagcagatgcagtttgctgaccaggccgccagcctgaacatcctgggcaacccccaggtgccccaggagtgccaggaccctgtgcctgagcaggactttgagatgagccccagcagccccaccctgctgctgagaaatattgagaagcagagcgcccagctgacagagatcatcaacagcctcatcgcccccctgaacctgagccccaccagcagccccctgagcagcaagagctgcagccacaagtgcctggccaacggcatctacagaagtgccagcgagaacctggatgagctgagcagcagcagctcctggctgctgaaccagaagcacagcaagaagaagaggaaggacaggacccggctgaagagcagcagcctgaccttcatgagcaccagcgcccggacccggcccctgcagagcttccacaagaggaagctgtaccgcctgagccccaccttctactggaccccccagaccctgcccagcaaggagacagccttcctgaacaccacccagatgccctgcctgcagagcgccagcacctggagcagctatgagcacaacagcgagagctacctgctgcgggagcacgtgtctgagctggacagcagcttccacagcgtgctgagcctgcccagtgatgtgcccctgcacttccactttgagaccctgctgaagaagacagagatcaagggcaacctggccgagaacaagtttgtggatgagtacatcatcagccccagccctgtgcacagcaccctgaaccagtggagaaatggctacagccccatctgcaagccccagatccgctctgagagcagcgcccagctgctgcagggcaggaagaagaggcacctgtctgaaacagccctgggggagaggaccaagctggaggagagtgacttccagcacacagagagcggcagccacagcaacttcaccgctgtgtccaatgtgaatgtgctgagccgcatccagaacagcagcaggaacacagcccggcggcggctgcggtctgagagcagctatgacatcgacaacatcgtcatccccatgagcctggtggccccagccaagctggagaagctgcagtacaaggagatcctgacccccagctggaggatggtggtgctgcagcccctggatgagtacaacctgggcaaggaggagattgaggacctgagtgatgaggtgttcagcctgcggcacaagaagtatgaggagcgggagcaggcccgctggagcctgtgggagcagagcaagtggcacagaagaaacagccgggcctacagcaagaatgtggagggccaggacctgctgctgaaggagtaccccaacaacttcagcagcagccagcagtgtgccgccgccagccccccaggcctgcccagcgagaaccaggacctgtgtgcctacggcctgcccagcctgaaccagagccaggagaccaagagcctgtggtgggagcggcgggccttccccctgaagggggaggacatggccgccctgctgtgccaggatgagaagaaggaccaggtggagaggagcagcacagccttccacggggagatcttcggcacctctgtgcctgaaaatggccaccaccccaagaagcagagtgatggcatggaggagtacaagaccttcggcctgggcctgaccaacgtgaagaagaacagatag

SEQ ID NO: 147648 - DNA, 687 bp, synthetic construct
  misc_feature 1..687: note = Description of Artificial Sequence: Synthetic coding sequence
  source 1..687: mol_type = other DNA
atgtcctatgcagagaagccagatgagatcaccaaggatgagtggatggagaagctgaacaacctgcacgtgcagagagctgacatgaacagactcatcatgaactacctggtgacagagggcttcaaggaggccgctgagaagttcaggatggagagcggcatcgagcccagcgtggacctggagaccctggatgagcgcatcaagatccgggagatgatcctgaagggccagatccaggaggccatcgccctgatcaacagcctgcaccctgagctgctggacaccaaccgctacctgtacttccacctgcagcagcagcacctgattgagctgatccggcagcgggagacagaggccgccctggagtttgcccagacccagctggccgagcagggcgaggagagccgggagtgcctgacagagatggagaggaccctggccctgctggcctttgacagccctgaggagagcccctttggagacctgctgcacaccatgcagaggcagaaggtgtggagcgaggtgaaccaggccgtgctggactatgagaaccgggagagcacccccaagctggccaagctgctgaagctgctgctgtgggcccagaatgagctggaccagaagaaggtgaagtaccccaagatgacagacctgagcaaaggagtcatcgaggagcccaagtag

SEQ ID NO: 147649 - DNA, 468 bp, synthetic construct
  misc_feature 1..468: note = Description of Artificial Sequence: Synthetic coding sequence
  source 1..468: mol_type = other DNA
atgtcctatgcagagaagccagatgagatcaccaaggatgagtggatggagaagctgaacaacctgcacgtgcagagagctgacatgaacagactcatcatgaactacctggtgacagagggcttcaaggaggccgctgagaagttcaggatggagagcggcatcgagcccagcgtggacctggagaccctggatgagcgcatcaagatccgggagatgatcctgaagggccagatccagcaggtggtgcatgactgctggaggaaggagagggtcttcatcctgagtgacctgcccagcagcatctctgctgccagccacccccccagcagcgctggcagcgcagatgtgctgctgctcttcacccacaggacagtgccctgcagcgtggtgggcagaagagaggtggtgcagggctgtgtgcactgcctgcgggtgggcaccgtggatggccacatggccctgtag

SEQ ID NO: 147650 - DNA, 3534 bp, synthetic construct
  misc_feature 1..3534: note = Description of Artificial Sequence: Synthetic coding sequence
  source 1..3534: mol_type = other DNA
atggatgtgtacccaccccggcggcagggcctgccccgggcccggagccctgggggcagcagccggggcagccccagcgtgtcctgcagccggctgcggcaggtgcagagcatcctgacccagagcagcaagagcaggccagatggcatcctgtgcatcctgggcatcgacagccgctacaatgaaggctgccgggagctggccaactacctgctgtttggcctgtacaaccagaacaccagtgactttgagaagacaggcttcagcgaggaggtgctggatgatgtgatcatcctgatcaagagtgacagcgtgcacctgtactgcaaccctgtgaacttccgctacctgctgccctacgtggcccactggaggaacctgcacttccactgcatgacagaaaatgaatatgaagatgaggaggccgctgaggagttcaagatcaccagctttgtggacatggtgcgggactgcagcagaattggcatcccctacagcagccagggccacctgcagatctttgacatgtttgtggtggagaagtggcccatcgtgcaggcctttgccctggagggcattggaggagatggcttcttcaccatgaagtatgagctgcaggatgtgtccctgaacctgtggaatgtgtacagcaagatggaccccatgagcctggagagcctgctgagtgatgacctggtggcctttgagcaccagtggaccagcttctttgccaactttgacacagagatccccttcctgctggagctgtctgagagccaggccggggagcccttccgcagctacttcagccacggcatgatcagcagccacatcacagagaacagccccaaccggcagccctttgtgctgtttggaaaccacagcacccgggagaacctgaatgccggcaacttcaacttccccagcgagggccacctggtgcgcagcactggacctgggggcagctttgccaagcacatggtggcccagtgtgtgagccccaagggccccctggcctgcagcaggacctacttcttcggggccacccacgtgccctacctgggcggggacagcaagctgcccaagaagacagagcagatccggctgctgagccagatctatgctgctgtgattgaggccgtgctggccggcatcgcctgctacgccaagaccagcagcctgaccaaggccaaggaggtggccgagcagaccctgggcagcggcctggacagctttgagctgatccccttcaaggccgccctgcggagcaagatgaccttccacatccatgctgtgaacaaccagggccgcatcgtgcccctggacagcgaggacagcctgagctttgtgaagacagcctgcatggctgtgtatgacatcccagacctgctgggcggcaatggctgcctgggctctgtggtgttcagcgagagcttcctgaccagccagatcctggtgaaggagaaggatggcaccgtgaccacagagaccagctctgtggtgctgacagctgctgtgccccgcttctgctcctggctggtggaggacaatgaggtgaagctgtctgagaagacccagcaggccgtgagaggagatgagagcttcctgggcacctacctgactggaggagagggcgcctacctgtacagcagcaacctgcagagctggccagaggagggcaatgtgcacttcttcagcagcggcctgctcttcagccactgccgccacaggagcatcatcatcagcaaggaccacatgaacagcatctccttctatgatggagacagcaccagcacagtggccgccctgctgattgacttcaagagcagcctgctgccccacctgcctgtgcacttccacggcagcagcaacttcctgatgattgccctcttccccaagagcaagatctaccaggccttctacagcgaggtgttcagcctgtggaagcagcaggacaacagcggcatcagcctgaaggtgatccaggaggatggcctgtctgtggagcagaagaggctgcacagcagcgcccagaagctgttcagcgccctgagccagcctgctggggagaagaggagcagcctgaagctgctgagcgccaagctgcctgagctggactggttcctgcagcactttgccatcagcagcatcagccaggagcctgtgatgaggacccacctgcctgtgctgctgcagcaggccgagatcaacaccacccaccgcatcgagagtgacaaggtgatcatcagcatcgtgacaggcctgcccggctgccacgccagcgagctgtgtgccttcctggtgaccctgcacaaggaatgtggccgctggatggtgtaccggcagatcatggacagcagcgagtgcttccacgccgcccacttccagcgctacctgagcagcgccctggaggcccagcagaacagaagtgcccggcagagcgcctacatcaggaagaagacccggctgctggtggtgctgcagggctacacagatgtgattgatgtggtgcaggccctgcagacccacccagacagcaatgtgaaggccagcttcaccatcggggccatcacagcctgtgtggagcccatgagctgctacatggagcaccgcttcctgttccccaagtgcctggaccagtgcagccagggcctggtgtccaatgtggtgttcaccagccacaccacagagcagaggcaccccctgctggtgcagctgcagagcctcatccgggccgccaacccagctgctgccttcatcctggctgaaaatggcatcgtgaccagaaatgaagatattgagctgatcctgtctgaaaattccttcagcagccctgagatgctgcggagccgctacctgatgtacccaggctggtatgagggcaagctgaatgccggctctgtgtaccccctgatggtgcagatctgtgtgtggtttggccggcccctggagaagaccaggtttgtggccaagtgcaaggccatccagagcagcatcaagcccagccccttcagcggcaacatctaccacatcctgggcaaggtgaagttcagtgacagcgagaggaccatggaggtgtgctacaacaccctggccaacagcctgagcatcatgcctgtgctggagggccccaccccacctccagacagcaagtctgtgtcccaggacagcagcggccagcaggagtgctacctggtgttcatcggctgcagcctgaaggaggacagcatcaaggactggctgcggcagagcgccaagcagaagccccagaggaaggccctgaagacccggggcatgctgacccagcaggagatccgcagcatccacgtgaagaggcacctggagcccctgcctgctggctacttctacaacggcacccagtttgtgaacttcttcggggacaagacagacttccaccccctgatggaccagttcatgaatgactatgtggaggaggccaaccgggagattgagaagtacaaccaggagctggagcagcaggagtaccatgacctgtttgagctgaagccctag

SEQ ID NO: 147651 - DNA, 1488 bp, synthetic construct
  misc_feature 1..1488: note = Description of Artificial Sequence: Synthetic coding sequence
  source 1..1488: mol_type = other DNA
atggagggctgcctgggccaggagctgttcagcaaccacatgttcctgaccagcctgagcagccccaaccggcagccctttgtgctgtttggaaaccacagcacccgggagaacctgaatgccggcaacttcaacttccccagcgagggccacctggtgcgcagcacaggccctgggggcagctttgccaagcacatggtggcccagtgtgtgagccccaagggccccctggcctgcagcaggacctacttctttggagccacccacgtgccctacctgggcggggacagcaagctgcccaagaagacagagcagatgctgctgagccagatctatgctgctgtgattgaggccgtgctggccggcatcgcctgctacgccaagaccagcagcctgaccaaggccaaggaggtggccgagcagaccctgggcagcggcctggacagctttgagctgatccccttcaaggccgccctgcggagcaagatgaccttccacatccatgctgtgaacaaccagggccgcatcgtgcccctggacagcgaggacagcctgagctttgtgaagacagcctgcatggctgtgtatgacatcccagacctgctgggcggcaatggctgcctgggctctgtggtgttcagcgagagcttcctgaccagccagatcctggtgaaggagaaggatggcaccgtgaccacagagaccagctctgtggtgctgacagctgctgtgccccgcttctgctcctggctggtggaggacaatgaggtgaagctgtctgagaagacccagcaggccgtgagaggagatgagagcttcctgggcacctacctgactggaggagagggcgcctacctgtacagcagcaacctgcagagctggccagaggagggcaatgtgcacttcttcagcagcggcctgctcttcagccactgccgccacaggagcatcatcatcagcaaggaccacatgaacagcatctccttctatgatggagacagcaccagcacagtggccgccctgctgattgacttcaagagcagcctgctgccccacctgcctgtgcacttccacggcagcagcaacttcctgatgattgccctcttccccaagagcaagatctaccaggccttctacagcgaggtgttcagcctgtggaagcagcaggacaacagcggcatcagcctgaaggtgatccaggaggatggcctgtctgtggagcagaagaggctgcacagcagcgcccagaagctgttcagcgccctgagccagcctgctggggagaagaggagcagcctgaagctgctgagcgccaagctgcctgagctggactggttcctgcagcactttgccatcagcagcatcagccaggagcctgtgatgaggacccacctgcctgtgctgctgcagcaggccgagatcaacaccacccaccgcatcgagagtgacaagatggatggagtgagccccaaccacggccagctgtag

SEQ ID NO: 147652 - DNA, 615 bp, synthetic construct
  misc_feature 1..615: note = Description of Artificial Sequence: Synthetic coding sequence
  source 1..615: mol_type = other DNA
atgggagaggccgaggtgggcggcggcggggccgccggggacaagggccctggagaggccgccaccagccctgctgaggagaccgtggtgtggagccctgaggtggaggtgtgcctcttccacgccatgctgggccacaagcctgtgggcgtgaacagacacttccacatgatctgcatccgggacaagttcagccagaacatcggccggcaggtgcccagcaaggtgatctgggaccacctgagcaccatgtatgacatgcaggccctgcatgaaagtgagatcctgcccttccccaaccctgagaggaactttgtgctgcctgaggagatcatccaggaggtgcgggagggcaaggtgatgattgaggaggagatgaaggaggagatgaaggaggatgtggacccccacaacggggctgatgatgtgttcagcagcagcggcagcctgggcaaggccagcgagaagagcagcaaggacaaggagaagaacagcagtgacctgggctgcaaggagggcgctgacaagaggaagaggagccgggtgacagacaaggtgctgacagccaacagcaaccccagcagccccagcgctgccaagagaagaagaacatag

SEQ ID NO: 147653 - DNA, 1278 bp, synthetic construct
  misc_feature 1..1278: note = Description of Artificial Sequence: Synthetic coding sequence
  source 1..1278: mol_type = other DNA
atgtaccccagcaacaagaagaagaaggtgtggagggaggagaaggagcggctgctgaagatgaccctggaggagaggaggaaggagtacctgcgggactacatccccctgaacagcatcctgtcctggaaggaggagatgaagggcaagggccagaatgatgaggagaacacccaggagaccagccaggtgaagaagagcctgacagagaaggtgtccctgtacagaggagacatcaccctgctggaggtggatgccatcgtgaatgctgccaatgccagcctgctgggcggcggcggcgtggatggctgcatccacagagctgctggcccctgcctgctggccgagtgcaggaacctgaatggctgtgacaccggccacgccaagatcacctgtggctatgacctgcctgccaagtatgtgatccacacagtgggccccatcgcccggggccacatcaatggcagccacaaggaggacctggccaactgctacaagagcagcctgaagctggtgaaggagaacaacatccgctctgtggccttcccctgcatcagcacaggcatctacggcttccccaatgaacctgctgctgtgattgccctgaacaccatcaaggagtggctggccaagaaccaccacgaggtggaccgcatcatcttctgtgtgttcctggaggtggacttcaagatctacaagaagaagatgaatgagttcttctctgtggatgacaacaatgaggaggaggaggatgtggagatgaaggaggacagtgatgaaaatggacctgaggagaagcagagcgtggaggagatggaggagcagagccaggatgctgatggagtgaacacagtgacagtgcccggccctgccagcgaggaggccgtggaggactgcaaggatgaggactttgccaaggatgagaacatcaccaagggcggggaggtgacagaccacagcgtgcgggaccaggaccacccagatggccaggagaatgacagcaccaagaatgagatcaagattgaaacagagagccagagcagctacatggagacagaggagctgagcagcaaccaggaggatgctgtgattgtggagcagcctgaggtgatccccctgacagaggaccaggaggagaaggagggggagaaggcccctggagaggacacccccaggatgcctgggaagtctgagggcagcagtgacctggagaacaccccaggcccagatgctggggcccaggatgaggccaaggagcagagaaatggcaccaagtag

SEQ ID NO: 147654 - DNA, 1248 bp, synthetic construct
  misc_feature 1..1248: note = Description of Artificial Sequence: Synthetic coding sequence
  source 1..1248: mol_type = other DNA
atggccttcctgatgcacctgctggtgtgtgtgtttggcatgggctcctgggtgaccatcaatggcctgtgggtggagctgcccctgctggtgatggagctgcctgagggctggtacctgcccagctacctgactgtggtgatccagctggccaacatcggccccctgctggtgaccctgctgcaccacttccggcccagctgcctgtctgaggtgcccatcatcttcaccctgctgggcgtgggcaccgtgacctgcatcatctttgccttcctgtggaacatgacctcctgggtgctggatggccaccacagcatcgccttcctggtgctgaccttcttcctggccctggtggactgcaccagctctgtgaccttcctgcccttcatgagccggctgcccacctactacctgaccaccttctttgtgggggagggcctgagcggcctgctgcctgccctggtggccctggcccagggcagcggcctgaccacctgtgtgaatgtgacagagatcagtgacagcgtgcccagccctgtgcccacccgggagacagacatcgcccagggcgtgccccgggccctggtgtctgccctgcccggcatggaggcccccctgagccacctggagagccgctacctgcctgcccacttcagccccctggtgttcttcctgctgctgagcatcatgatggcctgctgcctggtggccttctttgtgctgcagaggcagccccgctgctgggaggcctctgtggaggacctgctgaatgaccaggtgaccctgcacagcatccggccccgggaggagaatgacctgggccctgctggcaccgtggacagcagccagggccagggctacctggaggagaaggccgccccctgctgcccagcccacctggccttcatctacaccctggtggcctttgtgaatgccctgaccaacggcatgctgcccagcgtgcagacctacagctgcctgtcctatggccctgtggcctaccacctggccgccaccctgagcatcgtggccaaccccctggccagcctggtgtccatgttcctgcccaacagaagcctgctcttcctgggcgtgctgtctgtgctgggcacctgctttggaggctacaacatggccatggctgtgatgagcccctgccccctgctgcagggccactggggcggggaggtgctgattgtgtccatccggcctgtgggcctgctgcccctgcggaccccccacccctag

SEQ ID NO: 147655 - DNA, 1038 bp, synthetic construct
  misc_feature 1..1038: note = Description of Artificial Sequence: Synthetic coding sequence
  source 1..1038: mol_type = other DNA
atgctgcggcctgctggcctgtggaggctgtgccggcggccctgggccgcccgggtgcctgctgagaacctgggccggcgggaggtgaccagcggcgtgagcccccggggcagcaccagccccaggaccctgaacatctttgaccgggacctgaagaggaagcagaagaactgggccgcccggcagcctgagcccaccaagtttgactacctgaaggaggaggtgggcagcagaattgctgacagagtgtatgacatccccaggaacttccccctggccctggacctgggctgcggccggggctacatcgcccagtacctgaacaaggagaccatcggcaagttcttccaggccgacattgctgaaaatgccctgaagaacagcagcgagacagagatccccaccgtgtctgtgctggctgatgaggagttcctgcccttcaaggagaacacctttgacctggtggtgagcagcctgagcctgcactgggtgaatgacctgccccgggccctggagcagatccactacatcctgaagccagatggagtcttcatcggggccatgtttggaggagacaccctgtatgagctgcgctgcagcctgcagctggccgagacagagcgggagggcggcttcagcccccacatcagccccttcaccgctgtgaatgacctgggccacctgctgggccgggccggcttcaacaccctgactgtggacacagatgagatccaggtgaactacccaggcatgtttgagctgatggaggacctgcagggcatgggagagagcaactgtgcctggaacaggaaggccctgctgcaccgggacaccatgctggccgctgctgctgtgtaccgggagatgtacagaaatgaagatggctctgtgcctgccacctaccagatctactacatgattggctggaagtaccacgagagccaggcccggcctgctgagcggggcagcgccaccgtgtcctttggagagctgggcaagatcaacaacctgatgcctcctgggaagaagagccagtag

SEQ ID NO: 147656 - DNA, 954 bp, synthetic construct
  misc_feature 1..954: note = Description of Artificial Sequence: Synthetic coding sequence
  source 1..954: mol_type = other DNA
atgctgcggcctgctggcctgtggaggctgtgccggcggccctgggccgcccgggtgcctgctgagaacctgggccggcgggaggtgaccagcggcgtgagcccccggggcagcaccagccccaggaccctgaacatctttgaccgggacctgaagaggaagcagaagaactgggccgcccggcagcctgagcccaccaagtttgactacctgaaggaggaggtgggcagcagaattgctgacagagtgtatgacatccccaggaacttccccctggccctggacctgggctgcggccggggctacatcgcccagtacctgaacaagctgcagctgttccactgcaggaagctgctggagagcttcagcaagctgaccctgcagaagatgctgtgcctgcactgggtgaatgacctgccccgggccctggagcagatccactacatcctgaagccagatggagtcttcatcggggccatgtttggaggagacaccctgtatgagctgcgctgcagcctgcagctggccgagacagagcgggagggcggcttcagcccccacatcagccccttcaccgctgtgaatgacctgggccacctgctgggccgggccggcttcaacaccctgactgtggacacagatgagatccaggtgaactacccaggcatgtttgagctgatggaggacctgcagggcatgggagagagcaactgtgcctggaacaggaaggccctgctgcaccgggacaccatgctggccgctgctgctgtgtaccgggagatgtacagaaatgaagatggctctgtgcctgccacctaccagatctactacatgattggctggaagtaccacgagagccaggcccggcctgctgagcggggcagcgccaccgtgtcctttggagagctgggcaagatcaacaacctgatgcctcctgggaagaagagccagtag

SEQ ID NO: 147657 - DNA, 804 bp, synthetic construct
  misc_feature 1..804: note = Description of Artificial Sequence: Synthetic coding sequence
  source 1..804: mol_type = other DNA
atgctgcggcctgctggcctgtggaggctgtgccggcggccctgggccgcccgggtgcctgctgagaacctgggccggcgggaggtgaccagcggcgtgagcccccggggcagcaccagccccaggaccctgaacatctttgaccgggacctgaagaggaagcagaagaactgggccgcccggcagcctgagcccaccaagtttgactacctgaaggaggaggtgggcagcagaattgctgacagagtgtatgacatccccaggaacttccccctggccctggacctgggctgcggccggggctacatcgcccagtacctgaacaaggagaccatcggcaagttcttccaggccgacattgctgaaaatgccctgaagaacagcagcgagacagagatccccaccgtgtctgtgctggctgatgaggagttcctgcccttcaaggagaacacctttgacctggtggtgagcagcctgagcctgcactgggtgaatgacctgccccgggccctggagcagatccactacatcctgaagccagatggagtcttcatcggggccatgtttggaggagacaccctgtatgagctgcgctgcagcctgcagctggccgagacagagcgggagggcggcttcagcccccacatcagccccttcaccgctgtgaatgacctgggccacctgctgggccgggccggcttcaacaccctgactgtggacacagatgagatccaggtgaactacccaggcatgtttgagctgatggaggacctgcaggagcagaagagcaggatgctgacctag

SEQ ID NO: 147658 - DNA, 771 bp, synthetic construct
  misc_feature 1..771: note = Description of Artificial Sequence: Synthetic coding sequence
  source 1..771: mol_type = other DNA
atgaagctgaccaggaagatggtgctgacccgggccaaggccagcgagctgcacagcgtgaggaagctgaactgctggggcagccggctgacagacatcagcatctgccaggagatgcccagcctggaggtgatcaccctgtctgtgaacagcatcagcaccctggagcctgtgagccgctgccagaggctgtctgagctgtacctgcggaggaaccgcatccccagcctggccgagctgttctacctgaagggcctgccccggctgcgggtgctgtggctggccgagaacccctgctgcggcaccagcccccaccgctacaggatgacagtgctgcggaccctgccccggctgcagaagctggacaaccaggccgtgacagaggaggagctgagccgggccctgtctgagggggaggagatcacagctgcccctgagcgggagggcaccggccacggcggccccaagctgtgctgcaccctgagcagcctgagcagcgctgctgagaccggccgggaccccctggacagcgaggaggaggccaccagcggggcccaggatgagcggggcctgaagccacccagccggggccagttccccagcctgagcgccagagatgccagcagcagccaccggggcagaaatgtgctgacagccatcctgctgctgctgcgggagctggatgctgagggcctggaggccgtgcagcagacagtgggcagccggctgcaggccctgcggggggaggaggtgcaggagcacgccgagtag

SEQ ID NO: 147659 - DNA, 654 bp, synthetic construct
  misc_feature 1..654: note = Description of Artificial Sequence: Synthetic coding sequence
  source 1..654: mol_type = other DNA
gtcacccagggcccccagggcctgcgggccagcggccgcagctgtgtgggccccttcctgagccacctgggccgggacaggaccccaggagtgctgacagagctgcgctgtgtggtgcctgcccggctgacagccctggagaggagcaggaagccccggggccggggccggggccgctacatcaccctgctgcctgtgcctgaggccgaccccatcctggagcgggtgccccagcctgagttctgcagctgtgtgaacagcatcagcaccctggagcctgtgagccgctgccagaggctgtctgagctgtacctgcggaggaaccgcatccccagcctggccgagctgttctacctgaagggcctgccccggctgcgggtgctgtggctggccgagaacccctgctgcggcaccagcccccaccgctacaggatgacagtgctgcggaccctgccccggctgcagaagctggacaaccaggccgtgacagaggaggagctgagccgggccctgtctgagggggaggagatcacagctgcccctgagcgggagggcaccggccacggcggccccaagctgtgctgcaccctgagcagcctgagcagcgctgctgagaccggccgggaccccctggacagcgaggaggaggcctag

SEQ ID NO: 147660 - DNA, 1128 bp, synthetic construct
  misc_feature 1..1128: note = Description of Artificial Sequence: Synthetic coding sequence
  source 1..1128: mol_type = other DNA
atgaagctgaccaggaagatggtgctgacccgggccaaggccagcgagctgcacagcgtgaggaagctgaactgctggggcagccggctgacagacatcagcatctgccaggagatgcccagcctggaggtgatcaccctgtctgtgaacagcatcagcaccctggagcctgtgagccgctgccagaggctgtctgagctgtacctgcggaggaaccgcatccccagcctggccgagctgttctacctgaagggcctgccccggctgcgggtgctgtggctggccgagaacccctgctgcggcaccagcccccaccgctacaggatgacagtgctgcggaccctgccccggctgcagaagctggacaaccaggccgtgacagaggaggagctgagccgggccctgtctgagggggaggagatcacagctgcccctgagcgggagggcaccggccacggcggccccaagctgtgctgcaccctgagcagcctgagcagcgctgctgagaccggccgggaccccctggacagcgaggaggaggccaccggggcccaggatgagcggggcctgaagccacccagccggggccagttccccagcctgagcgccagagatgccagcagcagccaccggggccgggtgtctgggggccccctgggcgctgctgctgccagcgcccactgcacccactgcacagagaccgtgggccgggagcacggggccagccagggccctgtgggccgggagcacggggccagccagggcctggaggagctgtgcccccggggcagctgtgtgtgtggctctgtgaatgcccacaccagggtgacccgggcccctcatggagctgtgctggccccccagcccctgctgctgtcctggagcgtggagtgtggccctggcccctgctgggccgagggcaacagaagccacgtggaggaggtgccccacacccggccccaggccggcctgctgtgcagcgacagccccagcgtgcccaacgtgctgacagccatcctgctgctgctgcgggagctggatgctgagggcctggaggccgtgcagcagacagtgggcagccggctgcaggccctgcggggggaggaggtgcaggagcacgccgagtag

SEQ ID NO: 147661 - DNA, 807 bp, synthetic construct
  misc_feature 1..807: note = Description of Artificial Sequence: Synthetic coding sequence
  source 1..807: mol_type = other DNA
atggctgctgtgcgggtgctggtggccagccggctggccgccgccagcgccttcaccagcctgagccctgggggccgcacccccagccagagagctgccctgcacctgtctgtgcccaggcctgctgcccgggtggccctggtgctgagcggctgcggcgtgtatgatggaacagagatccacgaggccagcgccatcctggtgcacctgagcagaggaggagctgaggtgcagatctttgccccagatgtgccccagatgcacgtgattgaccacaccaagggccagcccagcgagggggagagcagaaatgtgctgacagaaagtgcccgcatcgcccggggcaagatcacagacctggccaacctgtctgctgccaaccatgatgctgccatcttccctgggggctttggagctgccaagaacctgagcacctttgctgtggatggcaaggactgcaaggtgaacaaggaggtggagcgggtgctgaaggagttccaccaggccggcaagcccatcggcctgtgctgcatcgcccctgtgctggccgccaaggtgctgcggggcgtggaggtgacagtgggccacgagcaggaggagggcggcaagtggccctatgccggcacagctgaggccatcaaggccctgggcgccaagcactgtgtgaaggaggtggtggaggcccacgtggaccagaagaacaaggtggtgaccaccccagccttcatgtgtgaaacagccctgcactacatccatgatggcattggagccatggtgaggaaggtgctggagctgaccgggaagtag

SEQ ID NO: 147662 - DNA, 714 bp, synthetic construct
  misc_feature 1..714: note = Description of Artificial Sequence: Synthetic coding sequence
  source 1..714: mol_type = other DNA
atggctgctgtgcgggtgctggtggccagccggctggccgccgccagcgccttcaccagcctgagccctgggggccgcacccccagccagagagctgccctgcacctgtctgtgcccaggcctgctgcccgggtggccctggtgctgagcggctgcggcgtgtatgatggaacagagatccacgaggccagcgccatcctggtgcacctgagcagaggaggagctgaggtgcagatctttgccccagatgtgccccagatgcacgtgattgaccacaccaagggccagcccagcgagggggagagcagaaatgtgctgacagaaagtgcccgcatcgcccggggcaagatcacagacctggccaacctgtctgctgccaaccatgatgctgccatcttccctgggggctttggagctgccaagaacctgctgtgctgcatcgcccctgtgctggccgccaaggtgctgcggggcgtggaggtgacagtgggccacgagcaggaggagggcggcaagtggccctatgccggcacagctgaggccatcaaggccctgggcgccaagcactgtgtgaaggaggtggtggaggcccacgtggaccagaagaacaaggtggtgaccaccccagccttcatgtgtgaaacagccctgcactacatccatgatggcatcggggccatggtgaggaaggtgctggagctgaccgggaagtag

SEQ ID NO: 147663 - DNA, 1023 bp, synthetic construct
  misc_feature 1..1023: note = Description of Artificial Sequence: Synthetic coding sequence
  source 1..1023: mol_type = other DNA
atggccgagggcggggagctgatgagccggctgctgtctgaaaatgctgacctgaagaagcaggtgcggctgctgaaggagaaccagatgctgcggcggctgctgagccagagctgccaggagggcggcggccatgacctgctgcccccccgggcccacgcctacccagaggccggcagccctggcagcggcgtgcctgactttggccgcttcacctctgtggccgacacccccagccagctgcagaccagcagcctggaggacctgctgtgcagccacgcccccctgagcagtgaagatgacaccagccctggctgtgccgcccccagccaggcccccttcaaggccttcctgagccccccagagccccacagccaccggggcacagacaggaagctgagccccctgctgagccccctgcaggacagcctggtggacaagaccctgctggagccccgggagatggtgcggcccaagaaggtgtgcttcagcgagagcagcctgcccaccggggacaggaccaggaggagctactacctgaatgagatccagagctttgctggagctgagaaggatgcccgggtggtgggggagatcgccttccagctggaccggcgcatcctggcctacgtgtttcctggggtgacccggctgtatggcttcaccgtggccaacatccctgagaagattgagcagaccagcaccaagagcctggatggctctgtggatgagaggaagctgcgggagctgacccagcgctacctggccctgagcgcccggctggagaagctgggctacagcagagatgtgcacccagccttcagcgagttcctgatcaacacctacggcatcctgaagcagaggccagacctgcgggccaaccccctgcacagcagccctgctgccctgaggaagctggtgattgatgtggtgccccccaagttcctgggggacagcctgctgctgctgaactgcctgtgtgagctgagcaaggaggatggcaagcccctgtttgcctggtag

SEQ ID NO: 147664 - DNA, 561 bp, synthetic construct
  misc_feature 1..561: note = Description of Artificial Sequence: Synthetic coding sequence
  source 1..561: mol_type = other DNA
atggtgcggcccaagaaggtgtgcttcagcgagagcagcctgcccaccggggacaggaccaggaggagctactacctgaatgagatccagagctttgctggagctgagaaggatgcccgggtggtgggggagatcgccttccagctggaccggcgcatcctggcctacgtgtttcctggggtgacccggctgtatggcttcaccgtggccaacatccctgagaagattgagcagaccagcaccaagagcctggatggctctgtggatgagaggaagctgcgggagctgacccagcgctacctggccctgagcgcccggctggagaagctgggctacagcagagatgtgcacccagccttcagcgagttcctgatcaacacctacggcatcctgaagcagaggccagacctgcgggccaaccccctgcacagcagccctgctgccctgaggaagctggtgattgatgtggtgccccccaagttcctgggggacagcctgctgctgctgaactgcctgtgtgagctgagcaaggaggatggcaagcccctgtttgcctggtag

SEQ ID NO: 147665 - DNA, 438 bp, synthetic construct
  misc_feature 1..438: note = Description of Artificial Sequence: Synthetic coding sequence
  source 1..438: mol_type = other DNA
atggtgcagctgattgcccccctggaggtgatgtggaatgaagctgctgacctgaagcccctggccctgagccggcggctggagtgcagcggcggcatcatggcccactacagcccagacctgctgggccctgagatggagagccgctactttgcccaggtgggcctggagcacctggccagcagcagccccccagccttcggcttcctgaagtgcctggactacagcatctctgtgctgtgcagcgccaccagcctggccatgctggaggacaaccccaaggtgtccaagctggccaccggggactggatgctgaccctgaagcccaagagcatcaccgtgcctgtggagatccccagcagccccctggccggccggcccaggagaagaagaaggctgcgctgcccccatgaccagcacagccagggcacctgctag

SEQ ID NO: 147666 - DNA, 429 bp, synthetic construct
  misc_feature 1..429: note = Description of Artificial Sequence: Synthetic coding sequence
  source 1..429: mol_type = other DNA
atgatcagcacagcccgggtgcctgctgacaagcctgtgagaattgccttcagcctgaatgatgccagtgatgacaccccaccagaagattccatccccctggtgtttcctgagctggaccagcagctgcagcccctgcccccctgccacgacagcgaggagagcatggaggtgttcaagcagcactgccagattgctgaggagtaccacgaggtgaagaaggagatcaccctgctggagcagaggaagaaggagctgattgccaagctggaccaggccgagaaggagaaggtggatgctgctgagctggtgcgggagtttgaggccctgacagaagaaaatagaaccctgcggctggcccagagccagtgtgtggagcagctggagaagctgcgcatccagtaccagaagaggcagggcagcagctag

SEQ ID NO: 147667 - DNA, 729 bp, synthetic construct
  misc_feature 1..729: note = Description of Artificial Sequence: Synthetic coding sequence
  source 1..729: mol_type = other DNA
atggtgcagctgattgcccccctggaggtgatgtggaatgaagctgctgacctgaagcccctggccctgagccggcggctggagtgcagcggcggcatcatggcccactacagcccagacctgctgggccctgagatggagagccgctactttgcccaggtgggcctggagcacctggccagcagcagccccccagccttcggcttcctgaagtgcctggactacagcatctctgtgctgtgcagcgccaccagcctggccatgctggaggacaaccccaaggtgtccaagctggccaccggggactggatgctgaccctgaagcccaagagcatcaccgtgcctgtggagatccccagcagccccctggatgacaccccaccagaagattccatccccctggtgtttcctgagctggaccagcagctgcagcccctgcccccctgccacgacagcgaggagagcatggaggtgttcaagcagcactgccagattgctgaggagtaccacgaggtgaagaaggagatcaccctgctggagcagaggaagaaggagctgattgccaagctggaccaggccgagaaggagaaggtggatgctgctgagctggtgcgggagtttgaggccctgacagaagaaaatagaaccctgcggctggcccagagccagtgtgtggagcagctggagaagctgcgcatccagtaccagaagaggcagggcagcagctag

SEQ ID NO: 147668 - DNA, 429 bp, synthetic construct; identical to SEQ ID NO: 147666
  misc_feature 1..429: note = Description of Artificial Sequence: Synthetic coding sequence
  source 1..429: mol_type = other DNA

SEQ ID NO: 147669 - DNA, 429 bp, synthetic construct; identical to SEQ ID NO: 147666
  misc_feature 1..429: note = Description of Artificial Sequence: Synthetic coding sequence
  source 1..429: mol_type = other DNA

SEQ ID NO: 147670 - DNA, 429 bp, synthetic construct; identical to SEQ ID NO: 147666
  misc_feature 1..429: note = Description of Artificial Sequence: Synthetic coding sequence
  source 1..429: mol_type = other DNA

SEQ ID NO: 147671 - DNA, 429 bp, synthetic construct; identical to SEQ ID NO: 147666
  misc_feature 1..429: note = Description of Artificial Sequence: Synthetic coding sequence
  source 1..429: mol_type = other DNA

SEQ ID NO: 147672 - DNA, 429 bp, synthetic construct; identical to SEQ ID NO: 147666
  misc_feature 1..429: note = Description of Artificial Sequence: Synthetic coding sequence
  source 1..429: mol_type = other DNA

SEQ ID NO: 147673 - DNA, 729 bp, synthetic construct; identical to SEQ ID NO: 147667
  misc_feature 1..729: note = Description of Artificial Sequence: Synthetic coding sequence
  source 1..729: mol_type = other DNA

SEQ ID NO: 147674 - DNA, 135 bp, synthetic construct
  misc_feature 1..135: note = Description of Artificial Sequence: Synthetic coding sequence
  source 1..135: mol_type = other DNA
atggtgcagctgattgcccccctggaggtgatgtggaatgaagctgctgacctgaagcccctggccctgagccggcggctggagtgcagcggcggcatcatggcccactacagcccagacctgctgggcccctag

SEQ ID NO: 147675 - DNA, 285 bp, synthetic construct
  misc_feature 1..285: note = Description of Artificial Sequence: Synthetic coding sequence
  source 1..285: mol_type = other DNA
atgatcagcacagcccgggtgcctgctgacaagcctgtgagaattgccttcagcctgaatgatgccagtgatgacaccccaccagaagattccatccccctggtgtttcctgagctggaccagcagctgcagcccctgcccccctgccacgacagcgaggagagcatggaggtgttcaagcagcactgccagattgctgaggagtaccacgaggtgaagaaggagatcaccctgctggagcagaggaagaaggagctgattgccaagctggaccaggccgagtag

SEQ ID NO: 147676 - DNA, 411 bp, synthetic construct
  misc_feature 1..411: note = Description of Artificial Sequence: Synthetic coding sequence
  source 1..411: mol_type = other DNA
atgctggtgagcagcagcagcctgacccccttcccccctgtgaggacagcagatgacaccccaccagaagattccatccccctggtgtttcctgagctggaccagcagctgcagcccctgcccccctgccacgacagcgaggagagcatggaggtgttcaagcagcactgccagattgctgaggagtaccacgaggtgaagaaggagatcaccctgctggagcagaggaagaaggagctgattgccaagctggaccaggccgagaaggagaaggtggatgctgctgagctggtgcgggagtttgaggccctgacagaagaaaatagaaccctgcggctggcccagagccagtgtgtggagcagctggagaagctgcgcatccagtaccagaagaggcagggcagcagctag

SEQ ID NO: 147677 - DNA, 786 bp, synthetic construct
  misc_feature 1..786: note = Description of Artificial Sequence: Synthetic coding sequence
  source 1..786: mol_type = other DNA
atggtggtggtggccgccgcccccaacccagcagatggcacccccaaggtgctgctgctgagcggccagcctgccagcgctgctggggccccagctggccaggccctgcccctgatggtgcctgcccagagaggagccagccctgaggccgccagcggcggcctgccccaggccaggaagaggcagaggctgacccacctgagccctgaggagaaggccctgcggaggaagctgaagaacagagtggccgcccagacagcccgggacaggaagaaggccaggatgtctgagctggagcagcaggtggtggacctggaggaggagaaccagaagctgctgctggagaaccagctgctgcgggagaagacccacggcctggtggtggagaaccaggagctgcggcagaggctgggcatggatgccctggtggccgaggaggaggccgaggccaagggaaatgaggtgcggcctgtggccggcagcgctgagagcgctgccctgcggctgcgggcccccctgcagcaggtgcaggcccagctgagccccctgcagaacatcagcccctggatcctggccgtgctgaccctgcagatccagagcctcatcagctgctgggccttctggaccacctggacccagagctgcagcagcaatgccctgccccagagcctgcctgcctggaggagcagccagaggagcacccagaaggaccctgtgccctaccagccccccttcctgtgccagtggggccgccaccagcccagctggaagcccctgatgaactag

SEQ ID NO: 147678 - DNA, 528 bp, synthetic construct
  misc_feature 1..528: note = Description of Artificial Sequence: Synthetic coding sequence
  source 1..528: mol_type = other DNA
atgagccgcagctacaatgatgagctgcagttcctggagaagatcaacaagaactgctggaggatcaagaagggctttgtgcccaacatgcaggtggagggcgtcttctacgtgaatgatgccctggagaagctgatgtttgaggagctgagaaatgcctgccggggcggcggcgtgggcggcttcctgcctgccatgaagcagattggaaatgtggccgccctgcccggcatcgtgcacaggagcatcggcctgcctgatgtgcacagcggctacggctttgccatcggcaacatggccgcctttgacatgaatgaccctgaggccgtggtgtccccaggaggagtgggctttgacatcaactgtggggtgcggctgctgcggaccaacctggatgaaagtgatgtgcagcctgtgaaggagcagctggcccaggccatgtttgaccacatccctgtgggcgtgggcagcaagggggacatgatgagagctgtgcactgcccagagcagaacctggatgtgatctag

SEQ ID NO: 147679 - DNA, 2304 bp, synthetic construct
  misc_feature 1..2304: note = Description of Artificial Sequence: Synthetic coding sequence
  source 1..2304: mol_type = other DNA
atgagccatgctgtgaccatcgaggagccccaggcccagccccaggtgtcccagacccgctaccgggagaggagcagagctggcagccacatcagcagcaacagagcctatgacttcctgtatgaccccctcttcatcgtgtcctctgagaaggaccacacccaggccaacatccaggccaccctcatccgcagccggctgaggaaggtgccccgcttcaagaccatgttcagcaacctgatccactacccccgctacagcctgtactggagcaagagtgaccctgtgccccccttcatcagccgggagtggaagggccacaaggagaagcaccgggaggccctgcggcagctgaccaccacagatgccagcttccagatgcccaaggaggtgtatgaagatcctgaggtgacaggcaagaaccgctacaagtactttgagcggcccttcctgcccttcttccagcagatgcccttcaacgtggtgtatgctgtgtccaaggccgagccctacaccttcccccccaccagcaccaagcacctgagcatccccagcaagagcacagtgggcacccagacagactacagagatgctgatgtgcagacagacccctacagcgcagaatatgtggtgtgccaggacagcatccctgagctgctgaccctggccaccctgacctggggccggggcctgcctgctggccaggccgaggtggagatgattgagcgggcccgggagaagagggcctgggaggccagcctgcctgccctgagtgacaccagccagtttgagaagaggaggaagatgatgaatgagatggagaggaaggagtgggccttccgggagcaggagattgagaagctgcaggagatccggctggaggtgctgaaggagctgctgaggaagcgggaggagaaccagaatgaggtgaacatgaagcacctgaatgcccgctggagcaagctgcaggagggcaaggaggccaagatggccaagatccagaggacccacgtgtccaccatcaggaagctggtgggcaagaggaagaacatcgagggcaagctggagaggaggaacatcatcaaggactacagcgactatgccagccaggtgtatggccccctgagccggctgggctgcttcccagacaacaacagtgaagattttgtggtgaagaactactacctgaacacctatgagggcctggtggagctggagagctgcctgcctgactttgtgacccagccccagatccgggcccccaagcccaaggtgatcaccaccaaggccggcttcctgaagagagctgcccggctggactatgagctggccgaggtgcacaaggccctgctggacaagaagaacaaggtgctggaggtgaagaagcccccacgcttcctgcagaggaaccccatcccccagccccggctgcccacccccaccctggagatgaccagcaatgaggaggaggagatggagatggctgtgatctacctgcagaagctgctgcggggccgggtggtgcagaacatgatgtttgagggcaaggagaagaggctggagctgatccaggagctgcggacctgccacgccctgcaggaggatgagaagctggtgaagaaggccgagaagcaggtgaccctggccctgcagaggcagaggaacctgcacgagcacaaggtgtccctggtggagaaccacctggccggcctggagggccgggccctggccgacatgtttgacttcctgagcaaggagctggtgcggctgcaggaggagcggcgcatccacgcctttgtgatgctggccgagcggcagaggagagtgcgggaggccgaggagagcggccggcggcaggtggagaagcagaggctgcgggaggaggatgagatcttcaaggaggtggtgaaggtgcaccacagcaccatcagcagctacctggaggacatcatcctgaacacagaggccaacacagctgaggagcaggcccgggcagaaattgagaagatggccgagaagatcaatgacatcgcctatgagatggagagcaggaggacctacctgcagagcgaggagatcgtggccgagctggtgtacagcttcctgatccctgaggtgcagaagtactttgtgaaggagaaggtgagaaatgcccagaggaagcacatcctggccgcccaccagatcatccacagctacacagagagcatggtgcagaagaagctgacagaaggagagcaggatgaggccagcaatgctgccatgctgctggagaaggagacccagaatgaaaacaacagctag

SEQ ID NO: 147680 - DNA, 564 bp, synthetic construct
  misc_feature 1..564: note = Description of Artificial Sequence: Synthetic coding sequence
  source 1..564: mol_type = other DNA
atgagccatgctgtgaccatcgaggagccccaggcccagccccaggtgtcccagacccgctaccgggagaggagcagagctggcagccacatcagcagcaacagagcctatgacttcctgtatgaccccctcttcatcgtgtcctctgagaaggaccacacccaggccaacatccaggccaccctcatccgcagccggctgaggaaggtgccccgcttcaagaccatgttcagcaacctgatccactacccccgctacagcctgtactggagcaagagtgaccctgtgccccccttcatcagccgggagtggaagggccacaaggagaagcaccgggaggccctgcggcagctgaccaccacagatgccagcttccagatgcccaaggaggtgtatgaagatcctgaggtgacaggcaagaaccgctacaagggccagaaccacaccctcttcctgctgctgctgctgagcacctaccccagcctgcagagcctgctgtgggccctgcggctcatcatcggcatgctgaccttcaagcagatccacaccctgcagaacatgtag

SEQ ID NO: 147681 - DNA, 717 bp, synthetic construct
  misc_feature 1..717: note = Description of Artificial Sequence: Synthetic coding sequence
  source 1..717: mol_type = other DNA
atgagccatgctgtgaccatcgaggagccccaggcccagccccaggtgtcccagacccgctaccgggagaggagcagagctggcagccacatcagcagcaacagagcctatgacttcctgtatgaccccctcttcatcgtgtcctctgagaaggaccacacccaggccaacatccaggccaccctcatccgcagccggctgaggaaggtgccccgcttcaagaccatgttcagcaacctgatccactacccccgctacagcctgtactggagcaagagtgaccctgtgccccccttcatcagccgggagtggaagggccacaaggagaagcaccgggaggccctgcggcagctgaccaccacagatgccagcttccagatgcccaaggaggtgtatgaagatcctgaggtgacaggcaagaaccgctacaagtactttgagcggcccttcctgcccttcttccagcagatgcccttcaacgtggtgtatgctgtgtccaaggccgagccctacaccttcccccccaccagcaccaagcacctgagcatccccagcaagagcacagtgggcacccagacagactacagagatgctgatgtgcagacagacccctacagcgcagaatatgtggtgtgccaggacagcatccctgagctgctgaccctggccaccctgacctggggcgagctggtgaacctgctgaccatcggccgctag

SEQ ID NO: 147682 - DNA, 654 bp, synthetic construct
  misc_feature 1..654: note = Description of Artificial Sequence: Synthetic coding sequence
  source 1..654: mol_type = other DNA
atggacctggcccagcccagccagcctgtggatgagctggagctgtctgtgctggagcggcagcctgaggagaacacccccctgaatggagctgacaaggtgttccccagcctggatgaggaggtgcccccagctgaggccaacaaggagagcccctggagcagctgcaacaagaatgtggtgggccgctgcaagctgtggatgatcatcaccagcatcttcctgggcgtcatcaccgtcatcatcatcggcctgtgcctggccgctgtgacctacgtggatgaagatgaaaatgagatcctggagctgagcagcaacaagaccttcttcatcatgctgaagatccctgaggagtgtgtggccgaggaggagctgccccacctgctgacagagcggctgacagatgtgtacagcaccagccccagcctgggccgctacttcacctctgtggagatcgtggacttcagcggggagaatgccaccgtgacctatgacctgcagtttggagtgcccagtgatgatgagaacttcatgaagtacatgatgtctgaggagctggtgctgggcatcctgctgcaggacttccgggaccagaacatccctggctgtgagagcctgggcctggaccccaccagcctgctgctgtatgaatag

SEQ ID NO: 147683 - DNA, 444 bp, synthetic construct
  misc_feature 1..444: note = Description of Artificial Sequence: Synthetic coding sequence
  source 1..444: mol_type = other DNA
atggacctggcccagcccagccagcctgtggatgagctggagctgtctgtgctggagcggcagcctgaggagaacacccccctgaatggagctgacaaggtgttccccagcctggatgaggaggtgcccccagctgaggccaacaaggagagcccctggagcagctgcaacaagaatgtggtgggccgctgcaagctgtggatgatcatcaccagcatcttcctgggcgtcatcaccgtcatcatcatcggcctgtgcctggccgctgtgacctacgtggatgaagatgaaaatgagatcctggagctgagcagcaacaagaccttcttcatcatgctgaagatccctgaggagtgtgtggccgaggaggagctgccccacctgctgacagagcgggaggtgggcctgaagcccaaccctgaggccctggtgggctttgaatag

SEQ ID NO: 147684 - DNA, 753 bp, synthetic construct
  misc_feature 1..753: note = Description of Artificial Sequence: Synthetic coding sequence
  source 1..753: mol_type = other DNA
atggacctggcccagcccagccagcctgtggatgagctggagctgtctgtgctggagcggcagcctgaggagaacacccccctgaatggagctgacaaggtgttccccagcctggatgaggaggtgcccccagctgaggccaacaaggagagcccctggagcagctgcaacaagaatgtggtgggccgctgcaagctgtggatgatcatcaccagcatcttcctgggcgtcatcaccgtcatcatcatcggcctgtgcctggccgctgtgacctacgtggatgaagatgaaaatgagatcctggagctgagcagcaacaagaccttcttcatcatgctgaagatccctgaggagtgtgtggccgaggaggagctgccccacctgctgacagaaagaaatgaggtgatggaggccggcctgtgcctgaaggctgtgctgtaccaggtgctggagatgaagggcatccacagcgtgctgcagaagcgcttctgtggcctcatccagaagcaccagcagcaccagaggggcggggacagcttcctgagccgcttctacagcctggccctgagccctgtgaagcagctgcccagcacagccagcgctggcagcagcctggacaagggcaggaagccagcccgggtgggcgccatcggcagcgctggcatgagccactgctggaggagcctggtgttctgcctcttcctgttctgctttgtgctcttctttgagaccggcagccgctctgtggcctag

SEQ ID NO: 147685 - DNA, 1293 bp, synthetic construct
  misc_feature 1..1293: note = Description of Artificial Sequence: Synthetic coding sequence
  source 1..1293: mol_type = other DNA
atgtggaggctggtgccccccaagctgggccgcctgagccgcagcctgaagctggccgccctgggcagcctgctggtgctgatggtgctgcacagccccagcctgctggcctcctggcagagaaatgagctgacagaccggcgcttcctgcagctgaacaagtgcccagcctgcttcggcacctcctggtgccgccgcttcctgaatggccaggtggtgtttgaggcctggggccgcctgcggctgctggacttcctgaatgtgaagaatgtgtactttgcccagtacggggagccccgggagggcggcagaagaagagtggtgctgaagaggctgggcagccagcgggagctggcccagctggaccagagcatctgcaagagggccaccggccggccccgctgtgacctgctgcaggccatgcccaggacagaatttgcccggctgaatggagatgtgcggctgctgaccccagaggccgtggagggctggagcgacctggtgcactgccccagccagaggctgctggaccggctggtgagaagatatgcagagaccaaggacagcggcagcttcctgctgaggaacctgaaggacagcgagaggatgcagctgctgctgaccctggccttcaaccctgagcccctggtgctgcagagcttccccagtgatgagggctggccctttgccaagtacctgggcgcctgtggccgcatggtggccgtgaactacgtgggggaggagctgtggagctacttcaatgccccctgggagaagagggtggacctggcctggcagctgatggagattgctgagcagctgaccaacaatgactttgaatttgccctgtacctgctggatgtgtcctttgacaactttgctgtgggccccagagatggcaaggtgatcatcgtggatgctgaaaatgtgctggtggccgacaagaggctcatccggcagaacaagccagagaactgggatgtgtggtatgagagcaagtttgatgactgtgacaaggaggcctgcctgtccttcagcaaggagatcctgtgtgcccgggccaccgtggaccacaactactatgctgtgtgccagaacctgctgagcagacatgccacctggaggggcaccagcggcggcctgctgcatgaccccccatctgaaattgccaaggatggccgcctggaggccctgctggatgaatgtgccaaccccaagaagagatatggccgcttccaggccgccaaggagctgcgggagtacctggcccagctgagcaacaacgtgaggtag

SEQ ID NO: 147686 - DNA, 666 bp, synthetic construct
  misc_feature 1..666: note = Description of Artificial Sequence: Synthetic coding sequence
  source 1..666: mol_type = other DNA
atgaagtcagaaaatggaacagtggtgggcagcttccccagtgatgagggctggccctttgccaagtacctgggcgcctgtggccgcatggtggccgtgaactacgtgggggaggagctgtggagctacttcaatgccccctgggagaagagggtggacctggcctggcagctgatggagattgctgagcagctgaccaacaatgactttgaatttgccctgtacctgctggatgtgtcctttgacaactttgctgtgggccccagagatggcaaggtgatcatcgtggatgctgaaaatgtgctggtggccgacaagaggctcatccggcagaacaagccagagaactgggatgtgtggtatgagagcaagtttgatgactgtgacaaggaggcctgcctgtccttcagcaaggagatcctgtgtgcccgggccaccgtggaccacaactactatgctgtgtgccagaacctgctgagcagacatgccacctggaggggcaccagcggcggcctgctgcatgacccccccagcgagatcgccaaggatggccgcctggaggccctgctggatgaatgtgccaaccccaagaagagatatggccgcttccaggccgccaaggagctgcgggagtacctggcccagctgagcaacaacgtgaggtag

SEQ ID NO: 147687 - DNA, 5079 bp, synthetic construct
  misc_feature 1..5079: note = Description of Artificial Sequence: Synthetic coding sequence
  source 1..5079: mol_type = other DNA
atgaggcggcccccacccctgggccccaccacagccagcggccctgagggcaatgtgaggaacctgcagaagaggcaggcccctggccctggagctgctgggggctgcggccctgaggccggcggctgccgggagaacaagcagaagaggaggatggtggcccgggccaccccaggccgcggggaggtggagagtgacaagtctgtggccgccagcggggccggcaaggccgcccggcggcaggtggagggcagaagaggccctgtgagccccagcgacagcagtgacccccggggcctggaggccgccaaggaggccgagctgcccctgcagacagagcggcacaccaaggagaagaggaaggtgacagaggccagcagtgatgacccccagcccggcctggacctggtgaggaaggagagcctgaccagcagcgagagcttccagacagtggagtgcctgcagagcctgggcaaggagagcatcatcgagggcatcaagaggcgcatccggaacaagaagctgaagagcctggagaacccccccctgaagatcacagaaaatgaggccacccagaacatcaaggtggagttccaggatgagctgtacaagaacacccccaagtacagctgcaacatcctgagccctgaggtggagaacaacagcgtgctgaagctgcgggactgcaactgcttcccccacagcaagggctgcaatgatgagaacaacctgccctacaagccagatggcggctgcatgcacgtggccgagaacttcagcaagaaggagaacctgcggagcctggccgagaagagtgacaccaacagcatcccccagctgctgcagacagaagaaaatgtgatgggcgtgaacaagctgctgcctgaggagagtgacctgtaccagagcaagaccaacggcctgctgagctgcctgcagcacgagaagaacaagtacagcattgaggagagctctgtgggcaggaagcccaggaagaggatgaagctgtctgagaaggcagatgaaacagtgacagagatgaacttcagcaatgagtacaacaagtctgagctgatgctgcaggagaaccagatgattgctgatggcaaggaggccgagaccaagagccccctgaatgtgctgaggaaggtgagccacaacacagtgtccctgatggaccacctgctgtctgtgcctgagaccgtggagaaggagaccagcagcgagcaccacgtgaatgctgtgttccagaagaccatcgagcccctgctgaaggaggagacagaaaatgccagcgagcccctgggctatgaatccatggccagcaaggaggacttcaagtccatgaagagcttcatcggcaagagccccaatgagtaccacatcgagcggcgcagcagccgggaggacctgcggagcgccagcgaggagctgaagctgagctgccagaggaccatccccatgaccgggaagaggacctggccctactacagctgtgcccgcatcagcgcctggtgctggaagaaggccagcctgcctgagagcagctacttcctgcggggcagccaggagagctgccggcaggtggatgtgcccaagcaccagaccaaccagacccacctgacagacagcaagctgctgctgcagagcagcctgacagagaccaacacagagagcagcagcaaggagaagctggacagcaacagcaactgcctgagctctgtgtctgctgtggagcccaccctgatggtgatcaaggagcccatcatcaaggatgacaagaagatcaagtctgaggagctgagcagaagaggcagcgaggtgatcagcaacaccacagaggacacccagctgaccagcgagacccagagcctgaccggcaacaagaagaaggcccggggcaacctgaccaagctgaacctgacagccaccagcaaggatggccaggaggccaacaacagcgctgggaagaccatccacaggaaggcctgcatcgcccagcagaccttcatcgtgcctgacctggtgaagatcctgaacacaggccgcctgaccaacttcaagatccccctgctgaagaacaagtctgagaagaggaaggaggtgaatgccaagagcagcgagcgggaggcctacagccccctggagctgctggacaacctgagcggggctgatgtgcggcagaacagaagcaaagaaaatgtgtccatgatgatgctgggcccccagaccctgagcatccggaacagcgtgacccctgtgcaggccagcagtgacagcttctacaacaagaagagctacagcatcagccccagcttcaccaagcagggcaacaacagcaagcccagcaaccacgtgtctgagcccggcaacatcgtgagcaacaaggaggtggccagcctgactgtggagaacaatgccttcagctgtgaccccggctacgtggagaagagccccagcttctgctgcaatgagcaggagaccttccggcctgtgagcagcgaggtgcggggcaggaagatcaccaagaacttcagcgaggtgggcttcccagacatcctgaaggcctatgaagatgatgtgctgctgattgatgtgatccaggatgatcctgacctgtttggagtgtccaatgaaggagagctgtccttcaccagcgaggtgcccaagatcagccaggagcccaacgtggccggggagcaccagagcacagacagcaagtacatggagacccctgtgaagaaggagcccagtgatgacctgcgggagctgcctgtgctggactgtggctggatcaagccagacatctgtgccagcaacagcgctgagagcgagatcaagagggaccccaaggatgtgaacaccagcctgggggaggtggccaatgagaccagtgaaaatgagaccctgggggacttcagcgagcagatcaagggcagtgacctggatgagaagcaccgcttcacagacaaggtgatcaccaaggaggagaaggagaacatctatgaggtgtgcaagagcaaggacagcagaaatgctgacttcatggtgggggagtgccagtttgctgtgcctgtgcccaagcccctgtgcctgctggtgccccccctgaacctgagcggccggcaggaggacaccatcctgaacacctggatgaatgacttccgcttcctgggcaagcacagcgtgctgaagctgcagaaccctgagacctgtgagatcttcaagcgggagaagaatgtgggcgtcttccagaagagcctgggcctgatgatcccctacaagtactgcaagttccacttcaacaccctgcggggctgtgagcggcccctgtgcaagtttgcccacgtgcctgagcagggagatgagaaggtgtgcatggatgtgttcaagaagtacatcaacatcaatgagctgtgcctgctgcagagagctgtgaacatcttcatggagtactacaggaagtttcctcctggggtgtactttgacctgcaggtgctgaatgacctgctgaacagcctgctgaagcactgcctgctgaaggaggtgttccagatcgtgaacctgagcatcatggtgaagatgctgcccagcctgaagatcctgctgaacatctttgaatatgtggccaccatgaagctgagaaatgctgtgcctgccctgattgacatcttctgcaagctggtggaggccggcatggtgctggaccctgagcacttcaactacatcgtgaagctgctgtaccaggtgcaggccagcaagcaggagatcacagctgtgctggagatgaagagccggctgcagatgaggcgcttcaagaagaactggaagtgtgacctggacagcgccctgaacaagctggagcactgcaaggagaagggggactggaccaagctgggcaagctgtacatcaacgtgaagatgggctgtgagaagtttgctgacttccagaccttctgtgcctgcatcgccgagaccctgaccaagaactatgaagatgagaggccagacatccccttctgtgaatttgctgagaccgtgtccaaggacccccagaacagcaaggtggacaagggcgtgctgggccgcatcggcatcagcgccatgtacttctaccacaagctgctgcagtggagcaagggcaggaaggtgctggagaagctgtatgagctgaagatccacttcaccagcctgaagggcctcatcggccctgagaagctggccagccgctgccagatcgtgaatgtggccgctgagatcttcctgaagagcggcagcctggatggagccatctgggtgatgagggagagcgagtggatcatcaacacccccctgtggccctgtgaccggctggatgtgctgaacagacacaacctgctgtgcaccatcgcccacgagatcctggccaagagcctgtaccggcagacctttgaggtgctgcagaacctgcccggcttccagaacagccaggagaccgtggaggtgtcccagtacagcctgctcttcaacaagctgctgggcagctgcatcgagagcagcagcctgggcatgagcagctctgtggccgagttcatgatcagcaagagcatccccatcgacttctccttcctgcggcggctcatcaccagcctgggccgcagccggctgtggctgaaggcccgggcccactacaagagcgccctgagcctgggctgctacccacccctggagggcaacctgtacaggaagctgctgctgatccccagctacctgtctgaaattgagatgctgctggccatcgagatcttcatggtgtccaatgccagcagcatccagagccctggcaccagcacccagatcctgcagatcgtgctgaagagatgtgaggacaaccagagccgcagcaatgatgactaccaggccgctgtggagcggctcatcatggccgcccgcatcagtgaccccaagctgtttgtgaagcacatgacagtgaatgtgaacaaggagcaggtgtacagcctggagcactgcagcgccctgaagtggctgaaggagaacatgaagtgggccggcaaggtgtggctgttcagcaaccactag

SEQ ID NO: 147688 - DNA, 207 bp, synthetic construct
  misc_feature 1..207: note = Description of Artificial Sequence: Synthetic coding sequence
  source 1..207: mol_type = other DNA
atggtgtactacccagagctgtttgtgtgggtgtcccaggagcccttccccaacaaggacatggagggccgcctgcccaagggccgcctgcctgtgcccaaggaggtgaacaggaagaagaatgatgagaccaatgctgccagcctgacccccctgggcagcagcgagctgcggagcccccgcatctcctacctgcacttcttctag

SEQ ID NO: 147689 - DNA, 207 bp, synthetic construct; identical to SEQ ID NO: 147688
  misc_feature 1..207: note = Description of Artificial Sequence: Synthetic coding sequence
  source 1..207: mol_type = other DNA

SEQ ID NO: 147690 - DNA, 339 bp, synthetic construct
  misc_feature 1..339: note = Description of Artificial Sequence: Synthetic coding sequence
  source 1..339: mol_type = other DNA
atgaagggcgtgtggaactacagcgccctgagccggcgggaggatgagaccaggacccagaggagcaggatgacagacagagtgccctgcagcaagtgcttccaggtgcactgccagatctctgtgctgaactgtgtgtactacccagagctgtttgtgtgggtgtcccaggagcccttccccaacaaggacatggagggccgcctgcccaagggccgcctgcctgtgcccaaggaggtgaacaggaagaagaatgatgagaccaatgctgccagcctgacccccctgggcagcagcgagctgcggagcccccgcatctcctacctgcacttcttctag

SEQ ID NO: 147691 - DNA, 207 bp, synthetic construct; identical to SEQ ID NO: 147688
  misc_feature 1..207: note = Description of Artificial Sequence: Synthetic coding sequence
  source 1..207: mol_type = other DNA

SEQ ID NO: 147692 - DNA, 207 bp, synthetic construct; identical to SEQ ID NO: 147688
  misc_feature 1..207: note = Description of Artificial Sequence: Synthetic coding sequence
  source 1..207: mol_type = other DNA

SEQ ID NO: 147693 - DNA, 207 bp, synthetic construct; identical to SEQ ID NO: 147688
  misc_feature 1..207: note = Description of Artificial Sequence: Synthetic coding sequence
  source 1..207: mol_type = other DNA

SEQ ID NO: 147694 - DNA, 207 bp, synthetic construct; identical to SEQ ID NO: 147688
  misc_feature 1..207: note = Description of Artificial Sequence: Synthetic coding sequence
  source 1..207: mol_type = other DNA

SEQ ID NO: 147695 - DNA, 207 bp, synthetic construct; identical to SEQ ID NO: 147688
  misc_feature 1..207: note = Description of Artificial Sequence: Synthetic coding sequence
  source 1..207: mol_type = other DNA

SEQ ID NO: 147696 - DNA, 207 bp, synthetic construct; identical to SEQ ID NO: 147688
  misc_feature 1..207: note = Description of Artificial Sequence: Synthetic coding sequence
  source 1..207: mol_type = other DNA

SEQ ID NO: 147697 - DNA, 18 bp, synthetic construct
  misc_feature 1..18: note = Description of Artificial Sequence: Synthetic coding sequence
  source 1..18: mol_type = other DNA
atggtgtactacccctag

SEQ ID NO: 147698 - DNA, 102 bp, synthetic construct
  misc_feature 1..102: note = Description of Artificial Sequence: Synthetic coding sequence
  source 1..102: mol_type = other DNA
atggtgtactacccagagctgtttgtgtgggtgtcccaggagcccttccccaacaaggacatggagggccgcctgcccaagggccgcctgcctgtgccctag

SEQ ID NO: 147699 - DNA, 207 bp, synthetic construct; identical to SEQ ID NO: 147688
  misc_feature 1..207: note = Description of Artificial Sequence: Synthetic coding sequence
  source 1..207: mol_type = other DNA

SEQ ID NO: 147700 - DNA, 207 bp, synthetic construct; identical to SEQ ID NO: 147688
  misc_feature 1..207: note = Description of Artificial Sequence: Synthetic coding sequence
  source 1..207: mol_type = other DNA

SEQ ID NO: 147701 - DNA, 198 bp, synthetic construct
  misc_feature 1..198: note = Description of Artificial Sequence: Synthetic coding sequence
  source 1..198: mol_type = other DNA
atggtgtactacccagagctgtttgtgtgggtgtcccaggagcccttccccaacaaggacatggagggccgcctgcccaagggccgcctgcctgtgcccaaggaggtgaacaggaagaagaatgatgagaccaatgctgccagcctgacccccctgggcagcagcgagctgcggagcccccgcatctcctacctgtag

SEQ ID NO: 147702 - DNA, 735 bp, synthetic construct
  misc_feature 1..735: note = Description of Artificial Sequence: Synthetic coding sequence
  source 1..735: mol_type = other DNA
atgcactatggagctgccacccacatccagaacagccgcagccacggcctggagaccgtgcccggccaccagaggctggagcggggggccggcggggagaccccagagttccctggctgccacagccctgcccccccagaaaattttggaaatgagctgctgcccctgagcgcccccctgcagggcctgtctgagggcctgtacccacctggcaggaacaagaccctgcctgctggggtgctgcgggagggcgctgtgcagttcctgcaccggggcctgtgcaacagcaacctgagcagcgaggccagcgcccggcccagcggcacccaggatgagctgcacagcagcaggaggaagacaggccagacccggcgggagggcgccaggaagcacctggtgtgcagcttccggctgtaccccttcaccgtgcacacagtgtccccaggcaacagccacctggccctgtaccaggtgttcaaggctgtgaagctgtgccccagcgagaccagcttcttcctgagcaggaagagcctgaagagcagtgacccctggcacccccccagcctgagccccaacagctggaaccggcaggccggcttccgggcctggagcagccacctgatcagcctgagcctgacctgcagcgacagccagagccggcgggtgagcagcagccagcagccccccctgcacagcctgagcagccacagaagagctgcccacgtgcctgagtag

SEQ ID NO: 147703 - DNA, 480 bp, synthetic construct
  misc_feature 1..480: note = Description of Artificial Sequence: Synthetic coding sequence
  source 1..480: mol_type = other DNA
atgtacagaaggaagagcggctggacaggctgtgccatcacctgcagcccctgcacagccatgacccagctgaggaactgcatgaggctgagccgcagctgcagcctgacctgggagaccccccgctggtacatggccggccgggtggccaccagcaccagcggctgccactgctggatgagccggcgggacctgacccccctgccccaccccagcgagcccggggtgctggactgcctgggcccctgccacctgctgcccctgctgagccctggcagcccctgctgggtgctgggcctgcacttcagcctgcacccccccagcgctgccagcgccagccacgccctgaccatcaccagcctgcccccaggcctgctgccctttgtgggcgtggagctgacagcccacccccaggccctgatgggccggggcttccccagcggcatgggcgccgccggccgccacctgtgcttcctgtag

SEQ ID NO: 147704 - DNA, 480 bp, synthetic construct; identical to SEQ ID NO: 147703
  misc_feature 1..480: note = Description of Artificial Sequence: Synthetic coding sequence
  source 1..480: mol_type = other DNA

SEQ ID NO: 147705 - DNA, 480 bp, synthetic construct; identical to SEQ ID NO: 147703
  misc_feature 1..480: note = Description of Artificial Sequence: Synthetic coding sequence
  source 1..480: mol_type = other DNA

SEQ ID NO: 147706 - DNA, 480 bp, synthetic construct; identical to SEQ ID NO: 147703
  misc_feature 1..480: note = Description of Artificial Sequence: Synthetic coding sequence
  source 1..480: mol_type = other DNA

SEQ ID NO: 147707 - DNA, 294 bp, synthetic construct
  misc_feature 1..294: note = Description of Artificial Sequence: Synthetic coding sequence
  source 1..294: mol_type = other DNA
atgagcagcgcccctgagccccccaccttcaagaaggagccccccaaggagaaggagttccagagccctggcctgcggggcgtgaggaccaccaccctcttccgggctgtgaaccctgagctgttcatcaagcccaacaagcctgtgatggccttcggcctggtgaccctgagcctgtgtgtggcctacatcggctacctgcacgccatccaggagaacaagaaggacctgtatgaggccattgattctgagggccacagctacatgaggaggaagaccagcaagtgggactag

SEQ ID NO: 147708 - DNA, 768 bp, synthetic construct
  misc_feature 1..768: note = Description of Artificial Sequence: Synthetic coding sequence
  source 1..768: mol_type = other DNA
atgaccaagaccagcacctgcatctaccacttcctggtgctgtcctggtacaccttcctgaactactacatcagccaggagggcaaggatgaggtgaagcccaagatcctggccaatggagcccgctggaagtacatgaccctgctgaacctgctgctgcagaccatcttctacggcgtgacctgcctggatgatgtgctgaagaggaccaagggcggcaaggacatcaagttcctgacagccttccgggacctgctcttcaccaccctggccttccctgtgtccacctttgtgttcctggccttctggatcctcttcctgtacaacagagacctgatctaccccaaggtgctggacaccgtcatccctgtgtggctgaaccacgccatgcacaccttcatcttccccatcaccctggccgaggtggtgctgcggccccacagctaccccagcaagaagacaggcctgaccctgctggccgccgccagcatcgcctacatcagccgcatcctgtggctgtactttgaaacaggcacctgggtgtaccctgtgtttgccaagctgagcctgctgggcctggccgccttcttcagcctgtcctatgtgttcatcgccagcatctacctgctgggggagaagctgaaccactggaagtgggtgtctgtgcagatcctgcagcgctggaggctggagagcgtgggcatctgcttccagtggccagactggaagagccctgccaagcaccagctggtgaagaacatcagatag

SEQ ID NO: 147709 - DNA, 510 bp, synthetic construct
  misc_feature 1..510: note = Description of Artificial Sequence: Synthetic coding sequence
  source 1..510: mol_type = other DNA
atgaccaagaccagcacctgcatctaccacttcctggtgctgtcctggtacaccttcctgaactactacatcagccaggagggcaaggatgaggtgaagcccaagatcctggccaatggagcccgctggaagtacatgaccctgctgaacctgctgctgcagaccatcttctacggcgtgacctgcctggatgatgtgctgaagaggaccaagggcggcaaggacatcaagttcctgacagccttccgggacctgctcttcaccaccctggccttccctgtgtccacctttgtgttcctggccttctggatcctcttcctgtacaacagagacctgatctaccccaaggtgctggacaccgtcatccctgtgtggctgaaccacgccatgcacaccttcatcttccccatcaccctggccgaggtggtgctgcggccccacagctaccccagcaagaagacaggcctgaccctgctggccgccgccagcatcgcctacatcagcaggtag

SEQ ID NO: 147710 - DNA, 693 bp, synthetic construct
  misc_feature 1..693: note = Description of Artificial Sequence: Synthetic coding sequence
  source 1..693: mol_type = other DNA
atgaccaagaccagcacctgcatctaccacttcctggtgctgtcctggtacaccttcctgaactactacatcagccaggagggcaaggatgaggtgaagcccaagatcctggccaatggagcccgctggaagtacatgaccctgctgaacctgctgctgcagaccatcttctacggcgtgacctgcctggatgatgtgctgaagaggaccaagggcggcaaggacatcaagttcctgacagccttccgggacctgctcttcaccaccctggccttccctgtgtccacctttgtgttcctggccttctggatcctcttcctgtacaacagagacctgatctaccccaaggtgctggacaccgtcatccctgtgtggctgaaccacgccatgcacaccttcatcttccccatcaccctggccgaggtggtgctgcggccccacagctaccccagcaagaagacaggcctgaccctgctggccgccgccagcatcgcctacatcagccgcatcctgtggctgtactttgaaacaggcacctgggtgtaccctgtgtttgccaagctgagcctgctgggcctggccgccttcttcagcctgtcctatgtgttcatcgccagcatctacctgctgggggagaagctgaaccactggaagtggggagacatgaggcagcccaggaagaagaggaagtag

SEQ ID NO: 147711 - DNA, 507 bp, synthetic construct
  misc_feature 1..507: note = Description of Artificial Sequence: Synthetic coding sequence
  source 1..507: mol_type = other DNA
atgaccaagaccagcacctgcatctaccacttcctggtgctgtcctggtacaccttcctgaactactacatcagccaggagggcaaggatgaggtgaagcccaagatcctggccaatggagcccgctggaagtacatgaccctgctgaacctgctgctgcagaccatcttctacggcgtgacctgcctggatgatgtgctgaagaggaccaagggcggcaaggacatcaagttcctgacagccttccgggacctgctcttcaccaccctggccttccctgtgtccacctttgtgttcctggccttctggatcctcttcctgtacaacagagacctgatctaccccaaggtgctggacaccgtcatccctgtgtggctgaaccacgccatgcacaccttcatcttccccatcaccctggccgaggtggtgctgcggccccacagctaccccagcaagaagacaggcctgaccctgctggccgccgccagcatcgcctacatctcctag

SEQ ID NO: 147712 - DNA, 675 bp, synthetic construct
  misc_feature 1..675: note = Description of Artificial Sequence: Synthetic coding sequence
  source 1..675: mol_type = other DNA
atgagctttgtggaggatgtgaccatcggggagggggagagcatccccccagacacccagtttgtgaagacctggaggatccagaacagcggggctgaggcctggcccccaggagtgtgcctgaagtatgtgggcggggaccagtttggacatgtgaacatggtgatggtgcgcagcctggagccccaggagattgctgatgtgtctgtgcagatgtgcagccccagccgggccggcatgtaccagggccagtggaggatgtgcacagccaccggcctgtactatggagatgtgatctgggtgatcctgtctgtggaggtgggcggcctgctgggcgtgacccagcagctgagcagctttgaaacagagttcaacacccagccccacaggaaggtggagggcaacttcaacccctttgccagcccccagaagaaccggcagagtgatgagaacaacctgaaggaccccggcggcagcgagtttgacagcatcagcaagaacacctgggccccagccccagacacctgggccccagccccagaccagacagagcaggaccagaaccggctgagccagaacagcgtgaacctgagccccagcagccacgccaacaacctgtctgtggtgacctacagcaagggcctgcacggcccctaccccttcggccagagctag

SEQ ID NO: 147713 - DNA, 897 bp, synthetic construct
  misc_feature 1..897: note = Description of Artificial Sequence: Synthetic coding sequence
  source 1..897: mol_type = other DNA
atggagggcatggatgtggacctggaccctgagctgatgcagaagttcagctgcctgggcaccacagacaaggatgtgctgatcagcgagttccagaggctgctgggcttccagctgaacccagctggctgtgccttcttcctggacatgaccaactggaacctgcaggccgccatcggggcctactatgactttgagagccccaacatctctgtgcccagcatgagctttgtggaggatgtgaccatcggggagggggagagcatccccccagacacccagtttgtgaagacctggaggatccagaacagcggggctgaggcctggcccccaggagtgtgcctgaagtatgtgggcggggaccagtttggacatgtgaacatggtgatggtgcgcagcctggagccccaggagattgctgatgtgtctgtgcagatgtgcagccccagccgggccggcatgtaccagggccagtggaggatgtgcacagccaccggcctgtactatggagatgtgatctgggtgatcctgtctgtggaggtgggcggcctgctgggcgtgacccagcagctgagcagctttgaaacagagttcaacacccagccccacaggaaggtggagggcaacttcaacccctttgccagcccccagaagaaccggcagagtgatgagaacaacctgaaggaccccggcggcagcgagtttgacagcatcagcaagaacacctgggccccagccccagacacctgggccccagccccagaccagacagagcaggaccagaaccggctgagccagaacagcgtgaacctgagccccagcagccacgccaacaacctgtctgtggtgacctacagcaagggcctgcacggcccctaccccttcggccagagctag

SEQ ID NO: 147714 - DNA, 699 bp, synthetic construct
  misc_feature 1..699: note = Description of Artificial Sequence: Synthetic coding sequence
  source 1..699: mol_type = other DNA
atggagggcatggatgtggacctggaccctgagctgatgcagaagttcagctgcctgggcaccacagacaaggatgtgctgatcagcgagttccagaggctgctgggcttccagctgaacccagctggctgtgccttcttcctggacatgaccaactggaacctgcaggccgccatcggggcctactatgactttgagagccccaacatctctgtgcccagcatgagctttgtggaggatgtgaccatcggggagggggagagcatccccccagacacccagtttgtgaagacctggaggatccagaacagtgatgtgatctgggtgatcctgtctgtggaggtgggcggcctgctgggcgtgacccagcagctgagcagctttgaaacagagttcaacacccagccccacaggaaggtggagggcaacttcaacccctttgccagcccccagaagaaccggcagagtgatgagaacaacctgaaggaccccggcggcagcgagtttgacagcatcagcaagaacacctgggccccagccccagacacctgggccccagccccagaccagacagagcaggaccagaaccggctgagccagaacagcgtgaacctgagccccagcagccacgccaacaacctgtctgtggtgacctacagcaagggcctgcacggcccctaccccttcggccagagctag

SEQ ID NO: 147715 - DNA, 126 bp, synthetic construct
  misc_feature 1..126: note = Description of Artificial Sequence: Synthetic coding sequence
  source 1..126: mol_type = other DNA
atgggagacatctacatcacctggattggctgcggcctggaccggctgcagtgggagaatgtgtctgccatgattgaggaggtgtttgaggccacagacatcaagatcaccgtgtacaccctgtag

SEQ ID NO: 147716 - DNA, 459 bp, synthetic construct
  misc_feature 1..459: note = Description of Artificial Sequence: Synthetic coding sequence
  source 1..459: mol_type = other DNA
atggccagcagcctgaatgaagatcctgagggcagccgcatcacctacgtgaagggggacctgtttgcctgccccaagacagacagcctggcccactgcatcagcgaggactgcaggatgggcgccggcattgctgtgctcttcaagaagaagtttggaggagtgcaggagctgctgaaccagcagaagaagtctggagaggtggccgtgctgaagagagatggccgctacatctactacctgatcaccaagaagagggccagccacaagcccacctatgagaacctgcagaagagcctggaggccatgaagagccactgcctgaagaatggagtgacagacctgtccatgccccgcatcggctgcggcctggaccggctgcagtgggagaatgtgtctgccatgattgaggaggtgtttgaggccacagacatcaagatcaccgtgtacaccctgtag

SEQ ID NO: 147717 - DNA, 459 bp, synthetic construct; identical to SEQ ID NO: 147716
  misc_feature 1..459: note = Description of Artificial Sequence: Synthetic coding sequence
  source 1..459: mol_type = other DNA

SEQ ID NO: 147718 - DNA, 459 bp, synthetic construct; identical to SEQ ID NO: 147716
  misc_feature 1..459: note = Description of Artificial Sequence: Synthetic coding sequence
  source 1..459: mol_type = other DNA

SEQ ID NO: 147719 - DNA, 459 bp, synthetic construct; identical to SEQ ID NO: 147716
  misc_feature 1..459: note = Description of Artificial Sequence: Synthetic coding sequence
  source 1..459: mol_type = other DNA

SEQ ID NO: 147720 - DNA, 396 bp, synthetic construct
  misc_feature 1..396: note = Description of Artificial Sequence: Synthetic coding sequence
  source 1..396: mol_type = other DNA
atggccagcagcctgaatgaagatcctgagggcagccgcatcacctacgtgaagggggacctgtttgcctgccccaagacagacagcctggcccactgcatcagcgaggactgcaggatgggcgccggcattgctgtgctcttcaagaagaagtttggaggagtgcaggagctgctgaaccagcagaagaagtctggagaggtggccgtgctgaagagagatggccgctacatctactacctgatcaccaagaagagggccagccacaagcccacctatgagaacctgcagaagagcctggaggccatgaagagccactgcctgaagaatggagtgacagacctgtccatgccccgcatcggctgcggcctggaccggctgcagtgggagaactag

SEQ ID NO: 147721 - DNA, 1371 bp, synthetic construct
  misc_feature 1..1371: note = Description of Artificial Sequence: Synthetic coding sequence
  source 1..1371: mol_type = other DNA
atggaggccctgggggacctggagggcccccgggcccctggaggagatgatcctgctggcagcgctggggagaccccaggctggctgagccgggagcaggtgtttgtgctgatctctgctgcctctgtgaacctgggctccatgatgtgctacagcatcctgggccccttcttccccaaggaggccgagaagaagggggccagcaacaccatcatcggcatgatcttcggctgctttgccctgtttgagctgctggccagcctggtgtttggaaactacctggtgcacatcggggccaagttcatgtttgtggccggcatgtttgtgtctgggggcgtgaccatcctgtttggagtgctggacagagtgcctgatggccctgtgttcatcgccatgtgcttcctggtgcgggtgatggatgctgtgtcctttgctgctgccatgacagccagcagcagcatcctggccaaggccttccccaacaacgtggccaccgtgctgggcagcctggagaccttcagcggcctgggcctcatcctgggcccccctgtgggcggcttcctgtaccagagctttggctatgaggtgcccttcatcgtgctgggctgtgtggtgctgctgatggtgcccctgaacatgtacatcctgcccaactatgaaagtgaccctggagagcacagcttctggaagctgattgccctgcccaaggtgggcctcatcgccttcgtcatcaacagcctgagcagctgcttcggcttcctggaccccaccctgagcctgtttgtgctggagaagttcaacctgcctgctggctacgtgggcctggtgttcctgggcatggccctgtcctatgccatcagcagccccctgtttggcctgctgagtgacaagaggcctcccctgaggaagtggctgctggtgtttggaaacctgatcacagctggctgctacatgctgctgggccctgtgcccatcctgcacatcaagagccagctgtggctgctggtgctgatcctggtggtgtctggcctgtctgctggcatgagcatcatccccaccttccctgagatcctgagctgtgcccatgaaaatggatttgaggagggcctgagcaccctgggcctggtgtctggcctcttcagcgccatgtggagcatcggggccttcatgggccccaccctgggcggcttcctgtatgagaagattggatttgagtgggccgccgccatccagggcctgtgggccctgatcagcggcctggccatgggcctcttctacctgctggagtacagcaggaggaagaggagcaagagccagaacatcctgagcacagaggaggagaggaccaccctgctgcccaatgagacctag

SEQ ID NO: 147722 - DNA, 324 bp, synthetic construct
  misc_feature 1..324: note = Description of Artificial Sequence: Synthetic coding sequence
  source 1..324: mol_type = other DNA
atggaggccctgggggacctggagggcccccgggcccctggaggagatgatcctgctggcagcgctggggagaccccaggctggctgagccgggagcaggtgtttgtgctgatctctgctgcctctgtgaacctgggctccatgatgtgctacagcatcctgggccccttcttccccaaggaggccgagaagaagggggccagcaacaccatcatcggcatgatcttcggcttccagttcacctcctggatctgtggcaccagcatccctggctacggcaccgtgctgtgccacctgttcaccaccatctggagccccaagtag

SEQ ID NO: 147723 - DNA, 324 bp, synthetic construct; identical to SEQ ID NO: 147722
  misc_feature 1..324: note = Description of Artificial Sequence: Synthetic coding sequence
  source 1..324: mol_type = other DNA

SEQ ID NO: 147724 - DNA, 711 bp, synthetic construct
  misc_feature 1..711: note = Description of Artificial Sequence: Synthetic coding sequence
  source 1..711: mol_type = other DNA
atgttctgctttgtgcgggtggccggcatcctgggcatctggaagctgagctgcacctactggagcaagatctacgtgtgcagcagaaatgtgtgcctgcggcgcagctacaacagcctgtggggcagcctggagaccttcagcggcctgggcctcatcctgggcccccctgtgggcggcttcctgtaccagagctttggctatgaggtgcccttcatcgtgctgggctgtgtggtgctgctgatggtgcccctgaacatgtacatcctgcccaactatgaaagtgaccctggagagcacagcttctggaagctgattgccctgcccaaggtgggcctcatcgccttcgtcatcaacagcctgagcagctgcttcggcttcctggaccccaccctgagcctgtttgtgctggagaagttcaacctgcctgctggctacgtgggcctggtgttcctgggcatggccctgtcctatgccatcagcagccccctgtttggcctgctgagtgacaagaggcctcccctgaggaagtggctgctggtgtttggaaacctgatcacagctggctgctacatgctgctgggccctgtgcccatcctgcacatcaagagccagctgtggctgctggtgctgatcctggtggtgtctggcctgtctgctggcatgagcatcatccccaccttccctgagatcctgagctgtgcccagtag

SEQ ID NO: 147725 - DNA, 654 bp, synthetic construct
  misc_feature 1..654: note = Description of Artificial Sequence: Synthetic coding sequence
  source 1..654: mol_type = other DNA
atggatgccccccggcgcttccccaccctggtgcagctgatgcagcccaaggccatgcctgtggaggtgctgggccacctgcccaagcgcttctcctggttccacagcgagttcctgaagaaccccaaggtggtgcggctggaggtgtggctggtggagaagatcttcggccggggcggggagcgcatcccccacgtgcagggcatgagccagatcctgattcatgtgaaccggctggaccccaacggggaggccgagatcctggtgtttggccggcccagctaccaggaggacaccatcaagatgatcatgaacctggccgactaccaccggcagctgcaggccaagggcagcggcaaggccctggcccaggatgtggccacccagaaggccgagacccagaggagcagcattgaggtgcgggaggccggcacccagaggtctgtggaggtgcgggaggccggcacccagaggtctgtggaggtgcaggaggtgggcacccagggcagccctgtggaggtgcaggaggccggcacccagcagagcctgcaggccgccaacaagagcggcacccagaggagccctgaggccgccagcaaggctgtgacccagcgcttccgggaggatgcccgggaccctgtgacccggctgtag

SEQ ID NO: 147726 - DNA, 1416 bp, synthetic construct
  misc_feature 1..1416: note = Description of Artificial Sequence: Synthetic coding sequence
  source 1..1416: mol_type = other DNA
atgcccagcgagacccacgccatgctggccaccctggcccgggtggccgccctgcggaggacctgcctcttcagcggccggggcggcggccggggcctgtggacaggccggccccagagcgacatgaacaacatcaagcccctggagggcgtgaagatcctggacctgaccagggtgctggccggcccctttgccaccatgaacctgggggacctgggcgctgaggtgatcaaggtggagaggcctggagctggagatgacaccaggacctggggccccccatttgtgggcacagagagcacctactacctgtctgtgaacagaaacaagaagagcattgctgtgaacatcaaggaccccaagggcgtgaagatcatcaaggagctggccgctgtgtgtgatgtgtttgtggagaactacgtgcctgggaagctgagcgccatgggcctgggctatgaagatattgatgagatcgccccccacatcatctactgcagcatcaccggctacggccagacaggccccatcagccagagagctggctatgatgctgtggccagcgctgtgtctggcctgatgcacatcaccggcccagaaaatggagaccctgtgcggcctggggtggccatgacagacctggccaccggcctgtatgcctacggggccatcatggccggcctcatccagaagtacaagacaggcaagggcctcttcatcgactgcaacctgctgagcagccaggtggcctgcctgagccacatcgccgccaactacctgattggccagaaggaggccaagcgctggggcacagcccacggcagcatcgtgccctaccaggccttcaagaccaaggatggctacatcgtggtgggcgccggcaacaaccagcagtttgccaccgtgtgcaagatcctggacctgcctgagctgattgacaacagcaagtacaagaccaaccacctgcgggtgcacaacaggaaggagctgatcaagatcctgtctgaaagatttgaggaggagctgaccagcaagtggctgtacctgtttgagggcagcggcgtgccctacggccccatcaacaacatgaagaatgtgtttgctgagccccagaatgctgtgtctggcttccagagcctgctgcacagcctggcccacggccccttcctgcacctgcagggcagcgcccgggtgctgcacaacggcctggtgatggagatggagcaccccaccgtgggcaagatctctgtgcccggccctgctgtgcgctacagcaagttcaagatgtctgaggcccggcccccacccctgctgggccagcacaccacccacatcctgaaggaggtgctgcgctatgatgaccgggccatcggggagctgctgtctgctggggtggtggaccagcacgagacccactag

SEQ ID NO: 147727 - DNA, 1338 bp, synthetic construct
  misc_feature 1..1338: note = Description of Artificial Sequence: Synthetic coding sequence
  source 1..1338: mol_type = other DNA
atgcccagcgagacccacgccatgctggccaccctggcccgggtggccgccctgcggaggacctgcctcttcagcggccggggcggcggccggggcctgtggacaggccggccccagagcgacatgaacaacatcaagcccctggagggcgtgaagatcctggacctgaccagggtgctggccggcccctttgccaccatgaacctgggggacctgggcgctgaggtgatcaaggtggagaggcctggagctggagatgacaccaggacctggggccccccatttgtgggcacagagagcacctactacctgtctgtgaacagaaacaagaagagcattgctgtgaacatcaaggaccccaagggcgtgaagatcatcaaggagctggccgctgtgtgtgatgtgtttgtggagaactacgtgcctgggaagctgagcgccatgggcctgggctatgaagatattgatgagatcgccccccacatcatctactgcagcatcaccggctacggccagacaggccccatcagccagagagctggctatgatgctgtggccagcgctgtgtctggcctgatgcacatcaccggcccagaaaatggagaccctgtgcggcctggggtggccatgacagacctggccaccggcctgtatgcctacggggccatcatggccggcctcatccagaagtacaagacaggcaagggcctcttcatcgactgcaacctgctgagcagccaggtggcctgcctgagccacatcgccgccaactacctgattggccagaaggaggccaagcgctggggcacagcccacggcagcatcgtgccctaccaggccttcaagaccaaggatggctacatcgtggtgggcgccggcaacaaccagcagtttgccaccgtgtgcaagatcctggacctgcctgagctgattgacaacagcaagtacaagaccaaccacctgcgggtgcacaacaggaaggagctgatcaagatcctgtctgaaagatttgaggaggagctgaccagcaagtggctgtacctgtttgagggcagcggcgtgccctacggccccatcaacaacatgaagaatgtgtttgctgagccccaggtgctgcacaacggcctggtgatggagatggagcaccccaccgtgggcaagatctctgtgcccggccctgctgtgcgctacagcaagttcaagatgtctgaggcccggcccccacccctgctgggccagcacaccacccacatcctgaaggaggtgctgcgctatgatgaccgggccatcggggagctgctgtctgctggggtggtggaccagcacgagacccactag

SEQ ID NO: 147728 - DNA, 609 bp, synthetic construct
  misc_feature 1..609: note = Description of Artificial Sequence: Synthetic coding sequence
  source 1..609: mol_type = other DNA
atgctggccaccctggcccgggtggccgccctgcggaggacctgcctcttcagcggccggggcggcggccggggcctgtggacaggccggccccagagcgacatgaacaacatcaagcccctggagggcgtgaagatcctggacctgaccagggtgctggccggcccctttgccaccatgaacctgggggacctgggcgctgaggtgatcaaggtggagaggcctggagctggagatgacaccaggacctggggccccccatttgtgggcacagagagcacctactacctgtctgtgaacagaaacaagaagagcattgctgtgaacatcaaggaccccaagggcgtgaagatcatcaaggagctggccgctgtgtgtgatgtgtttgtggagaactacgtgcctgggaagctgagcgccatgggcctgggctatgaggacattgatgaaattgccccccacatcatctactgcagcatcacagagaagggcttcagccacgtggcccaggacggcctggacctgcagaccagcagcaacctgcctgccctggtgtcccagagcgctggcatcaccggcatgagccaccgggcctggcccaccagctag

SEQ ID NO: 147729 - DNA, 1194 bp, synthetic construct
  misc_feature 1..1194: note = Description of Artificial Sequence: Synthetic coding sequence
  source 1..1194: mol_type = other DNA
atgcccagcgagacccacgccatgctggccaccctggcccgggtggccgccctgcggaggacctgcctcttcagcggccggggcggcggccggggcctgtggacaggccggccccagagcgacatgaacaacatcaagcccctggagggcgtgaagatcctggacctgaccagggtgctggccggcccctttgccaccatgaacctgggggacctgggcgctgaggtgatcaaggtggagaggcctggagctggagatgacaccaggacctggggccccccatttgtgggcacagagagcacctactacctgtctgtgaacagaaacaagaagagcattgctgtgaacatcaaggaccccaagggcgtgaagatcatcaaggagctggccgctgtgtgtgatgtgtttgtggagaactacgtgcctgggaagctgagcgccatgggcctgggctatgaagatattgatgagatcgccccccacatcatctactgcagcatcaccggctacggccagacaggccccatcagccagagagctggctatgatgctgtggccagcgctgtgtctggcctgatgcacatcaccggccctgaggtggcctgcctgagccacatcgccgccaactacctgattggccagaaggaggccaagcgctggggcacagcccacggcagcatcgtgccctaccaggccttcaagaccaaggatggctacatcgtggtgggcgccggcaacaaccagcagtttgccaccgtgtgcaagatcctggacctgcctgagctgattgacaacagcaagtacaagaccaaccacctgcgggtgcacaacaggaaggagctgatcaagatcctgtctgaaagatttgaggaggagctgaccagcaagtggctgtacctgtttgagggcagcggcgtgccctacggccccatcaacaacatgaagaatgtgtttgctgagccccaggtgctgcacaacggcctggtgatggagatggagcaccccaccgtgggcaagatctctgtgcccggccctgctgtgcgctacagcaagttcaagatgtctgaggcccggcccccacccctgctgggccagcacaccacccacatcctgaaggaggtgctgcgctatgatgaccgggccatcggggagctgctgtctgctggggtggtggaccagcacgagacccactag

SEQ ID NO: 147730 - DNA, 540 bp, synthetic construct
  misc_feature 1..540: note = Description of Artificial Sequence: Synthetic coding sequence
  source 1..540: mol_type = other DNA
atgcagaggcagaacttccggccccccaccccaccctacccaggccctgggggcggcggctggggcagcggcagcagcttccggggcaccccaggcggcggcggcccccggccccccagccccagagatggctacggcagcccccaccacaccccaccctacggccccaggagccggccctacggcagcagccacagccccaggcatggaggcagcttccctgggggccgcttcggcagccccagccctgggggctacccaggcagctacagccgcagccctgctggcagccagcagcagtttggctacagccctggccagcagcagacccacccccagggcagccccaggaccagcacccccttcggcagcggccgggtgcgggagaagaggatgagcaatgagctggagaactacttcaagcccagcatgctggaggacccctgggccggcctggagcctgtgtctgtggtggacatcagccagcagtacagcaacacccagaccttcaccgggaagaagggccgctacttctgctag

SEQ ID NO: 147731 - DNA, 480 bp, synthetic construct
  misc_feature 1..480: note = Description of Artificial Sequence: Synthetic coding sequence
  source 1..480: mol_type = other DNA
atgaagatcgtggatgagcgggagaagaacctggatgacaaggcctacagaaacatcaaggagctggagaactatgcagagaacacccagagcagcctgctgtacctgaccctggagatcctgggcatcaaggacctgcacgccgaccatgctgccagccacatcggcaaggcccagggcatcgtgacctgcctgcgggccaccccctaccacggcagcaggaggaaggtgttcctgcccatggacatctgcatgctgcatggagtgtcccaggaggacttcctgcggaggaaccaggacaagaatgtgagagatgtgatctatgacatcgccagccaggcccacctgcacctgaagcacgcccgctccttccacaagacagtgcctgtgaaggccttccctgccttcctgcagacagagatcaaggatgctgacacccagggcgtgtgcctggcccagcctgccagcctgggcaagtag

SEQ ID NO: 147732 - DNA, 1002 bp, synthetic construct
  misc_feature 1..1002: note = Description of Artificial Sequence: Synthetic coding sequence
  source 1..1002: mol_type = other DNA
atggccgccagcgcccacggctctgtgtggggccccctgcggctgggcatccctggcctgtgctgcagaagaccacccctgggcctgtatgccaggatgaggcggctgcccggccctgaggtgtctggccgctctgtggccgccgccagcggccctggggcctggggcacagaccactactgcctggagctgctgaggaagagggactatgagggctacctgtgcagcctgctgctgcctgctgagagccgcagctctgtgtttgccctgcgggccttcaacgtggagctggcccaggtgaaggacagcgtgtctgagaagaccatcggcctgatgaggatgcagttctggaagaagacagtggaggacatctactgtgacaaccccccccaccagcctgtggccatcgagctgtggaaggctgtgaagaggcacaacctgaccaagcgctggctgatgaagatcgtggatgagcgggagaagaacctggatgacaaggcctacagaaacatcaaggagctggagaactatgcagagaacacccagagcagcctgctgtacctgaccctggagatcctgggcatcaaggacctgcacgccgaccatgctgccagccacatcggcaaggcccagggcatcgtgacctgcctgcgggccaccccctaccacggcagcaggaggaaggtgttcctgcccatggacatctgcatgctgcatggagtgtcccaggaggacttcctgcggaggaaccaggacaagaatgtgagagatgtgatctatgacatcgccagccaggcccacctgcacctgaagcacgcccgctccttccacaagacagtgcctgtgaaggccttccctgccttcctgcagacagtgtccctggaggacttcctgaagaagatccagagggtggactttgacatcttccaccccagcctgcagcagaagaacaccctgctgcccctgtacctgtacatccagagctggaggaagacctactag

SEQ ID NO: 147733 - DNA, 846 bp, synthetic construct
  misc_feature 1..846: note = Description of Artificial Sequence: Synthetic coding sequence
  source 1..846: mol_type = other DNA
atgcccatcagcatcagccacagctcctggctggtgcagaggaagagggactatgagggctacctgtgcagcctgctgctgcctgctgagagccgcagctctgtgtttgccctgcgggccttcaacgtggagctggcccaggtgaaggacagcgtgtctgagaagaccatcggcctgatgaggatgcagttctggaagaagacagtggaggacatctactgtgacaaccccccccaccagcctgtggccatcgagctgtggaaggctgtgaagaggcacaacctgaccaagcgctggctgatgaagatcgtggatgagcgggagaagaacctggatgacaaggcctacagaaacatcaaggagctggagaactatgcagagaacacccagagcagcctgctgtacctgaccctggagatcctgggcatcaaggacctgcacgccgaccatgctgccagccacatcggcaaggcccagggcatcgtgacctgcctgcgggccaccccctaccacggcagcaggaggaaggtgttcctgcccatggacatctgcatgctgcatggagtgtcccaggaggacttcctgcggaggaaccaggacaagaatgtgagagatgtgatctatgacatcgccagccaggcccacctgcacctgaagcacgcccgctccttccacaagacagtgcctgtgaaggccttccctgccttcctgcagacagtgtccctggaggacttcctgaagaagatccagagggtggactttgacatcttccaccccagcctgcagcagaagaacaccctgctgcccctgtacctgtacatccagagctggaggaagacctactag

SEQ ID NO: 147734 - DNA, 321 bp, synthetic construct
  misc_feature 1..321: note = Description of Artificial Sequence: Synthetic coding sequence
  source 1..321: mol_type = other DNA
atgaaggccaagaggagccaccaggccgtcatcatgagcaccagcctgcgggtgagccccagcatccacggctaccactttgacacagccagcaggaagaaggctgtgggcaacatctttgaaaatacagaccaggagagcctggagcggctcttcagaaattctggggacaagaaggccgaggagcgggccaagatcatctttgccatcgaccaggatgtggaggagaagacccgggccctgatggccctgaagaagaggaccaaggacaagctgttccagttcctgaagctgaggaagtacagcatcaaggtgcactag

SEQ ID NO: 147735 - DNA, 1185 bp, synthetic construct
  misc_feature 1..1185: note = Description of Artificial Sequence: Synthetic coding sequence
  source 1..1185: mol_type = other DNA
atggccggggccgccatggccgagcggggccgggtgcccccaccagccccagcccccagcacagagggcctgccccgggccttcctgcagagcctgcggaccctgtttgacatcctggatgacagaagaagaggctgtgtgcacctgcgggagattgagagccgctggcagggcacagatgcccgggagctgccccggggcgtgctggagggcctgcggcaggtggccccagccagcggctacctgacctttgaaagatttgtggccggcctgcggaccagcctgctgtctgcagatggcggcccccgggaccccacccgggccccagcccggcctggggaccagcccccacctccaccccagaggctggtgtttgccccagcagatgagcccaggacagtgctggagaggaagcccctgcccctgggcgtgcgggcccccctggccggccccagcgctgctgcccggagccctgagcagctgtgtgccccagctgaggccgccccctgcccagctgagcctgagaggagccagagcgctgccctggagcccagcagcagcgcagatgctggagctgtggcctgccgggccctggaggccgacagcggagatgcccggcgggccccccgggcccggggggagcggcggcggcacaccatcgccagcggcgtggactgtggcctgctgaagcagatgaaggagctggagcaggagaaggaggtgctgctgcagggcctggagatgatggcccggggccgggactggtaccagcagcagctgcagagggtgcaggagcggcagaggcggctgggccagagccgggccagcgctgactttggagctgctggcagcccccggcccctgggccgcctgctgcccaaggtgcaggaggtggcccgctgcctgggggagctgctggccgccgcctgtgccagccgggccctgccccccagcagcagcggccccccctgcccagccctgaccagcaccagcccccctgtgtggcagcagcagaccatcctgatgctgaaggagcagaaccggctgctgacccaggaggtgacagagaagtctgagcgcatcacccagctggagcaggagaagagcgccctgatcaagcagctgtttgaggcccgggccctgagccagcaggacggcggccccctggacagcaccttcatctag

SEQ ID NO: 147736 - DNA, 1035 bp, synthetic construct
  misc_feature 1..1035: note = Description of Artificial Sequence: Synthetic coding sequence
  source 1..1035: mol_type = other DNA
atgaggcggccccggcagggcggcggcggggccggcggcagcgctgctgcccgggcccgggccggcggcctgggcggcggctctgtgcctgcccgggcccggggggccccagctgctgcccgggccgcctggctgcgggacctgtgtgccaggatggcccggcccccccggcagcaccctggggtgtgggccagcctgctgctgctgctgctgaccggccctgctgcctgtgccgccagccctgcagatgatggagctggccctgggggccggggcccccggggccgggcccggggggacacaggagcagatgaggccgtgcccaggcatgacagcagctatggcacctttgctggggagttctatgacctgcgctacctgtctgaggagggctaccccttccccacagcccctcctgtggacccctttgccaagatcaaggtggatgactgtgggaagaccaagggctgcttccgctatggcaagccaggctgcaatgctgagacctgtgactacttcctgagctacaggatgattggagcagatgtggagtttgagctgtctgctgacacagatggctgggtggccgtgggcttcagcagtgacaagaagatgggaggagatgatgtgatggcctgtgtgcatgatgacaatggccgggtgcgcatccagcacttctacaacgtgggccagtgggccaaggagatccagaggaacccagccagagatgaggagggcgtgtttgagaacaacagagtgacctgccgcttcaagaggcctgtgaatgtgcccagagatgagaccatcgtggacctgcacctgtcctggtactacctgtttgcctggggccctgccatccagggcagcatcaccaggcatgacatcgacagccccccagccagcgagcgggtggtgtccatctacaagtatgaggacatcttcatgcccagcgctgcctaccagaccttcagcagccccttctgcctgctgctgattgtggccctgaccttctacctgctgatgggcaccccctag

SEQ ID NO: 147737 - DNA, 393 bp, synthetic construct
  misc_feature 1..393: note = Description of Artificial Sequence: Synthetic coding sequence
  source 1..393: mol_type = other DNA
atgagcagcagcggcggggcccctggggccagcgccagcagcgcccccccagcccaggaggagggcatgacctggtggtaccgctggctgtgccgcctgagcggcgtgctgggcgctgtgtcctgtgccatcagcggcctcttcaactgcatcaccatccaccccctgaacattgctgctggggtgtggatgatgatggctgtggtgcccatcgtcatcagcctgaccctgaccaccctgctgggcaatgccatcgcctttgccactggagtgctgtatggcctgagcgccctgggcaagaagggagatgccatctcctatgcccgcatccagcagcagaggcagcaggctgatgaggagaagctggccgagaccctggagggggagctgtag

SEQ ID NO: 147738 - DNA, 519 bp, synthetic construct
  misc_feature 1..519: note = Description of Artificial Sequence: Synthetic coding sequence
  source 1..519: mol_type = other DNA
atgagcagcagcggcggggcccctggggccagcgccagcagcgcccccccagcccaggaggagggcatgacctggtggtaccgctggctgtgccgcctgagcggcgtgctgggcgctgtgtcctgtgccatcagcggcctcttcaactgcatcaccatccaccccctgaacattgctgctggggtgtggatgatcatgaatgccttcatcctgctgctgtgtgaggcccccttctgctgccagttcattgaatttgccaacacagtggccgagaaggtggaccggctgcgctcctggcagaaggctgtgttctactgcggcatggctgtggtgcccatcgtcatcagcctgaccctgaccaccctgctgggcaatgccatcgcctttgccactggagtgctgtatggcctgagcgccctgggcaagaagggagatgccatctcctatgcccgcatccagcagcagaggcagcaggctgatgaggagaagctggccgagaccctggagggggagctgtag

SEQ ID NO: 147739 - DNA, 345 bp, synthetic construct
  misc_feature 1..345: note = Description of Artificial Sequence: Synthetic coding sequence
  source 1..345: mol_type = other DNA
atgctgacagctgctggcagcacagctgagctgagcgcctgtgccatcagcggcctcttcaactgcatcaccatccaccccctgaacattgctgctggggtgtggatgatcatgaatgccttcatcctgctgctgtgtgaggcccccttctgctgccagttcattgaatttgccaacacagtggccgagaaggtggaccggctgcgctcctggcagaaggctgtgttctactgcggcatggctgtggtgcccatcgtcatcagcctgaccctgaccaccctgctgggcaatgccatcgcctttgccactggagtgctgtatggcctgagcgccctgggcaagtag

SEQ ID NO: 147740 - DNA, 489 bp, synthetic construct
  misc_feature 1..489: note = Description of Artificial Sequence: Synthetic coding sequence
  source 1..489: mol_type = other DNA
atgagcagcagcgcccccccagcccaggaggagggcatgacctggtggtaccgctggctgtgccgcctgagcggcgtgctgggcgctgtgtcctgtgccatcagcggcctcttcaactgcatcaccatccaccccctgaacattgctgctggggtgtggatgatcatgaatgccttcatcctgctgctgtgtgaggcccccttctgctgccagttcattgaatttgccaacacagtggccgagaaggtggaccggctgcgctcctggcagaaggctgtgttctactgcggcatggctgtggtgcccatcgtcatcagcctgaccctgaccaccctgctgggcaatgccatcgcctttgccactggagtgctgtatggcctgagcgccctgggcaagaagggagatgccatctcctatgcccgcatccagcagcagaggcagcaggctgatgaggagaagctggccgagaccctggagggggagctgtag

SEQ ID NO: 147741 - DNA, 702 bp, synthetic construct
  misc_feature 1..702: note = Description of Artificial Sequence: Synthetic coding sequence
  source 1..702: mol_type = other DNA
atgagcagcagcggcggggcccctggggccagcgccagcagcgcccccccagcccaggaggagggcatgacctggtggtaccgctggctgtgccgcctgagcggcgtgctgggcgctgtgtcctgtgccatcagcggcctcttcaactgcatcaccatccaccccctgaacattgctgctggggtgtggatgatcatgaatgccttcatcctgctgctgtgtgaggcccccttctgctgccagttcattgaatttgccaacacagtggccgagaaggtggaccggctgcgctcctggcagaaggctgtgttctactgcggcatggctgtggtgcccatcgtcatcagcctgaccctgaccaccctgctgggcaatgccatcgcctttgccactggagtgctgtatggcctgagcgccctgggcaagaaggcccagacagaggccggcagctttgctgcccagcacccccgggagcccggccccttcagcgagggcacccggcaggcctttgccaccccagctgtggtgtctggagagatccgcatgcctgctggggccatgaggagccccatgcctggcagcagcagccggggcagcaggaggatgagaagaagcagcagaagaccctggaggggcagctgtgagggcctgggcgccccacccagcctgagccccctgctggccctgtgtggcagcaagtag

SEQ ID NO: 147742 - DNA, 576 bp, synthetic construct
  misc_feature 1..576: note = Description of Artificial Sequence: Synthetic coding sequence
  source 1..576: mol_type = other DNA
atgagcagcagcggcggggcccctggggccagcgccagcagcgcccccccagcccaggaggagggcatgacctggtggtaccgctggctgtgccgcctgagcggcgtgctgggcgctgtgtcctgtgccatcagcggcctcttcaactgcatcaccatccaccccctgaacattgctgctggggtgtggatgatgatggctgtggtgcccatcgtcatcagcctgaccctgaccaccctgctgggcaatgccatcgcctttgccactggagtgctgtatggcctgagcgccctgggcaagaaggcccagacagaggccggcagctttgctgcccagcacccccgggagcccggccccttcagcgagggcacccggcaggcctttgccaccccagctgtggtgtctggagagatccgcatgcctgctggggccatgaggagccccatgcctggcagcagcagccggggcagcaggaggatgagaagaagcagcagaagaccctggaggggcagctgtgagggcctgggcgccccacccagcctgagccccctgctggccctgtgtggcagcaagtag

SEQ ID NO: 147743 - DNA, 669 bp, synthetic construct
  misc_feature 1..669: note = Description of Artificial Sequence: Synthetic coding sequence
  source 1..669: mol_type = other DNA
atgagcaccctgtgccccccacccagccctgctgtggccaagacagaaattgccctgagcggcaagagccccctgctggccgccacctttgcctactgggacaacatcctgggcccccgggtgcgccacatctgggcccccaagacagagcaggtgctgctgagtgatggagagatcaccttcctggccaaccacaccctgaatggagagatcctgagaaatgctgagagcggggccattgatgtgaagttctttgtgctgtctgagaagggcgtcatcatcgtgtccctcatctttgatggcaactggaatggagacaggagcacctacggcctgagcatcatcctgccccagacagagctgtccttctacctgcccctgcaccgggtgtgtgtggaccggctgacccacatcatcaggaagggccgcatctggatgcacaaggagcggcaggagaatgtgcagaagatcatcctggagggcacagagaggatggaggaccagggccagagcatcatccccatgctgactggagaggtgattcctgtgatggagctgctgagctccatgaagagccacagcgtgcctgaggagattgatattgctgacacagtgctgaatgatgatgacattggagacagctgccacgagggcttcctgctgaagtag

SEQ ID NO: 147744 - DNA, 669 bp, synthetic construct; identical to SEQ ID NO: 147743
  misc_feature 1..669: note = Description of Artificial Sequence: Synthetic coding sequence
  source 1..669: mol_type = other DNA

SEQ ID NO: 147745 - DNA, 1446 bp, synthetic construct
  misc_feature 1..1446: note = Description of Artificial Sequence: Synthetic coding sequence
  source 1..1446: mol_type = other DNA
atgagcaccctgtgccccccacccagccctgctgtggccaagacagaaattgccctgagcggcaagagccccctgctggccgccacctttgcctactgggacaacatcctgggcccccgggtgcgccacatctgggcccccaagacagagcaggtgctgctgagtgatggagagatcaccttcctggccaaccacaccctgaatggagagatcctgagaaatgctgagagcggggccattgatgtgaagttctttgtgctgtctgagaagggcgtcatcatcgtgtccctcatctttgatggcaactggaatggagacaggagcacctacggcctgagcatcatcctgccccagacagagctgtccttctacctgcccctgcaccgggtgtgtgtggaccggctgacccacatcatcaggaagggccgcatctggatgcacaaggagcggcaggagaatgtgcagaagatcatcctggagggcacagagaggatggaggaccagggccagagcatcatccccatgctgactggagaggtgattcctgtgatggagctgctgagctccatgaagagccacagcgtgcctgaggagattgatattgctgacacagtgctgaatgatgatgacattggagacagctgccacgagggcttcctgctgaatgccatcagcagccacctgcagacctgtggctgcagcgtggtggtgggcagcagcgctgagaaggtgaacaagatcgtgaggaccctgtgcctcttcctgaccccagctgagaggaagtgcagccggctgtgtgaggccgagagcagcttcaagtatgagagcggcctgtttgtgcagggcctgctgaaggacagcacaggcagctttgtgctgcccttccggcaggtgatgtatgccccctaccccaccacccacattgatgtggatgtgaacacagtgaagcagatgccaccctgccacgagcacatctacaaccagaggcgctacatgaggtctgagctgacagccttctggagggccaccagcgaggaggacatggcccaggacaccatcatctacacagatgagagcttcaccccagacctgaacatcttccaggatgtgctgcaccgggacaccctggtgaaggccttcctggaccaggtgttccagctgaagccaggcctgagcctgcggagcaccttcctggcccagttcctgctggtgctgcacaggaaggccctgaccctcatcaagtacattgaagatgacacccagaagggcaagaagcccttcaagagcctgaggaacctgaagattgacctggacctgacagctgagggggacctgaacatcatcatggccctggccgagaagatcaagccaggcctgcacagcttcatcttcggccggcccttctacacctctgtgcaggagagagatgtgctgatgaccttctag

SEQ ID NO: 147746 - DNA, 168 bp, synthetic construct
  misc_feature 1..168: note = Description of Artificial Sequence: Synthetic coding sequence
  source 1..168: mol_type = other DNA
atgcagaaccagagcagcaccaaccaccctggggcctccatgctgatgcacatccacctggacaccagcagcctgaagaccctgcacctgggcaccctcttcttcctgttctacctggccctgacccagaatgaggagaacatctgtgatggcaaggtgaccctgtag

SEQ ID NO: 147747 - DNA, 225 bp, synthetic construct
  misc_feature 1..225: note = Description of Artificial Sequence: Synthetic coding sequence
  source 1..225: mol_type = other DNA
atgcagaaccagagcagcaccaaccaccctggggccagcatcgccctgagccggcccagcctgaacaaggacttccgggaccatgctgagcagcagcacatcgccgcccagcagaaggccgccctgcagcacgcccacgcccacagcagcggctacttcatcacccaggacagcgccttcggcaacctgatcctgcctgtgctgccccggctggaccctgagtag

SEQ ID NO: 147748 - DNA, 168 bp, synthetic construct; identical to SEQ ID NO: 147746
  misc_feature 1..168: note = Description of Artificial Sequence: Synthetic coding sequence
  source 1..168: mol_type = other DNA

SEQ ID NO: 147749 - DNA, 315 bp, synthetic construct
  misc_feature 1..315: note = Description of Artificial Sequence: Synthetic coding sequence
  source 1..315: mol_type = other DNA
atggccgccaacagcagcggccagggcttccagaacaagaacagagtggccatcctggccgagctggacaaggagaagaggaagctgctgatgcagaaccagagcagcaccaaccaccctggggccagcatcgccctgagccggcccagcctgaacaaggacttccgggaccatgctgagcagcagcacatcgccgcccagcagaaggccgccctgcagcacgcccacgcccacagcagcggctacttcatcacccaggacagcgccttcggcaacctgatcctgcctgtgctgccccggctggaccctgagtag

SEQ ID NO: 147750 - DNA, 2190 bp, synthetic construct
  misc_feature 1..2190: note = Description of Artificial Sequence: Synthetic coding sequence
  source 1..2190: mol_type = other DNA
atgttttctgccctgaagaagctggtgggcagtgaccaggcccctggccgggacaagaacatcccagctggcctgcagagcatgaaccaggccctgcagaggagatttgccaagggcgtgcagtacaacatgaagatcgtcatccggggggacaggaacacaggcaagacagccctgtggcaccggctgcagggccggccctttgtggaggagtacatccccacccaggagatccaggtgaccagcatccactggagctacaagaccacagatgacatcgtgaaggtggaggtgtgggatgtggtggacaagggcaagtgcaagaagagaggagatggcctgaagatggagaatgacccccaggaggccgagagcgagatggccctggatgctgagttcctggatgtgtacaagaactgcaatggagtggtgatgatgtttgacatcaccaagcagtggaccttcaactacatcctgcgggagctgcccaaggtgcccacccacgtgcctgtgtgtgtgctgggcaactacagagacatgggagagcacagggtcatcctgcctgatgatgtgcgggacttcatcgacaacctggacaggcctcctggcagcagctacttccgctatgcagagagctccatgaagaacagctttggcctgaagtacctgcacaagttcttcaacatccccttcctgcagctgcagcgggagaccctgctgcggcagctggagaccaaccagctggacatggatgccaccctggaggagctgtctgtgcagcaggagacagaggaccagaactacggcatcttcctggagatgatggaggcccggagccggggccacgccagccccctggccgccaacggccagagccccagccctggcagccagagccctgtggtgcctgctggagctgtgtccacaggcagcagcagccctggcaccccccagcctgccccccagctgcccctgaatgctgccccacccagctctgtgccccctgtgcccccatctgaggccctgcccccaccagcctgccccagcgccccagccccccggcgcagcatcatcagccggctgtttggcaccagccctgccacagaggccgcccctcctcctcctgagcctgtgcctgctgctgagggccctgccaccgtgcagagcgtggaggactttgtgcctgatgaccggctggacaggagcttcctggaggacaccaccccagccagagatgagaagaaggtgggcgccaaggccgcccagcaggacagcgacagtgatggagaggccctgggcggcaaccccatggtggccggcttccaggatgatgtggacctggaggaccagccccggggcagcccccccctgcctgctggccctgtgcccagccaggacatcaccctgagcagcgaggaggaggccgaggtggccgcccccaccaagggccctgccccagccccccagcagtgcagcgagcctgagaccaagtggagcagcatcccagccagcaagccccggcggggcacagcccccaccaggacagctgccccaccctggccaggaggagtgtctgtgaggacaggccctgagaagaggagcagcacccggcccccagctgagatggagcccgggaagggggagcaggccagcagcagcgagagtgaccctgagggccccatcgccgcccagatgctgagctttgtgatggatgatcctgactttgaaagtgagggcagtgacacccagaggagagcagatgacttccctgtgagagatgaccccagtgatgtgacagatgaagatgagggccctgctgagcccccacctccacccaagctgcccctgcctgccttccggctgaagaatgacagcgacctgtttggcctgggcctggaggaggccggccccaaggagagcagcgaggagggcaaggagggcaagacccccagcaaggagaagaagaagaagaagaagaagggcaaggaggaggaggagaaggccgccaagaagaagagcaagcacaagaagagcaaggacaaggaggagggcaaggaggagaggagaagacggcagcagaggcctcccaggagccgggagaggacagctgctgatgagctggaggccttcctgggcggcggggcccctgggggccgccaccctgggggcggggactatgaggagctgtag

SEQ ID NO: 147751 - DNA, 1563 bp, synthetic construct
  misc_feature 1..1563: note = Description of Artificial Sequence: Synthetic coding sequence
  source 1..1563: mol_type = other DNA
atgttttctgccctgaagaagctggtgggcagtgaccaggcccctggccgggacaagaacatcccagctggcctgcagagcatgaaccaggccctgcagaggagatttgccaagggcgtgcagtacaacatgaagatcgtcatccggggggacaggaacacaggcaagacagccctgtggcaccggctgcagggccggccctttgtggaggagtacatccccacccaggagatccaggtgaccagcatccactggagctacaagaccacagatgacatcgtgaaggtggaggtgtgggatgtggtggacaagggcaagtgcaagaagagaggagatggcctgaagatggagaatgacccccaggaggccgagagcgagatggccctggatgctgagttcctggatgtgtacaagaactgcaatggagtggtgatgatgtttgacatcaccaagcagtggaccttcaactacatcctgcgggagctgcccaaggtgcccacccacgtgcctgtgtgtgtgctgggcaactacagagacatgggagagcacagggtcatcctgcctgatgatgtgcgggacttcatcgacaacctggacaggcctcctggcagcagctacttccgctatgcagagagctccatgaagaacagctttggcctgaagtacctgcacaagttcttcaacatccccttcctgcagctgcagcgggagaccctgctgcggcagctggagaccaaccagctggacatggatgccaccctggaggagctgtctgtgcagcaggagacagaggaccagaactacggcatcttcctggagatgatggaggcccggagccggggccacgccagccccctggccgccaacggccagagccccagccctggcagccagagccctgtggtgcctgctggagctgtgtccacaggcagcagcagccctggcaccccccagcctgccccccagctgcccctgaatgctgccccacccagctctgtgccccctgtgcccccatctgaggccctgcccccaccagcctgccccagcgccccagccccccggcgcagcatcatcagccggcccccaccctggggctggaggctgcggggggccctgggccggcggggccagtggccaccctggggcggcggccgggcctgccactgcctgggccgccacctgcccctgtaccaccggctgtgccgctgccctgtggccgctgtgtgtgccagcgagctggaggaggccggccactggtggagccctggctgggccctgcaggtgctgggcctgcaggcccagtgtgagcccgccctgcaggagggccggggccagctggccagcgcccggctgggcggccaccctggccccctgggcgctgagccccctgtgttcctgagagatgtgacagaggcccaggagggccctgtgcgggtgtgcctgcagaggctgggccggggccgcctggccgtgggctgtgccctgcccaggcacctgctggccctgcgggcccacctgggcccccagcacgcctacggcagcgccagcggccgggagccctag

SEQ ID NO: 147752 - DNA, 2193 bp, synthetic construct
  misc_feature 1..2193: note = Description of Artificial Sequence: Synthetic coding sequence
  source 1..2193: mol_type = other DNA
atgttttctgccctgaagaagctggtgggcagtgaccaggcccctggccgggacaagaacatcccagctggcctgcagagcatgaaccaggccctgcagaggagatttgccaagggcgtgcagtacaacatgaagatcgtcatccggggggacaggaacacaggcaagacagccctgtggcaccggctgcagggccggccctttgtggaggagtacatccccacccaggagatccaggtgaccagcatccactggagctacaagaccacagatgacatcgtgaaggtggaggtgtgggatgtggtggacaagggcaagtgcaagaagagaggagatggcctgaagatggagaatgacccccaggaggccgagagcgagatggccctggatgctgagttcctggatgtgtacaagaactgcaatggagtggtgatgatgtttgacatcaccaagcagtggaccttcaactacatcctgcgggagctgcccaaggtgcccacccacgtgcctgtgtgtgtgctgggcaactacagagacatgggagagcacagggtcatcctgcctgatgatgtgcgggacttcatcgacaacctggacagccggcccccaggcagcagctacttccgctatgcagagagctccatgaagaacagctttggcctgaagtacctgcacaagttcttcaacatccccttcctgcagctgcagcgggagaccctgctgcggcagctggagaccaaccagctggacatggatgccaccctggaggagctgtctgtgcagcaggagacagaggaccagaactacggcatcttcctggagatgatggaggcccggagccggggccacgccagccccctggccgccaacggccagagccccagccctggcagccagagccctgtggtgcctgctggagctgtgtccacaggcagcagcagccctggcaccccccagcctgccccccagctgcccctgaatgctgccccacccagctctgtgccccctgtgccccccagcgaggccctgcccccaccagcctgccccagcgccccagcccccaggaggagcatcatcagccggctgtttggcaccagccctgccacagaagctgcccctcctcctcctgagcctgtgcctgctgctgagggccctgccaccgtgcagagcgtggaggactttgtgcctgatgaccggctggaccgctccttcctggaggacaccaccccagccagagatgagaagaaggtgggcgccaaggccgcccagcaggacagcgacagtgatggagaggccctgggcggcaaccccatggtggccggcttccaggatgatgtggacctggaggaccagccccggggcagcccccccctgcctgctggccctgtgcccagccaggacatcaccctgagcagcgaggaggaggccgaggtggccgcccccaccaagggccctgccccagccccccagcagtgcagcgagcctgagaccaagtggagcagcatcccagccagcaagccccggcggggcacagcccccaccaggacagctgccccaccctggccaggcggcgtgtctgtgaggactggacctgagaagaggagcagcaccaggcctcctgctgagatggagcctggaaaaggagagcaggccagcagcagcgagagtgaccctgagggccccatcgccgcccagatgctgagctttgtgatggatgatcctgactttgagagcgagggcagtgacacccagaggagagcagatgacttccctgtgagagatgaccccagtgatgtgacagatgaagatgagggccctgctgagcccccacctccacccaagctgcccctgcctgccttccggctgaagaatgacagcgacctgtttggcctgggcctggaggaggccggccccaaggagagcagcgaggagggcaaggagggcaagacccccagcaaggagaagaagaagaagaagaagaagggcaaggaggaggaggagaaggccgccaagaagaagagcaagcacaagaagagcaaggacaaggaggagggcaaggaggagaggagaagacggcagcagaggcctcccaggagccgggagaggacagctgctgatgagctggaggccttcctgggcggcggggcccctgggggccgccaccctgggggcggggactatgaggagctgtag

SEQ ID NO: 147753 - DNA, 945 bp, synthetic construct
  misc_feature 1..945: note = Description of Artificial Sequence: Synthetic coding sequence
  source 1..945: mol_type = other DNA
atgttttctgccctgaagaagctggtgggcagtgaccaggcccctggccgggacaagaacatcccagctggcctgcagagcatgaaccaggccctgcagaggagatttgccaagggcgtgcagtacaacatgaagatcgtcatccggggggacaggaacacaggcaagacagccctgtggcaccggctgcagggccggccctttgtggaggagtacatccccacccaggagatccaggtgaccagcatccactggagctacaagaccacagatgacatcgtgaaggtggaggtgtgggatgtggtggacaagggcaagtgcaagaagagaggagatggcctgaagatggagaatgacccccaggaggccgagagcgagatggccctggatgctgagttcctggatgtgtacaagaactgcaatggagtggtgatgatgtttgacatcaccaagcagtggaccttcaactacatcctgcgggagctgcccaaggtgcccacccacgtgcctgtgtgtgtgctgggcaactacagagacatgggagagcacagggtcatcctgcctgatgatgtgcgggacttcatcgacaacctggacaggcctcctggcagcagctacttccgctatgcagagagctccatgaagaacagctttggcctgaagtacctgcacaagttcttcaacatccccttcctgcagctgcagaaggatgtgcggctggcccaggagcggggctgtgctgtggtgctggtgtctgaggaggtgaggatgcctgctggctgggactgctgctggggccgcctgggctggaaggagggcggcagccagacctgccctgtgcctgccctgctgggccggcccctgctgcctgctgagcccagcccccaccactgggtggactacagcctggagagcagccccctgctgagctgcagcatcccctag

SEQ ID NO: 147754 - DNA, 1566 bp, synthetic construct
  misc_feature 1..1566: note = Description of Artificial Sequence: Synthetic coding sequence
  source 1..1566: mol_type = other DNA
atgttttctgccctgaagaagctggtgggcagtgaccaggcccctggccgggacaagaacatcccagctggcctgcagagcatgaaccaggccctgcagaggagatttgccaagggcgtgcagtacaacatgaagatcgtcatccggggggacaggaacacaggcaagacagccctgtggcaccggctgcagggccggccctttgtggaggagtacatccccacccaggagatccaggtgaccagcatccactggagctacaagaccacagatgacatcgtgaaggtggaggtgtgggatgtggtggacaagggcaagtgcaagaagagaggagatggcctgaagatggagaatgacccccaggaggccgagagcgagatggccctggatgctgagttcctggatgtgtacaagaactgcaatggagtggtgatgatgtttgacatcaccaagcagtggaccttcaactacatcctgcgggagctgcccaaggtgcccacccacgtgcctgtgtgtgtgctgggcaactacagagacatgggagagcacagggtcatcctgcctgatgatgtgcgggacttcatcgacaacctggacagccggcccccaggcagcagctacttccgctatgcagagagctccatgaagaacagctttggcctgaagtacctgcacaagttcttcaacatccccttcctgcagctgcagcgggagaccctgctgcggcagctggagaccaaccagctggacatggatgccaccctggaggagctgtctgtgcagcaggagacagaggaccagaactacggcatcttcctggagatgatggaggcccggagccggggccacgccagccccctggccgccaacggccagagccccagccctggcagccagagccctgtggtgcctgctggagctgtgtccacaggcagcagcagccctggcaccccccagcctgccccccagctgcccctgaatgctgccccacccagctctgtgccccctgtgccccccagcgaggccctgcccccaccagcctgccccagcgccccagcccccaggaggagcatcatcagccggcccccaccctggggctggaggctgcggggggccctgggcagaagaggccagtggccaccctggggcggcggccgggcctgccactgcctgggccgccacctgcccctgtaccaccggctgtgccgctgccctgtggccgctgtgtgtgccagcgagctggaggaggccggccactggtggagccctggctgggccctgcaggtgctgggcctgcaggcccagtgtgagcccgccctgcaggagggccggggccagctggccagcgcccggctgggcggccaccctggccccctgggcgctgagccccctgtgttcctgagagatgtgacagaggcccaggagggccctgtgcgggtgtgcctgcagaggctgggccggggccgcctggccgtgggctgtgccctgcccaggcacctgctggccctgcgggcccacctgggcccccagcacgcctacggcagcgccagcggccgggagccctag

SEQ ID NO: 147755 - DNA, 1845 bp, synthetic construct
  misc_feature 1..1845: note = Description of Artificial Sequence: Synthetic coding sequence
  source 1..1845: mol_type = other DNA
atggagaatgacccccaggaggccgagagcgagatggccctggatgctgagttcctggatgtgtacaagaactgcaatggagtggtgatgatgtttgacatcaccaagcagtggaccttcaactacatcctgcgggagctgcccaaggtgcccacccacgtgcctgtgtgtgtgctgggcaactacagagacatgggagagcacagggtcatcctgcctgatgatgtgcgggacttcatcgacaacctggaccggcccccaggcagcagctacttccgctatgcagagagctccatgaagaacagctttggcctgaagtacctgcacaagttcttcaacatccccttcctgcagctgcagcgggagaccctgctgcggcagctggagaccaaccagctggacatggatgccaccctggaggagctgtctgtgcagcaggagacagaggaccagaactacggcatcttcctggagatgatggaggcccggagccggggccacgccagccccctggccgccaacggccagagccccagccctggcagccagagccctgtggtgcctgctggagctgtgtccacaggcagcagcagccctggcaccccccagcctgccccccagctgcccctgaatgctgccccacccagctctgtgccccctgtgccccccagcgaggccctgcccccaccagcctgccccagcgccccagcccccaggaggagcatcatcagccggctgtttggcaccagccctgccacagaagctgcccctcctcctcctgagcctgtgcctgctgctgagggccctgccaccgtgcagagcgtggaggactttgtgcctgatgaccggctggaccgctccttcctggaggacaccaccccagccagagatgagaagaaggtgggcgccaaggccgcccagcaggacagcgacagtgatggagaggccctgggcggcaaccccatggtggccggcttccaggatgatgtggacctggaggaccagccccggggcagcccccccctgcctgctggccctgtgcccagccaggacatcaccctgagcagcgaggaggaggccgaggtggccgcccccaccaagggccctgccccagccccccagcagtgcagcgagcctgagaccaagtggagcagcatcccagccagcaagccccggcggggcacagcccccaccaggacagctgccccaccctggccaggcggcgtgtctgtgaggactggacctgagaagaggagcagcaccaggcctcctgctgagatggagcctggaaaaggagagcaggccagcagcagcgagagtgaccctgagggccccatcgccgcccagatgctgagctttgtgatggatgatcctgactttgagagcgagggcagtgacacccagaggagagcagatgacttccctgtgagagatgaccccagtgatgtgacagatgaagatgagggccctgctgagcccccacctccacccaagctgcccctgcctgccttccggctgaagaatgacagcgacctgtttggcctgggcctggaggaggccggccccaaggagagcagcgaggagggcaaggagggcaagacccccagcaaggagaagaagaagaagaagaagaagggcaaggaggaggaggagaaggccgccaagaagaagagcaagcacaagaagagcaaggacaaggaggagggcaaggaggagaggagaagacggcagcagaggcctcccaggagccgggagaggacagctgctgatgagctggaggccttcctgggcggcggggcccctgggggccgccaccctgggggcggggactatgaggagctgtag

SEQ ID NO: 147756 - DNA, 678 bp, synthetic construct
  misc_feature 1..678: note = Description of Artificial Sequence: Synthetic coding sequence
  source 1..678: mol_type = other DNA
tgagatgacatcgtgaaggtggaggtgtgggatgtggtggacaagggcaagtgcaagaagagaggagatggcctgaagatggagaatgacccccaggaggccgagagcgagatggccctggatgctgagttcctggatgtgtacaagaactgcaatggagtggtgatgatgtttgacatcaccaagcagtggaccttcaactacatcctgcgggagctgcccaaggtgcccacccacgtgcctgtgtgtgtgctgggcaactacagagacatgggagagcacagggtcatcctgcctgatgatgtgcgggacttcatcgacaacctggaccggcccccaggcagcagctacttccgctatgcagagagctccatgaagaacagctttggcctgaagtacctgcacaagttcttcaacatccccttcctgcagctgcagaaggatgtgcggctggcccaggagcggggctgtgctgtggtgctggtgtctgaggaggtgaggatgcctgctggctgggactgctgctggggccgcctgggctggaaggagggcggcagccagacctgccctgtgcctgccctgctgggccggcccctgctgcctgctgagcccagcccccaccactgggtggactacagcctggagagcagccccctgctgagctgcagcatcccctag

SEQ ID NO: 147757 - DNA, 1416 bp, synthetic construct
  misc_feature 1..1416: note = Description of Artificial Sequence: Synthetic coding sequence
  source 1..1416: mol_type = other DNA
atgacagtgggcaccgtgaagatcgtcatccggggggacaggaacacaggcaagacagccctgtggcaccggctgcagggccggccctttgtggaggagtacatccccacccaggagatccaggtgaccagcatccactggagctacaagaccacagatgacatcgtgaaggtggaggtgtgggatgtggtggacaagggcaagtgcaagaagagaggagatggcctgaagatggagaatgacccccaggaggccgagagcgagatggccctggatgctgagttcctggatgtgtacaagaactgcaatggagtggtgatgatgtttgacatcaccaagcagtggaccttcaactacatcctgcgggagctgcccaaggtgcccacccacgtgcctgtgtgtgtgctgggcaactacagagacatgggagagcacagggtcatcctgcctgatgatgtgcgggacttcatcgacaacctggacaggcctcctggcagcagctacttccgctatgcagagagctccatgaagaacagctttggcctgaagtacctgcacaagttcttcaacatccccttcctgcagctgcagcgggagaccctgctgcggcagctggagaccaaccagctggacatggatgccaccctggaggagctgtctgtgcagcaggagacagaggaccagaactacggcatcttcctggagatgatggaggcccggagccggggccacgccagccccctggccgccaacggccagagccccagccctggcagccagagccctgtggtgcctgctggagctgtgtccacaggcagcagcagccctggcaccccccagcctgccccccagctgcccctgaatgctgccccacccagctctgtgccccctgtgcccccatctgaggccctgcccccaccagcctgccccagcgccccagccccccggcgcagcatcatcagccggctgtttggcaccagccctgccacagaggccgcccctcctcctcctgagcctgtgcctgctgctgagggccctgccaccgtgcagagcgtggaggactttgtgcctgatgaccggctggacaggagcttcctggaggacaccaccccagccagagatgagaagaaggtgggcgccaaggccgcccagcaggacagcgacagtgatggagaggccctgggcggcaaccccatggtggccggcttccaggatgatgtggacctggaggaccagccccggggcagcccccccctgcctgctggccctgtgcccagccaggacatcaccctgagcagcgaggaggaggccgaggtggccgcccccaccaagggccctgccccagccccccagcagtgcagcgagcctgagaccaagtggagcggggaggcccagcagcaccaggccccctgctag

SEQ ID NO: 147758 - DNA, 1347 bp, synthetic construct
  misc_feature 1..1347: note = Description of Artificial Sequence: Synthetic coding sequence
  source 1..1347: mol_type = other DNA
atgagccaccgggcctggctggccctgctgcccctggaggtggatggagatgatggcctgtgtggggccggcggccctgagcacagcggcagcagccagccccagcagcagcagcagagggccccctgccacctgcgggccagcggccggggccgcggggcccggctgctgacccggctgctgcccttctccttcctggagatgatggaggcccggagccggggccacgccagccccctggccgccaacggccagagccccagccctggcagccagagccctgtggtgcctgctggagctgtgtccacaggcagcagcagccctggcaccccccagcctgccccccagctgcccctgaatgctgccccacccagctctgtgccccctgtgcccccatctgaggccctgcccccaccagcctgccccagcgccccagccccccggcgcagcatcatcagccggctgtttggcaccagccctgccacagaggccgcccctcctcctcctgagcctgtgcctgctgctgagggccctgccaccgtgcagagcgtggaggactttgtgcctgatgaccggctggacaggagcttcctggaggacaccaccccagccagagatgagaagaaggtgggcgccaaggccgcccagcaggacagcgacagtgatggagaggccctgggcggcaaccccatggtggccggcttccaggatgatgtggacctggaggaccagccccggggcagcccccccctgcctgctggccctgtgcccagccaggacatcaccctgagcagcgaggaggaggccgaggtggccgcccccaccaagggccctgccccagccccccagcagtgcagcgagcctgagaccaagtggagcagcatcccagccagcaagccccggcggggcacagcccccaccaggacagctgccccaccctggccaggaggagtgtctgtgaggacaggccctgagaagaggagcagcacccggcccccagctgagatggagcccgggaagggggagcaggccagcagcagcgagagtgaccctgagggccccatcgccgcccagatgctgagctttgtgatggatgatcctgactttgaaagtgagggcagtgacacccagaggagagcagatgacttccctgtgagagatgaccccagtgatgtgacagatgaagatgagggccctgctgagcccccacctccacccaagctgcccctgcctgccttccggctgaagaatgacagcgacctgtttggcctgggcctggaggaggccggccccaaggagagcagcgaggagggcaaggagggcaagacccccagcaaggagaagtag

SEQ ID NO: 147759 - DNA, 648 bp, synthetic construct
  misc_feature 1..648: note = Description of Artificial Sequence: Synthetic coding sequence
  source 1..648: mol_type = other DNA
tgaaaaattgtcatccggggggacaggaacacaggcaagacagccctgtggcaccggctgcagggccggccctttgtggaggagtacatccccacccaggagatccaggtgaccagcatccactggagctacaagaccacagatgacatcgtgaaggtggaggtgtgggatgtggtggacaagggcaagtgcaagaagagaggagatggcctgaagatggagaatgacccccaggaggccgagagcgagatggccctggatgctgagttcctggatgtgtacaagaactgcaatggagtggtgatgatgtttgacatcaccaagcagtggaccttcaactacatcctgcgggagctgcccaaggtgcccacccacgtgcctgtgtgtgtgctgggcaactacagagacatgggagagcacagggtcatcctgcctgatgatgtgcgggacttcatcgacaacctggacagcaggcctcctggcagcagctacttccgctatgcagagagctccatgaagaacagctttggcctgaagtacctgcacaagttcttcaacatccccttcctgcagctgcaggtgtccacccaccacgtgggctggagcggctgctggagcctgaccagcttccaggtgtcccctgtgtag

SEQ ID NO: 147760 - DNA, 336 bp, synthetic construct
  misc_feature 1..336: note = Description of Artificial Sequence: Synthetic coding sequence
  source 1..336: mol_type = other DNA
atgtacagccgcctcttctacctgaagagcagctacatcatctactttgagcccctcttcagcaatgccatcatcaacatcctgtccttcatcaacagcctggccagccccctgaccatcttctgctttgccctgagcgcccaggccctgagcaccatcttctacttccgcatcttcatcttcatcttccacagctggatcctgctcttccacttctacttcacctgcagcttcaagacctatgagcaccagcacagcaagatggtgcctgcctacaggatgcagagcccccgggccctgcccaggacctacctgtatgtgtggccctacaagtag

SEQ ID NO: 147761 - DNA, 342 bp, synthetic construct
  misc_feature 1..342: note = Description of Artificial Sequence: Synthetic coding sequence
  source 1..342: mol_type = other DNA
atgaacttctacctgctgctggccagcagcatcctgtgtgccctgattgtgttctggaagtaccgccgcttccagaggaacacaggagagatgagcagcaacagcacagccctggccctggtgcggcccagcagcagcggcctcatcaacagcaacacagacaacaacctggccgtgtatgacctgagccgggacatcctgaacaacttcccccacagcatcgcccggcagaagaggatcctggtgaacctgtccatggtggagaacaagctggtggagctggagcacaccctgctgagcaagggcttccggggggccagcccccacaggaagagcacctag

SEQ ID NO: 147762 - DNA, 2853 bp, synthetic construct
  misc_feature 1..2853: note = Description of Artificial Sequence: Synthetic coding sequence
  source 1..2853: mol_type = other DNA
atgacctggaggatgggcccccgcttcaccatgctgctggccatgtggctggtgtgtggcagcgagccccacccccacgccaccatccggggcagccatggaggcaggaaggtgcccctggtgtccccagacagcagcaggcctgcccgcttcctgcggcacacaggccgcagccggggcatcgagaggagcaccctggaggagcccaacctgcagcccctgcagaggagaagatctgtgcctgtgctgcggctggcccggcccacagagcccccagcccggagtgacatcaacggggctgctgtgcggcctgagcagaggcctgctgcccggggcagcccccgggagatgatcagagatgagggcagcagcgcccggagcaggatgctgcgcttccccagcggcagcagcagccccaacatcctggccagctttgctgggaagaacagagtgtgggtgatcagcgccccccacgccagcgagggctactaccgcctgatgatgagcctgctgaaggatgatgtgtactgtgagctggccgagcggcacatccagcagatcgtgctcttccaccaggccggggaggagggcggcaaggtgcggcgcatcaccagcgagggccagatcctggagcagcccctggaccccagcctcatccccaagctgatgtccttcctgaagctggagaagggcaagtttggcatggtgctgctgaagaagaccctgcaggtggaggagcgctacccctaccctgtgcggctggaggccatgtatgaggtgattgaccagggccccatcagaagaattgagaagatccggcagaagggctttgtgcagaagtgcaaggccagcggcgtggagggccaggtggtggccgagggcaatgatggcggcggcggggccggccggcccagcctgggcagcgagaagaagaaggaggacccccggcgggcccaggtgccccccacccgggagagccgggtgaaggtgctgaggaagctggccgccacagccccagccctgccccagccccccagcaccccccgggccaccaccctgcccccagccccagccaccaccgtgaccaggagcaccagcagagctgtgacagtggccgcccggcccatgaccaccacagccttccccaccacccagaggccctggacccccagccccagccaccggccccccaccaccacagaggtgatcacagcccggcggcccagcgtgtctgagaacctgtacccacccagcaggaaggaccagcaccgggagcggccccagaccacccggcggcccagcaaggccaccagcctggagagcttcaccaatgccccacccaccaccatcagcgagcccagcaccagggctgctggccctggccgcttccgggacaacaggatggaccggcgggagcacggccaccgggaccccaacgtggtgcccggcccccccaagccagccaaggagaagccacccaagaagaaggcccaggacaagatcctgagcaatgaatatgaggagaagtatgacctgagccggcccacagccagccagctggaggatgagctgcaggtgggcaatgtgcccctgaagaaggccaaggagagcaagaagcatgagaagctggagaagccagagaaggagaagaagaagaagatgaagaatgaaaatgctgacaagctgctgaagtctgagaagcagatgaagaagtctgagaagaagagcaagcaggagaaggagaagagcaagaagaagaagggcggcaagacagagcaggacggctaccagaagcccaccaacaagcacttcacccagagccccaagaagtctgtggccgacctgctgggcagctttgagggcaagaggcggctgctgctgatcacagcccccaaggccgagaacaacatgtatgtgcagcagagagatgagtacctggagagcttctgcaagatggccaccaggaagatcagcgtcatcaccatctttggacctgtgaacaacagcaccatgaagattgaccacttccagctggacaatgagaagcccatgagggtggtggatgatgaggacctggtggaccagaggctcatcagcgagctgaggaaggagtatggcatgacctacaatgacttcttcatggtgctgacagatgtggacctgcgggtgaagcagtactatgaggtgcccatcaccatgaagtctgtgtttgacctgattgacaccttccagagccgcatcaaggacatggagaagcagaagaaggagggcatcgtgtgcaaggaggacaagaagcagagcctggagaacttcctgagccgcttccgctggaggcggcggctgctggtgatcagcgccccaaatgatgaggactgggcctacagccagcagctgagcgccctgagcggccaggcctgcaactttggcctgcggcacatcaccatcctgaagctgctgggcgtgggggaggaggtgggcggcgtgctggagctgttccccatcaatggcagctctgtggtggagagagaagatgtgcctgcccacctggtgaaggacatccggaactacttccaggtgtccccagagtacttctccatgctgctggtgggcaaggatggaaatgtgaagtcctggtaccccagccccatgtggagcatggtgattgtgtatgacctgattgacagcatgcagctgcggcggcaggagatggccatccagcagagcctgggcatgcgctgcccagaagatgaatatgccggctacggctaccacagctaccaccagggctaccaggacggctaccaggatgactaccgccaccacgagagctaccaccacggctacccctactag

SEQ ID NO: 147763 - DNA, 744 bp, synthetic construct
  misc_feature 1..744: note = Description of Artificial Sequence: Synthetic coding sequence
  source 1..744: mol_type = other DNA
atgctgctgctgcccctgcccctgctgctcttcctgctgtgcagcagagctgaggccggggagatcattggaggaacagagtgcaagccccacagccggccctacatggcctacctggagatcgtgaccagcaatggccccagcaagttctgtggcggcttcctgatcagaagaaactttgtgctgacagctgcccactgtgccggccgcagcatcaccgtgaccctgggcgcccacaacatcacagaggaggaggacacctggcagaagctggaggtgatcaagcagttccgccaccccaagtacaacaccagcaccctgcaccacgacatcatgctgctgaagctgaaggagaaggccagcctgaccctggccgtgggcaccctgcccttccccagccagttcaactttgtgcccccaggccgcatgtgccgggtggccggctggggccgcactggagtgctgaagccaggcagtgacaccctgcaggaggtgaagctgcggctgatggacccccaggcctgcagccacttccgggactttgaccacaacctgcagctgtgtgtgggcaaccccaggaagaccaagagcgccttcaagggggacagcggcggccccctgctgtgtgccggcgtggcccagggcatcgtgtcctatggccgcagtgatgccaagcccccagctgtgttcacccgcatcagccactaccggccctggatcaaccagatcctgcaggccaactag

SEQ ID NO: 147764 - DNA, 210 bp, synthetic construct
  misc_feature 1..210: note = Description of Artificial Sequence: Synthetic coding sequence
  source 1..210: mol_type = other DNA
atgctgggcatcaccgtgctggccgccctgctggcctgtgccaccccaggccccaccgtgtggccctgggagaggaccacctggcgctggaagaccaagaaggacccctgcctgtgggtgtggacccccagcaccagcaccagagatggcatgcccagctgctgtgccatgatcctgcccagcagcagcctgcagagcatgtggagctag

SEQ ID NO: 147765 - DNA, 807 bp, synthetic construct
  misc_feature 1..807: note = Description of Artificial Sequence: Synthetic coding sequence
  source 1..807: mol_type = other DNA
atgctgggcatcaccgtgctggccgccctgctggcctgtgccagcagctgtggggtgcccagcttcccccccaacctgagcgcccgggtggtgggcggggaggatgcccggccccacagctggccctggcagatcagcctgcagtacctgaagaatgacacctggaggcacacctgtggcggcaccctcatcgccagcaactttgtgctgacagctgcccactgcatcagcaacaccaggacctacagagtggccgtgggcaagaacaacctggaggtggaggatgaggagggcagcctgtttgtgggcgtggacaccatccacgtgcacaagcgctggaatgccctgctgctgagaaatgacatcgccctgatcaagctggccgagcacgtggagctgagtgacaccatccaggtggcctgcctgcctgagaaggacagcctgctgcccaaggactacccctgctacgtgacaggctggggccgcctgtggaccaacggccccatcgctgacaagctgcagcagggcctgcagcctgtggtggaccacgccacctgcagcagaattgactggtggggcttccgggtgaagaagaccatggtgtgtgctggaggagatggagtcatcagcgcctgcaatggagacagcggcggccccctgaactgccagctggagaatggctcctgggaggtgtttggcatcgtgtcctttggcagccggcggggctgcaacaccaggaagaagcctgtggtgtacaccagggtgtctgcctacatcgactggatcaatgagaagatgcagctgtag

SEQ ID NO: 147766 - DNA, 795 bp, synthetic construct
  misc_feature 1..795: note = Description of Artificial Sequence: Synthetic coding sequence
  source 1..795: mol_type = other DNA
atgctgctgctgagcctgaccctgagcctggtgctgctgggcagctcctggggctgcggcatcccagccatcaagccagccctgtccttcagccagagaattgtgaatggagaaaatgctgtgctgggctcctggccctggcaggtgtccctgcaggacagcagcggcttccacttctgtggcggcagcctcatcagccagagctgggtggtgacagctgcccactgcaatgtgtccccaggccgccactttgtggtgctgggggagtatgacaggagcagcaatgctgagcccctgcaggtgctgtctgtgtcccgggccatcacccaccccagctggaacagcaccaccatgaacaatgatgtgaccctgctgaagctggccagccctgcccagtacaccacccgcatcagccctgtgtgcctggccagcagcaatgaggccctgacagagggcctgacctgtgtgaccaccggctggggccgcctgagcggcgtgggcaatgtgaccccagcccacctgcagcaggtggccctgcccctggtgacagtgaaccagtgccggcagtactggggcagcagcatcacagacagcatgatctgtgccggcggggccggggccagcagctgccagggcgacagcggcggccccctggtgtgccagaagggcaacacctgggtgctgattggaattgtgtcctggggcaccaagaactgcaatgtgcgggccccagctgtgtacaccagggtgtccaagttcagcacctggatcaaccaggtgattgcctacaactag

SEQ ID NO: 147767 - DNA, 795 bp, synthetic construct; identical to SEQ ID NO: 147766
  misc_feature 1..795: note = Description of Artificial Sequence: Synthetic coding sequence
  source 1..795: mol_type = other DNA

SEQ ID NO: 147768 - DNA, 792 bp, synthetic construct
  misc_feature 1..792: note = Description of Artificial Sequence: Synthetic coding sequence
  source 1..792: mol_type = other DNA
atggccagcctgtggctgctgagctgcttcagcctggtgggcgccgccttcggctgcggcgtgcctgccatccaccctgtgctgagcggcctgagccgcatcgtgaatggagaagatgctgtgcccggctcctggccctggcaggtgtccctgcaggacaagacaggcttccacttctgtggcggcagcctcatcagcgaggactgggtggtgacagctgcccactgcggcgtgaggaccagtgatgtggtggtggccggggagtttgaccagggcagtgatgaggagaacatccaggtgctgaagatcgccaaggtgttcaagaaccccaagttcagcatcctgactgtgaacaatgacatcaccctgctgaagctggccaccccagcccgcttcagccagacagtgtctgctgtgtgcctgcccagcgcagatgatgacttccctgctggcaccctgtgtgccaccaccggctggggcaagaccaagtacaatgccaacaagaccccagacaagctgcagcaggccgccctgcccctgctgagcaatgctgagtgcaagaagtcctggggccgccgcatcacagatgtgatgatctgtgccggggccagcggcgtgagcagctgcatgggagacagcggcggccccctggtgtgccagaaggatggagcctggaccctggtgggcatcgtgtcctggggcagtgacacctgcagcaccagcagccctggggtgtatgcccgggtgaccaagctgatcccctgggtgcagaagatcctggccgccaactag

SEQ ID NO: 147769 - DNA, 1119 bp, synthetic construct
  misc_feature 1..1119: note = Description of Artificial Sequence: Synthetic coding sequence
  source 1..1119: mol_type = other DNA
atggccgcccctgtgccctgggcctgctgtgctgtgctggccgctgctgctgctgtggtgtatgcccagaggcacagcccccaggaggccccccacgtgcagtatgagcggctgggcagtgatgtgaccctgccctgtggcacagccaactgggatgctgctgtgacctggagggtgaatggaacagacctggccccagacctgctgaatggcagccagctggtgctgcacggcctggagctgggccacagcggcctgtatgcctgcttccaccgggacagctggcacctgcggcaccaggtgctgctgcacgtgggcctgcccccccgggagcctgtgctgagctgccgcagcaacacctaccccaagggcttctactgctcctggcacctgcccacccccacctacatccccaacaccttcaacgtgacagtgctgcacggcagcaagatcatggtgtgtgagaaggaccctgccctgaagaaccgctgccacatccgctacatgcacctgttcagcaccatcaagtacaaggtgtccatctctgtgtccaatgccctgggccacaatgccacagccatcacctttgatgagttcaccatcgtgaagccagaccccccagaaaatgtggtggcccggcctgtgcccagcaacccccggcggctggaggtgacctggcagacccccagcacctggccagaccctgagagcttccccctgaagttcttcctgcgctaccggcccctcatcctggaccagtggcagcacgtggagctgagtgatggaacagcccacaccatcacagatgcctatgctgggaaggagtacatcatccaggtggccgccaaggacaatgaaattggcacctggagcgactggagcgtggccgcccacgccaccccctggacagaggagcccaggcacctgaccacagaggcccaggccgctgagaccaccaccagcaccaccagcagcctggcccccccacccaccaccaagatctgtgaccctggagagctgggcagcggcggcggccccagcgcccccttcctggtgtctgtgcccatcaccctggccctggccgctgctgctgccacagccagcagcctgctgatctag

SEQ ID NO: 147770 - DNA, 1119 bp, synthetic construct; identical to SEQ ID NO: 147769
  misc_feature 1..1119: note = Description of Artificial Sequence: Synthetic coding sequence
  source 1..1119: mol_type = other DNA

SEQ ID NO: 147771 - DNA, 771 bp, synthetic construct
  misc_feature 1..771: note = Description of Artificial Sequence: Synthetic coding sequence
  source 1..771: mol_type = other DNA
atggccgcccctgtgccctgggcctgctgtgctgtgctggccgctgctgctgctgtggtgtatgcccagaggcacagcccccaggaggccccccacgtgcagtatgagcggctgggcagtgatgtgaccctgccctgtggcacagccaactgggatgctgctgtgacctggagggtgaatggaacagacctggccccagacctgctgaatggcagccagctggtgctgcacggcctggagctgggccacagcggcctgtatgcctgcttccaccgggacagctggcacctgcggcaccaggtgctgctgcacgtgggcctgcccccccgggagcctgtgctgagctgccgcagcaacacctaccccaagggcttctactgctcctggcacctgcccacccccacctacatccccaacaccttcaacgtgacagtgctgcacggcagcaagatcatggtgtgtgagaaggaccctgccctgaagaaccgctgccacatccgctacatgcacctgttcagcaccatcaagtacaaggtgtccatctctgtgtccaatgccctgggccacaatgccacagccatcacctttgatgagttcaccatcgtgaagccagaccccccagaaaatgtggtggcccggcctgtgcccagcaacccccggcggctggaggtgacctggcagacccccagcacctggccagaccctgagagcttccccctgaagttcttcctgcgctaccggcccctcatcctggaccagtggcagcactag

SEQ ID NO: 147772 - DNA, 3909 bp, synthetic construct
  misc_feature 1..3909: note = Description of Artificial Sequence: Synthetic coding sequence
  source 1..3909: mol_type = other DNA
atggagctgtactttggagagtaccagcacgtgcagcaggagtatggagtgcacctgcggctggccagtgatgacacccagaagagccgcagcagccagaacagcaaggccggcagctatggagtgtccatccgggtgcagggcattgatggccacccctacatcgtgctgaacaacacagagcgctgcctggccggcaccagcttctctgaaaatggcccccccttccccccacctgtgatcaacaacctgcccctgcacagcagcaatggatctgtgcccaaggagaacagcgaggagctgcagctgcctgagaacccctatgcccagcccagccccatccggaacctgaagcagcccctgctgcacgagggcaagaatggagtgctggacaggaaggatggctctgtgaagcccagccacctgctgaacttccagaggcaccctgagctgctgcagccctatgaccctgagaagaatgagctgaacctgcagaaccaccagcccagcgagagcaactggctgaagaccctgacagaggagggcatcaacaacaagaagccctggacctgcttccccaagcccagcaacagccagcccaccagccccagcctggaggaccctgccaagtctggagtgacagccatccggctgtgcagctctgtggtgattgaggaccccaagaagcagacctctgtgtgtgtgaatgtgcagagctgcaccaaggagcgggtgggggaggaggccctcttcaccagcggccggcccctgacagcccacagcccccacgcccaccctgagaccaagaagaccaggccagatgtgctgcccttccggcggcaggacagcgctggccctgtgctggatggagcccggagccgccgcagcagcagcagcagcaccacccccaccagcgccaacagcctgtaccgcttcctgctggatgaccaggagtgtgccatccatgctgacaacgtgaacagacatgagaacagacgctacatccccttcctgcccggcaccggccgggacatcgacaccggcagcatccctggggtggaccagctgattgagaagtttgaccagaagccaggcctgcagaggcggggccgcagcggcaagaggaaccgcatcaacacagatgacaggaagaggagccgctctgtggacagcgccttccccttcggcctgcagggcaacagcgagtacctgattgagttcagcaggaacctgggcaagagcagcgagcacctgctgcggcccagccaggtgtgcccccagaggcccctgagccaggagcggcggggcaagcagagcgtgggccgcacctttgccaagctgcagggcgccgcccacggggccagctgtgcccacagcaggcctccccagcccaacattgatggcaaggtgctggagacagagggcagccaggagagcaccgtcatccgggcccccagcctgggcgcccagagcaagaaggaggaggaggtgaagacagccacagccaccctgatgctgcagaacagagccacagccaccagcccagattctggggccaagaagatctctgtgaagaccttccccagcgccagcaacacccaggccaccccagacctgctgaagggccagcaggagctgacccagcagaccaatgaggagacagccaagcagatcctgtacaactacctgaaggagggcagcacagacaatgatgatgccaccaagaggaaggtgaacctggtgtttgagaagatccagaccctgaagagcagagctgctggcagcgcccagggcaacaaccaggcctgcaacagcaccagcgaggtgaaggacctgctggagcagaagagcaagctgaccatcgaggtggccgagctgcagaggcagctgcagctggaggtgaagaaccagcagaacatcaaggaggagcgggagaggatgagggccaacctggaggagctgcggagccagcacaatgagaaggtggaggagaacagcaccctgcagcagaggctggaggagagcgagggggagctgaggaagaacctggaggagctgttccaggtgaagatggagcgggagcagcaccagacagagatccgggacctgcaggaccagctgtctgagatgcatgatgagctggacagcgccaagagaagtgaagatcgggagaagggggccctgattgaggagctgctgcaggccaagcaggacctgcaggacctgctgattgccaaggaggagcaggaggacctgctgaggaagcgggagcgggagctgacagccctgaagggggccctgaaggaggaggtgagcagccatgaccaggagatggacaagctgaaggagcagtatgatgctgagctgcaggccctgcgggagagcgtggaggaggccaccaagaatgtggaggtgctggccagccgcagcaacaccagcgagcaggaccaggccggcacagagatgagggtgaagctgctgcaggaggagaatgagaagctgcagggccgctctgaggagctggagaggagagtggcccagctgcagaggcagatcgaggacctgaagggagatgaggccaaggccaaggagaccctgaagaagtatgaaggagagatccggcagctggaggaggccctggtgcacgccaggaaggaggagaaggaggccgtgtctgcccggcgggccctggagaatgagctggaggccgcccagggcaacctgagccagaccacccaggagcagaagcagctgtctgagaagctgaaggaggagagcgagcagaaggagcagctgcggcggctgaagaatgagatggagaatgaacgctggcacctgggcaagaccatcgagaagctgcagaaggagatggctgacatcgtggaggccagcaggaccagcaccctggagctgcagaaccagctggatgagtacaaggagaagaacagaagagagctggccgagatgcagaggcagctgaaggagaagaccctggaggccgagaagagccggctgacagccatgaagatgcaggatgagatgaggctgatggaggaggagctgcgggactaccagagggcccaggatgaggccctgaccaagaggcagctgctggagcagaccctgaaggacctggagtatgagctggaggccaagagccacctgaaggatgacaggagccggctggtgaagcagatggaggacaaggtgtcccagctggagatggagctggaggaggagaggaacaacagcgacctgctgtctgagcgcatcagccgcagccgggagcagatggagcagctgagaaatgagctgctgcaggagcgggccgcccggcaggacctggagtgtgacaagatcagcctggagcggcagaacaaggacctgaagagccgcatcatccacctggagggcagctaccgcagcagcaaggagggcctggtggtgcagatggaggccagaattgctgagctggaggaccggctggagagcgaggagcgggaccgggccaacctgcagctgagcaacagaaggctggagaggaaggtgaaggagctggtgatgcaggtggatgatgagcacctgagcctgacagaccagaaggaccagctgagcctgcggctgaaggccatgaagaggcaggtggaggaggccgaggaggagattgaccggctggagagcagcaagaagaagctgcagcgggagctggaggagcagatggacatgaatgagcacctgcagggccagctgaacagcatgaagaaggacctgcggctgaagaagctgcccagcaaggtgctggatgacatggatgatgatgatgacctgagcacagatggcggcagcctgtatgaggcccctgtgtcctacaccttcagcaaggacagcacagtggccagccagatctag

SEQ ID NO: 147773 - DNA, 2061 bp, synthetic construct
  misc_feature 1..2061: note = Description of Artificial Sequence: Synthetic coding sequence
  source 1..2061: mol_type = other DNA
atgggagagttcaaggtgcaccgggtgcgcttcttcaactacgtgcccagcggcatccgctgtgtggcctacaacaaccagagcaaccggctggccgtgtccaggacagatggcaccgtggagatctacaacctgagcgccaactacttccaggagaagttcttccctggccacgagagccgggccacagaggccctgtgctgggccgagggccagaggctcttctctgctggcctgaatggagagatcatggagtatgacctgcaggccctgaacatcaagtatgccatggatgccttcggcggccccatctggagcatggccgccagccccagcggcagccagctgctggtgggctgtgaagatggctctgtgaagctgttccagatcaccccagacaagatccagtttgaaagaaactttgaccggcagaagagccgcatcctgagcctgtcctggcaccccagcggcacccacatcgccgccggcagcattgactacatctctgtgtttgatgtgaagagcggcagcgctgtgcacaagatgattgtggaccggcagtacatgggcgtgtccaagaggaaatgtattgtgtggggcgtggccttcctgagtgatggcaccatcatctctgtggacagcgctgggaaggtgcagttctgggacagcgccaccggcaccctggtgaagagccacctgattgccaatgctgatgtgcagagcattgctgtggccgaccaggaggacagctttgtggtgggcacagctgagggcaccgtcttccacttccagctggtgcctgtgaccagcaacagcagcgagaagcagtgggtgaggaccaagcccttccagcaccacacccatgatgtgaggacagtggcccacagccccacagccctgatcagcggcggcacagacacccacctggtgttccggcccctgatggagaaggtggaggtgaagaactatgatgctgccctgaggaagatcaccttcccccaccgctgcctgatcagctgcagcaagaagaggcagctgctgctcttccagtttgcccaccacctggagctgtggaggctgggcagcacagtggccaccgggaagaatggagacaccctgcccctgagcaagaatgctgaccacctgctgcacctgaagaccaagggccctgagaacatcatctgcagctgcatcagcccctgtggctcctggatcgcctacagcacagtgagccgcttcttcctgtaccgcctgaactatgaacatgacaacatcagcctgaagagggtgtccaagatgcctgccttcctgcggagcgccctgcagatcctcttcagcgaggacagcaccaagctgtttgtggccagcaaccagggcgccctgcacatcgtgcagctgagcggcggcagcttcaagcacctgcacgccttccagccccagagcggcaccgtggaggccatgtgcctgctggccgtgtccccagatggcaactggctggccgccagcggcaccagcgctggggtgcacgtgtacaacgtgaagcagctgaagctgcactgcaccgtgcctgcctacaacttccctgtgacagccatggccatcgcccccaacaccaacaacctggtgattgcccacagcgaccagcaggtgtttgagtacagcatcccagacaagcagtacacagactggagcaggacagtgcagaagcagggcttccaccacctgtggctgcagagggacacccccatcacccacatctccttccaccccaagaggcccatgcacatcctgctgcatgatgcctacatgttctgcatcatcgacaagagcctgcccctgcccaatgacaagaccctgctgtacaaccccttcccccccaccaatgaaagtgatgtgatcagaagaagaacagcccacgccttcaagatcagcaagatctacaagcccctgctcttcatggacctgctggatgagaggaccctggtggccgtggagcggcccctggatgacatcatcgcccagctgcccccacccatcaagaagaagaagtttggcacctag

SEQ ID NO: 147774 - DNA, 1716 bp, synthetic construct
  misc_feature 1..1716: note = Description of Artificial Sequence: Synthetic coding sequence
  source 1..1716: mol_type = other DNA
atgggagagttcaaggtgcaccgggtgcgcttcttcaactacgtgcccagcggcatccgctgtgtggcctacaacaaccagagcaaccggctggccgtgtccaggacagatggcaccgtggagatctacaacctgagcgccaactacttccaggagaagttcttccctggccacgagagccgggccacagaggccctgtgctgggccgagggccagaggctcttctctgctggcctgaatggagagatcatggagtatgacctgcaggccctgaacatcaagtatgccatggatgccttcggcggccccatctggagcatggccgccagccccagcggcagccagctgctggtgggctgtgaagatggctctgtgaagctgttccagatcaccccagacaagatccagtttgaaagaaactttgaccggcagaagagccgcatcctgagcctgtcctggcaccccagcggcacccacatcgccgccggcagcattgactacatctctgtgtttgatgtgaagagcggcagcgctgtgcacaagatgattgtggaccggcagtacatgggcgtgtccaagaggaaatgtattgtgtggggcgtggccttcctgagtgatggcaccatcatctctgtggacagcgctgggaaggtgcagttctgggacagcgccaccggcaccctggtgaagagccacctgattgccaatgctgatgtgcagagcattgctgtggccgaccaggaggacagctttgtggtgggcacagctgagggcaccgtcttccacttccagctggtgcctgtgaccagcaacagcagcgagaagcagtgggtgaggaccaagcccttccagcaccacacccatgatgtgaggacagtggcccacagccccacagccctgatcagcggcggcacagacacccacctggtgttccggcccctgatggagaaggtggaggtgaagaactatgatgctgccctgaggaagatcaccttcccccaccgctgcctgatcagctgcagcaagaagaggcagctgctgctcttccagtttgcccaccacctggagctgtggaggctgggcagcacagtggccaccggcaccgtggaggccatgtgcctgctggccgtgtccccagatggcaactggctggccgccagcggcaccagcgctggggtgcacgtgtacaacgtgaagcagctgaagctgcactgcaccgtgcctgcctacaacttccctgtgacagccatggccatcgcccccaacaccaacaacctggtgattgcccacagcgaccagcaggtgtttgagtacagcatcccagacaagcagtacacagactggagcaggacagtgcagaagcagggcttccaccacctgtggctgcagagggacacccccatcacccacatctccttccaccccaagaggcccatgcacatcctgctgcatgatgcctacatgttctgcatcatcgacaagagcctgcccctgcccaatgacaagaccctgctgtacaaccccttcccccccaccaatgaaagtgatgtgatcagaagaagaacagcccacgccttcaagatcagcaagatctacaagcccctgctcttcatggacctgctggatgagaggaccctggtggccgtggagcggcccctggatgacatcatcgcccagctgcccccacccatcaagaagaagaagtttggcacctag

SEQ ID NO: 147775 - DNA, 1023 bp, synthetic construct
  misc_feature 1..1023: note = Description of Artificial Sequence: Synthetic coding sequence
  source 1..1023: mol_type = other DNA
atggccctgcggctgctgcggcgggccgcccggggagctgctgctgctgccctgctgcggctgaaggccagcctggccgctgacatcccccggctgggctacagcagcagcagccaccacaagtacatccccaggagagctgtgctgtatgtgcctggaaatgatgagaagaagatcaagaagatccccagcctgaatgtggactgtgctgtgctggactgtgaagatggagtggccgccaacaagaagaatgaggcccggctgcgcatcgtgaagaccctggaggacatcgacctgggccccacagagaagtgtgtgcgggtgaacagcgtgagcagcggcctggccgaggaggacctggagaccctgctgcagagccgggtgctgcccagcagcctgatgctgcccaaggtggagagccctgaggagatccagtggtttgctgacaagttctccttccacctgaagggcaggaagctggagcagcccatgaacctgatcccctttgtggagacagccatgggcctgctgaacttcaaggctgtgtgtgaggagaccctgaaggtgggcccccaggtgggcctcttcctggatgctgtggtgtttggaggagaggacttccgggccagcattggagccaccagcagcaaggagaccctggacatcctgtatgcccggcagaagatcgtggtgattgccaaggccttcggcctgcaggccatcgacctggtgtacatcgacttcagagatggagctggcctgctgcggcagagccgggagggcgccgccatgggcttcaccgggaagcaggtgatccaccccaaccagattgctgtggtgcaggagcagttcagccccagccctgagaagatcaagtgggccgaggagctgattgctgccttcaaggagcaccagcagctgggcaaaggagccttcaccttccagggctccatgattgacatgcccctgctgaagcaggcccagaacacagtgaccctggccaccagcatcaaggagaagtag

SEQ ID NO: 147776 - DNA, 921 bp, synthetic construct
  misc_feature 1..921: note = Description of Artificial Sequence: Synthetic coding sequence
  source 1..921: mol_type = other DNA
atggccctgcggctgctgcggcgggccgcccggggagctgctgctgctgccctgctgcggctgaaggccagcctggccgctgacatcccccggctgggctacagcagcagcagccaccacaagtacatccccaggagagctgtgctgtatgtgcctggaaatgatgagaagaagatcaagaagatccccagcctgaatgtggactgtgctgtgctggactgtgaagatggagtggccgccaacaagaagaatgaggcccggctgcgcatcgtgaagaccctggaggacatcgacctgggccccacagagaagtgtgtgcgggtgaacagcgtgagcagcggcctggccgaggaggacctggagaccctgctgcagagccgggtgctgcccagcagcctgatgctgcccaaggtggagagccctgaggagatccagtgggccgtgtgtgaggagaccctgaaggtgggcccccaggtgggcctcttcctggatgctgtggtgtttggaggagaggacttccgggccagcattggagccaccagcagcaaggagaccctggacatcctgtatgcccggcagaagatcgtggtgattgccaaggccttcggcctgcaggccatcgacctggtgtacatcgacttcagagatggagctggcctgctgcggcagagccgggagggcgccgccatgggcttcaccgggaagcaggtgatccaccccaaccagattgctgtggtgcaggagcagttcagccccagccctgagaagatcaagtgggccgaggagctgattgctgccttcaaggagcaccagcagctgggcaaaggagccttcaccttccagggctccatgattgacatgcccctgctgaagcaggcccagaacacagtgaccctggccaccagcatcaaggagaagtag

SEQ ID NO: 147777 - DNA, 921 bp, synthetic construct; identical to SEQ ID NO: 147776
  misc_feature 1..921: note = Description of Artificial Sequence: Synthetic coding sequence
  source 1..921: mol_type = other DNA

SEQ ID NO: 147778 - DNA, 1023 bp, synthetic construct; identical to SEQ ID NO: 147775
  misc_feature 1..1023: note = Description of Artificial Sequence: Synthetic coding sequence
  source 1..1023: mol_type = other DNA

SEQ ID NO: 147779 - DNA, 546 bp, synthetic construct
  misc_feature 1..546: note = Description of Artificial Sequence: Synthetic coding sequence
  source 1..546: mol_type = other DNA
aatgaggcccggctgagaattgtgaagaccctggaggacatcgacctgggccccacagagaagtgtgtgcgggtgaacagcgtgagcagcggcctggccgaggaggacctggagaccctgctgcagagccgggtgctgcccagcagcctgatgctgcccaaggtggagagccctgaggagatccagtggtttgctgacaagttctccttccacctgaagggcaggaagctggagcagcccatgaacctgatcccctttgtggagacagccatgggcctgctgaacttcaaggctgtgtgtgaggagaccctgaaggtgggcccccaggtgggcctcttcctggatgctgtggtgtttggaggagaggacttccgggccagcattggagtgaaggacatcagcctgagcctcttcctgtgtgtgtgtgtgtacatgtgtgtgtacatcttcagcctgcccctgaaggatggccacctgcacaacaacgtgtacctgcccaccatgaccatggtgttccatgacaatggcatggacaccaccagctag

SEQ ID NO: 147780 - DNA, 312 bp, synthetic construct
  misc_feature 1..312: note = Description of Artificial Sequence: Synthetic coding sequence
  source 1..312: mol_type = other DNA
ctgcaggccatcgacctggtgtacatcgacttcagagatggagctggcctgctgcggcagagccgggagggcgccgccatgggcttcaccgggaagcaggtgatccaccccaaccagattgctgtggtgcaggagcagttcagccccagccctgagaagatcaagtgggccgaggagctgattgctgccttcaaggagcaccagcagctgggcaagggggccttcaccttccagggctccatgattgacatgcccctgctgaagcaggcccagaacacagtgaccctggccaccagcatcaaggagaagtag

SEQ ID NO: 147781 - DNA, 270 bp, synthetic construct
  misc_feature 1..270: note = Description of Artificial Sequence: Synthetic coding sequence
  source 1..270: mol_type = other DNA
gaggagctgattgctgccttcaaggagcaccagcagctgggcaaggtgggccgctactgctgctcctggctgtgcatccagcccttccccagcagccctggccagaggagccagagcatcagccgggtgcccggccgctactgggtgctgggcgcccgctcctgggagagcaagggggccttcaccttccagggctccatgattgacatgcccctgctgaagcaggcccagaacacagtgaccctggccaccagcatcaaggagaagtag

SEQ ID NO: 147782 - DNA, 444 bp, synthetic construct
  misc_feature 1..444: note = Description of Artificial Sequence: Synthetic coding sequence
  source 1..444: mol_type = other DNA
aatgaggcccggctgagaattgtgaagaccctggaggacatcgacctgggccccacagagaagtgtgtgcgggtgaacagcgtgagcagcggcctggccgaggaggacctggagaccctgctgcagagccgggtgctgcccagcagcctgatgctgcccaaggtggagagccctgaggagatccagtgggccgtgtgtgaggagaccctgaaggtgggcccccaggtgggcctcttcctggatgctgtggtgtttggaggagaggacttccgggccagcattggagtgaaggacatcagcctgagcctcttcctgtgtgtgtgtgtgtacatgtgtgtgtacatcttcagcctgcccctgaaggatggccacctgcacaacaacgtgtacctgcccaccatgaccatggtgttccatgacaatggcatggacaccaccagctag

SEQ ID NO: 147783 - DNA, 909 bp, synthetic construct
  misc_feature 1..909: note = Description of Artificial Sequence: Synthetic coding sequence
  source 1..909: mol_type = other DNA
atggccctgcggctgctgcggcgggccgcccggggagctgctgctgctgccctgctgcggctgaaggccagcctggccgctgacatcccccggctgggctacagcagcagcagccaccacaagtacatccccaggagagctgtgctgtatgtgcctggaaatgatgagaagaagatcaagaagatccccagcctgaatgtggactgtgctgtgctggactgtgaagatggagtggccgccaacaagaagaatgaggcccggctgcgcatcgtgaagaccctggaggacatcgacctgggccccacagagaagtgtgtgcgggtgaacagcgtgagcagcggcctggccgaggaggacctggagaccctgctgcagagccgggtgctgcccagcagcctgatgctgcccaaggtggagagccctgaggagatccagtgggccgtgtgtgaggagaccctgaaggtgggcccccaggtgggcctcttcctggatgctgtggtgtttggaggagaggacttccgggccagcattggagccaccagcagcaaggagaccctggacatcctgtatgcccggcagaagatcgtggtgattgccaaggccttcggcctgcaggccatcgacctggtgtacatcgacttcagagatggagctggcctgctgcggcagagccgggagggcgccgccatgggcttcaccgggaagcaggtgatccaccccaaccagattgctgtggtgcaggagcagttcagccccagccctgagaagatcaagtgggccgaggagctgattgctgccttcaaggagcaccagcagctgggcaagacagtgtcctgcagcgccagccaggccggcgtgcagtggagggacctgggcagcctgcagcccccacctcctggcttcaagtag

SEQ ID NO: 147784 - DNA, 1401 bp, synthetic construct
  misc_feature 1..1401: note = Description of Artificial Sequence: Synthetic coding sequence
  source 1..1401: mol_type = other DNA
atggccctgctgacagctgctgcccggctgctgggcaccaagaatgccagctgcctggtgctggccgcccggcatgccagcgccagcagcaccaacctgaaggacatcctggccgacctgatccccaaggagcaggcccgcatcaagaccttccggcagcagcacggcaagacagtggtgggccagatcaccgtggacatgatgtatggaggcatgaggggcatgaagggcctggtgtatgagacctctgtgctggaccctgatgagggcatccgcttccggggcttcagcatccctgagtgccagaagctgctgcccaaggccaagggcggggaggagcccctgcctgagggcctcttctggctgctggtgacaggccacatccccacagaggagcaggtgtcctggctgagcaaggagtgggccaagagagctgccctgcccagccacgtggtgaccatgctggacaacttccccaccaacctgcaccccatgagccagctgtctgctgctgtgacagccctgaacagcgagagcaactttgcccgggcctatgcccagggcatcagcaggaccaagtactgggagctgatctatgaggacagcatggacctgattgccaagctgccctgtgtggccgccaagatctacagaaacctgtaccgggagggcagcggcattggagccatcgacagcaacctggactggagccacaacttcaccaacatgctgggctacacagaccaccagttcacagagctgacccggctgtacctgaccatccacagcgaccatgaaggaggaaatgtgtctgcccacaccagccacctggtgggcagcgccctgagtgacccctacctgagctttgctgctgccatgaatggcctggccggccccctgcacggcctggccaaccaggaggtgctggtgtggctgacccagctgcagaaggaggtgggcaaggatgtgtctgatgagaagctgcgggactacatctggaacaccctgaacagcggccgggtggtgcccggctacggccatgctgtgctgaggaagacagacccccgctacacctgccagcgggagtttgccctgaagcacctgcccaatgaccccatgttcaagctggtggcccagctgtacaagatcgtgcccaacgtgctgctggagcagggcaaggccaagaacccctggcccaacgtggatgcccacagcggcgtgctgctgcagtactacggcatgacagagatgaactactacacagtgctgtttggagtgtcccgggccctgggcgtgctggcccagctgatctggagccgggccctgggcttccccctggagcggcccaagtccatgagcacagagggcctgatgaagtttgtggacagcaagtctggatag

SEQ ID NO: 147785 - DNA, 537 bp, synthetic construct
  misc_feature 1..537: note = Description of Artificial Sequence: Synthetic coding sequence
  source 1..537: mol_type = other DNA
atggccctgctgacagctgctgcccggctgctgggcaccaagaatgccagctgcctggtgctggccgcccggcatgccagcgccagcagcaccaacctgaaggacatcctggccgacctgatccccaaggagcaggcccgcatcaagaccttccggcagcagcacggcaagacagtggtgggccagatcaccgtggacatgatgtatggaggcatgaggggcatgaagggcctggtgtatgagacctctgtgctggaccctgatgagggcatccgcttccggggcttcagcatccctgagtgccagaagctgctgcccaaggccaagggcggggaggagcccctgcctgagggcctcttctggctgctggtgacaggccacatccccacagaggagcaggtgtcctggctgagcaaggagtgggccaagagagctgccctgcccagccacgtggtgaccatgctggacaacttccccaccaacctgcaccccatgagccagctgtctgctgctgtgacagccctgaacagcgagtag

SEQ ID NO: 147786 - DNA, 6084 bp, synthetic construct
  misc_feature 1..6084: note = Description of Artificial Sequence: Synthetic coding sequence
  source 1..6084: mol_type = other DNA
atgctgaagttcaagtacggggccaggaaccccctggatgctggagctgctgagcccatcgccagccgggccagccggctgaacctcttcttccagggcaagccacccttcatgacccagcagcagatgagccccctgagccgggagggcatcctggatgccctgtttgtgctgtttgaagaatgttcccagcctgccctgatgaagatcaagcacgtgagcaactttgtgaggaagtacagcgacaccatcgccgagctgcaggagctgcagcccagcgccaaggactttgaggtgcgcagcctggtgggctgcggccactttgctgaggtgcaggtggtgcgggagaaggccactggagacatctatgccatgaaggtgatgaagaagaaggccctgctggcccaggagcaggtgtccttctttgaggaggagaggaacatcctgagccgcagcaccagcccctggatcccccagctgcagtatgccttccaggacaagaaccacctgtacctggtgatggagtaccagcccggcggggacctgctgagcctgctgaacagatatgaggaccagctggatgaaaatctcatccagttctacctggccgagctgatcctggccgtgcacagcgtgcacctgatgggctacgtgcaccgggacatcaagccagagaacatcctggtggacagaacaggccacatcaagctggtggactttggcagcgctgccaagatgaacagcaacaagatggtgaatgccaagctgcccatcggcaccccagactacatggcccctgaggtgctgactgtgatgaatggagatggcaagggcacctacggcctggactgtgactggtggagcgtgggcgtcatcgcctatgagatgatctacggccgcagcccctttgctgagggcaccagcgcccggaccttcaacaacatcatgaacttccagcgcttcctgaagttcccagatgaccccaaggtgtccagtgacttcctggacctgatccagagcctgctgtgtggccagaaggagcggctgaagtttgagggcctgtgctgccaccccttcttcagcaagattgactggaacaacatccggaacagccccccaccatttgtgcccaccctgaagagtgatgatgacaccagcaactttgatgagcctgagaagaacagctgggtgagcagcagcccctgccagctgagccccagcggcttcagcggggaggagctgccctttgtgggcttctcctacagcaaggccctgggcatcctgggccgctctgagagcgtggtgtctggcctggacagccctgccaagaccagctccatggagaagaagctgctgatcaagagcaaggagctgcaggacagccaggacaagtgccacaagatggagcaggagatgacccggctgcacagaagagtgtctgaggtggaggccgtgctgagccagaaggaggtggagctgaaggccagcgagacccagaggagcctgctggagcaggacctggccacctacatcacagaatgtagcagcctgaagaggagcctggagcaggccaggatggaggtgtcccaggaggatgacaaggccctgcagctgctgcatgacatccgggagcagagcaggaagctgcaggagatcaaggagcaggagtaccaggcccaggtggaggagatgaggctgatgatgaaccagctggaggaggacctggtgtctgcccggcggcggagtgacctgtatgaaagtgagctgcgggagagccggctggccgctgaggagttcaagaggaaggccacagagtgccagcacaagctgctgaaggccaaggaccagggcaagccagaggtgggggagtatgccaagctggagaagatcaatgctgagcagcagctgaagatccaggagctgcaggagaagctggagaaggctgtgaaggccagcacagaggccacagagctgctgcagaacatccggcaggccaaggagagagctgagcgggagctggagaagctgcagaaccgggaggacagcagcgagggcatcaggaagaagctggtggaggccgaggagctggaggagaagcaccgggaggcccaggtgtctgcccagcacctggaggtgcacctgaagcagaaggagcagcactatgaggagaagatcaaggtgctggacaaccagatcaagaaggacctggccgacaaggagaccctggagaacatgatgcagagacatgaggaggaggcccacgagaagggcaagatcctgtctgagcagaaggccatgatcaatgccatggacagcaagatccgcagcctggagcagagaattgtggagctgtctgaggccaacaagctggccgccaacagcagcctcttcacccagaggaacatgaaggcccaggaggagatgatcagcgagctgcggcagcagaagttctacctggagacccaggccggcaagctggaggcccagaacaggaagctggaggagcagctggagaagatcagccaccaggaccacagcgacaagaaccggctgctggagctggagacccggctgcgggaggtgtccctggagcacgaggagcagaagctggagctgaagaggcagctgacagagctgcagctgagcctgcaggagcgggagagccagctgacagccctgcaggccgcccgggccgccctggagagccagctgcggcaggccaagacagagctggaggagaccacagctgaggccgaggaggagatccaggccctgacagcccacagagatgagatccagaggaagtttgatgccctgaggaacagctgcaccgtcatcacagacctggaggagcagctgaaccagctgacagaggacaatgctgagctgaacaaccagaacttctacctgagcaagcagctggatgaggccagcggggccaatgatgagatcgtgcagctgcggtctgaggtggaccacctgcggcgggagatcacagagcgggagatgcagctgaccagccagaagcagaccatggaggccctgaagaccacctgcaccatgctggaggagcaggtgatggacctggaggccctgaatgatgagctgctggagaaggagcggcagtgggaggcctggaggtctgtgctgggagatgagaagagccagtttgagtgccgggtgcgggagctgcagaggatgctggacacagagaagcagagccgggcccgggctgaccagaggatcacagagagccggcaggtggtggagctggccgtgaaggagcacaaggccgagatcctggccctgcagcaggccctgaaggagcagaagctgaaggccgagagcctgagtgacaagctgaatgacctggagaagaagcacgccatgctggagatgaatgcccggagcctgcagcagaagctggagacagagcgggagctgaagcagaggctgctggaggagcaggccaagctgcagcagcagatggacctgcagaagaaccacatcttccggctgacccagggcctgcaggaggccctggacagagctgacctgctgaagacagagaggagtgacctggagtaccagctggagaacatccaggtgctgtacagccatgagaaggtgaagatggagggcaccatcagccagcagaccaagctgattgacttcctgcaggccaagatggaccagcctgccaagaagaagaagggcctcttcagcaggaggaaggaggaccctgccctgcccacccaggtgcccctgcagtacaatgagctgaagctggccctggagaaggagaaggcccgctgtgccgagctggaggaggccctgcagaagacccgcatcgagctgcggagcgcccgggaggaggccgcccacaggaaggccacagaccacccccaccccagcaccccagccacagcccggcagcagatcgccatgtctgccatcgtgcgcagccctgagcaccagcccagcgccatgagcctgctggccccacccagcagcaggaggaaggagagcagcaccccagaggagttcagccggcggctgaaggagaggatgcaccacaacatcccccaccgcttcaacgtgggcctgaacatgagggccaccaagtgtgctgtgtgcctggacacagtgcacttcggccggcaggccagcaagtgcctggagtgccaggtgatgtgccaccccaagtgcagcacctgcctgcctgccacctgtggcctgcctgcagaatatgccacccacttcacagaggccttctgccgggacaagatgaacagccctggcctgcagaccaaggagcccagcagcagcctgcacctggagggctggatgaaggtgcccaggaacaacaagaggggccagcagggctgggacaggaagtacatcgtgctggagggcagcaaggtgctgatctatgacaatgaggcccgggaggccggccagaggcctgtggaggagtttgagctgtgcctgcctgatggagatgtgtccatccatggagctgtgggcgccagcgagctggccaacacagccaaggcagatgtgccctacatcctgaagatggagagccacccccacaccacctgctggccaggccgcaccctgtacctgctggcccccagcttcccagacaagcagcgctgggtgacagccctggagagcgtggtggccggcggccgggtgtcccgggagaaggccgaggctgatgccaagctgctgggcaacagcctgctgaagctggagggagatgaccggctggacatgaactgcaccctgcccttcagtgaccaggtggtgctggtgggcacagaggagggcctgtatgccctgaatgtgctgaagaacagcctgacccacgtgcccggcattggagctgtgttccagatctacatcatcaaggacctggagaagctgctgatgattgctggggaggagcgggccctgtgcctggtggatgtgaagaaggtgaagcagagcctggcccagagccacctgcctgcccagcctgacatcagccccaacatctttgaggccgtgaagggctgccacctgtttggagctgggaagattgaaaatggcctgtgcatctgtgccgccatgcccagcaaggtggtgatcctgcgctacaatgaaaacctgagcaagtactgcatcaggaaggagattgagaccagcgagccctgcagctgcatccacttcaccaactacagcatcctgattggcaccaacaagttctatgaaattgacatgaagcagtacaccctggaggagttcctggacaagaatgaccacagcctggccccagctgtgtttgctgccagcagcaacagcttccctgtgtccatcgtgcaggtgaacagcgctggccagcgggaggagtacctgctgtgcttccatgaatttggagtgtttgtggacagctatggccgccgcagcaggacagatgacctgaagtggagccggctgcccctggcctttgcctaccgggagccctacctgtttgtgacccacttcaacagcctggaggtgattgagatccaggcccggagcagcgctggcaccccagcccgggcctacctggacatccccaacccccgctacctgggccctgccatcagcagcggggccatctacctggccagcagctaccaggacaagctgcgggtcatctgctgcaagggcaacctggtgaaggagagcggcacagagcaccaccggggccccagcaccagccgcagcagccccaacaagaggggcccccccacctacaatgagcacatcaccaagagggtggccagcagccctgcccctcctgagggccccagccacccccgggagcccagcaccccccaccgctaccgggagggccgcacagagctgcggcgggacaagagccctggccggcccctggagcgggagaagagccctggccgcatgctgagcacccggcgggagaggagccctggccgcctgtttgaggacagcagccggggccgcctgcctgctggagctgtgaggacccccctgagccaggtgaacaaggtgtgggaccagagctctgtgtag

SEQ ID NO: 147787 - DNA, 6210 bp, synthetic construct
  misc_feature 1..6210: note = Description of Artificial Sequence: Synthetic coding sequence
  source 1..6210: mol_type = other DNA
atgctgaagttcaagtacggggccaggaaccccctggatgctggagctgctgagcccatcgccagccgggccagccggctgaacctcttcttccagggcaagccacccttcatgacccagcagcagatgagccccctgagccgggagggcatcctggatgccctgtttgtgctgtttgaagaatgttcccagcctgccctgatgaagatcaagcacgtgagcaactttgtgaggaagtacagcgacaccatcgccgagctgcaggagctgcagcccagcgccaaggactttgaggtgcgcagcctggtgggctgcggccactttgctgaggtgcaggtggtgcgggagaaggccactggagacatctatgccatgaaggtgatgaagaagaaggccctgctggcccaggagcaggtgtccttctttgaggaggagaggaacatcctgagccgcagcaccagcccctggatcccccagctgcagtatgccttccaggacaagaaccacctgtacctggtgatggagtaccagcccggcggggacctgctgagcctgctgaacagatatgaggaccagctggatgaaaatctcatccagttctacctggccgagctgatcctggccgtgcacagcgtgcacctgatgggctacgtgcaccgggacatcaagccagagaacatcctggtggacagaacaggccacatcaagctggtggactttggcagcgctgccaagatgaacagcaacaagatggtgaatgccaagctgcccatcggcaccccagactacatggcccctgaggtgctgactgtgatgaatggagatggcaagggcacctacggcctggactgtgactggtggagcgtgggcgtcatcgcctatgagatgatctacggccgcagcccctttgctgagggcaccagcgcccggaccttcaacaacatcatgaacttccagcgcttcctgaagttcccagatgaccccaaggtgtccagtgacttcctggacctgatccagagcctgctgtgtggccagaaggagcggctgaagtttgagggcctgtgctgccaccccttcttcagcaagattgactggaacaacatccggaacagccccccaccatttgtgcccaccctgaagagtgatgatgacaccagcaactttgatgagcctgagaagaacagctgggtgagcagcagcccctgccagctgagccccagcggcttcagcggggaggagctgccctttgtgggcttctcctacagcaaggccctgggcatcctgggccgctctgagagcgtggtgtctggcctggacagccctgccaagaccagctccatggagaagaagctgctgatcaagagcaaggagctgcaggacagccaggacaagtgccacaagatggagcaggagatgacccggctgcacagaagagtgtctgaggtggaggccgtgctgagccagaaggaggtggagctgaaggccagcgagacccagaggagcctgctggagcaggacctggccacctacatcacagaatgtagcagcctgaagaggagcctggagcaggccaggatggaggtgtcccaggaggatgacaaggccctgcagctgctgcatgacatccgggagcagagcaggaagctgcaggagatcaaggagcaggagtaccaggcccaggtggaggagatgaggctgatgatgaaccagctggaggaggacctggtgtctgcccggcggcggagtgacctgtatgaaagtgagctgcgggagagccggctggccgctgaggagttcaagaggaaggccacagagtgccagcacaagctgctgaaggccaaggaccagggcaagccagaggtgggggagtatgccaagctggagaagatcaatgctgagcagcagctgaagatccaggagctgcaggagaagctggagaaggctgtgaaggccagcacagaggccacagagctgctgcagaacatccggcaggccaaggagagagctgagcgggagctggagaagctgcagaaccgggaggacagcagcgagggcatcaggaagaagctggtggaggccgaggagcggcggcacagcctggagaacaaggtgaagaggctggagaccatggagcggcgggagaaccggctgaaggatgacatccagaccaagagccagcagatccagcagatggctgacaagatcctggagctggaggagaagcaccgggaggcccaggtgtctgcccagcacctggaggtgcacctgaagcagaaggagcagcactatgaggagaagatcaaggtgctggacaaccagatcaagaaggacctggccgacaaggagaccctggagaacatgatgcagagacatgaggaggaggcccacgagaagggcaagatcctgtctgagcagaaggccatgatcaatgccatggacagcaagatccgcagcctggagcagagaattgtggagctgtctgaggccaacaagctggccgccaacagcagcctcttcacccagaggaacatgaaggcccaggaggagatgatcagcgagctgcggcagcagaagttctacctggagacccaggccggcaagctggaggcccagaacaggaagctggaggagcagctggagaagatcagccaccaggaccacagcgacaagaaccggctgctggagctggagacccggctgcgggaggtgtccctggagcacgaggagcagaagctggagctgaagaggcagctgacagagctgcagctgagcctgcaggagcgggagagccagctgacagccctgcaggccgcccgggccgccctggagagccagctgcggcaggccaagacagagctggaggagaccacagctgaggccgaggaggagatccaggccctgacagcccacagagatgagatccagaggaagtttgatgccctgaggaacagctgcaccgtcatcacagacctggaggagcagctgaaccagctgacagaggacaatgctgagctgaacaaccagaacttctacctgagcaagcagctggatgaggccagcggggccaatgatgagatcgtgcagctgcggtctgaggtggaccacctgcggcgggagatcacagagcgggagatgcagctgaccagccagaagcagaccatggaggccctgaagaccacctgcaccatgctggaggagcaggtgatggacctggaggccctgaatgatgagctgctggagaaggagcggcagtgggaggcctggaggtctgtgctgggagatgagaagagccagtttgagtgccgggtgcgggagctgcagaggatgctggacacagagaagcagagccgggcccgggctgaccagaggatcacagagagccggcaggtggtggagctggccgtgaaggagcacaaggccgagatcctggccctgcagcaggccctgaaggagcagaagctgaaggccgagagcctgagtgacaagctgaatgacctggagaagaagcacgccatgctggagatgaatgcccggagcctgcagcagaagctggagacagagcgggagctgaagcagaggctgctggaggagcaggccaagctgcagcagcagatggacctgcagaagaaccacatcttccggctgacccagggcctgcaggaggccctggacagagctgacctgctgaagacagagaggagtgacctggagtaccagctggagaacatccaggtgctgtacagccatgagaaggtgaagatggagggcaccatcagccagcagaccaagctgattgacttcctgcaggccaagatggaccagcctgccaagaagaagaagggcctcttcagcaggaggaaggaggaccctgccctgcccacccaggtgcccctgcagtacaatgagctgaagctggccctggagaaggagaaggcccgctgtgccgagctggaggaggccctgcagaagacccgcatcgagctgcggagcgcccgggaggaggccgcccacaggaaggccacagaccacccccaccccagcaccccagccacagcccggcagcagatcgccatgtctgccatcgtgcgcagccctgagcaccagcccagcgccatgagcctgctggccccacccagcagcaggaggaaggagagcagcaccccagaggagttcagccggcggctgaaggagaggatgcaccacaacatcccccaccgcttcaacgtgggcctgaacatgagggccaccaagtgtgctgtgtgcctggacacagtgcacttcggccggcaggccagcaagtgcctggagtgccaggtgatgtgccaccccaagtgcagcacctgcctgcctgccacctgtggcctgcctgcagaatatgccacccacttcacagaggccttctgccgggacaagatgaacagccctggcctgcagaccaaggagcccagcagcagcctgcacctggagggctggatgaaggtgcccaggaacaacaagaggggccagcagggctgggacaggaagtacatcgtgctggagggcagcaaggtgctgatctatgacaatgaggcccgggaggccggccagaggcctgtggaggagtttgagctgtgcctgcctgatggagatgtgtccatccatggagctgtgggcgccagcgagctggccaacacagccaaggcagatgtgccctacatcctgaagatggagagccacccccacaccacctgctggccaggccgcaccctgtacctgctggcccccagcttcccagacaagcagcgctgggtgacagccctggagagcgtggtggccggcggccgggtgtcccgggagaaggccgaggctgatgccaagctgctgggcaacagcctgctgaagctggagggagatgaccggctggacatgaactgcaccctgcccttcagtgaccaggtggtgctggtgggcacagaggagggcctgtatgccctgaatgtgctgaagaacagcctgacccacgtgcccggcattggagctgtgttccagatctacatcatcaaggacctggagaagctgctgatgattgctggggaggagcgggccctgtgcctggtggatgtgaagaaggtgaagcagagcctggcccagagccacctgcctgcccagcctgacatcagccccaacatctttgaggccgtgaagggctgccacctgtttggagctgggaagattgaaaatggcctgtgcatctgtgccgccatgcccagcaaggtggtgatcctgcgctacaatgaaaacctgagcaagtactgcatcaggaaggagattgagaccagcgagccctgcagctgcatccacttcaccaactacagcatcctgattggcaccaacaagttctatgaaattgacatgaagcagtacaccctggaggagttcctggacaagaatgaccacagcctggccccagctgtgtttgctgccagcagcaacagcttccctgtgtccatcgtgcaggtgaacagcgctggccagcgggaggagtacctgctgtgcttccatgaatttggagtgtttgtggacagctatggccgccgcagcaggacagatgacctgaagtggagccggctgcccctggcctttgcctaccgggagccctacctgtttgtgacccacttcaacagcctggaggtgattgagatccaggcccggagcagcgctggcaccccagcccgggcctacctggacatccccaacccccgctacctgggccctgccatcagcagcggggccatctacctggccagcagctaccaggacaagctgcgggtcatctgctgcaagggcaacctggtgaaggagagcggcacagagcaccaccggggccccagcaccagccgcagcagccccaacaagaggggcccccccacctacaatgagcacatcaccaagagggtggccagcagccctgcccctcctgagggccccagccacccccgggagcccagcaccccccaccgctaccgggagggccgcacagagctgcggcgggacaagagccctggccggcccctggagcgggagaagagccctggccgcatgctgagcacccggcgggagaggagccctggccgcctgtttgaggacagcagccggggccgcctgcctgctggagctgtgaggacccccctgagccaggtgaacaaggtgtgggaccagagctctgtgtag

SEQ ID NO: 147788 - DNA, 696 bp, synthetic construct
  misc_feature 1..696: note = Description of Artificial Sequence: Synthetic coding sequence
  source 1..696: mol_type = other DNA
atggaccctgagcacgccaagccagagagcagcgaggcccccagcggcaacctgaagcagcctgagacagctgctgccctggccagcagcggctctgtggtgtcctctgtgcccaaggcccagaggaacatcagcgccaagacagcccccaggaagcaccctgctgtgtccatccgcagcgcccagagcgctgctgctgcccggccccagggcagcgagggcacagcccccagcaggaaggccaccacccggcccccacccaagcccaccctgcccccacccaccccatctgcccacacagagagcaagctgctgaatgagatggccatcaaggagcgggtggagggccgggccaaggtgccctacaagttccgggacagcctgaagcgcttctccttcagccccaccggcatgctgaagatcctgcggctgagcctcatcctgggcgccctggcctgcttcatcatcacccaggccaatgaaagcttcatcaccatcaccagcctggagatctgcatcgtggtgttcttcatcctgatctacgtgctgaccctgcaccacctgctgacctacctgcactggcccctgctggacctgaccaacagcatcatcacagctgtgttcctgtctgtggtggccatcctggccatgcaggagaagaagaggaggcacctgctgtatgtgggcggccgctag

SEQ ID NO: 147789 - DNA, 369 bp, synthetic construct
  misc_feature 1..369: note = Description of Artificial Sequence: Synthetic coding sequence
  source 1..369: mol_type = other DNA
atggaccctgagcacgccaagccagagagcagcgaggcccccagcggcaacctgaagcagcctgagacagctgctgccctggccagcagcggctctgtggacctgaccaacagcatcatcacagctgtgttcctgtctgtggtggccatcctggccatgcaggagaagaagaggaggcacctgctgtatgtgggcggcagcctgtgcctgacagctgtgattgtgtgctgcattgatgcctttgtggtgaccaccaagatgaggaccaacctgaagcgcttcctgggcgtggaggtggagaggaagctgagccctgccaaggatgcctacccagagactggaccagatgccccccagaggcctgcctag

SEQ ID NO: 147790 - DNA, 351 bp, synthetic construct
  misc_feature 1..351: note = Description of Artificial Sequence: Synthetic coding sequence
  source 1..351: mol_type = other DNA
atggaccctgagcacgccaagccagagagcagcgaggcccccagcggcaacctgaagcagcctgagacagctgctgccctggacctgaccaacagcatcatcacagctgtgttcctgtctgtggtggccatcctggccatgcaggagaagaagaggaggcacctgctgtatgtgggcggcagcctgtgcctgacagctgtgattgtgtgctgcattgatgcctttgtggtgaccaccaagatgaggaccaacctgaagcgcttcctgggcgtggaggtggagaggaagctgagccctgccaaggatgcctacccagagactggaccagatgccccccagaggcctgcctag

SEQ ID NO: 147791 - DNA, 279 bp, synthetic construct
  misc_feature 1..279: note = Description of Artificial Sequence: Synthetic coding sequence
  source 1..279: mol_type = other DNA
atggaccctgagcacgccaagccagagagcagcgaggcccccagcggcaacctgaagcagcctgagacagctgctgccctggccagcagcggctctgtggtgtcctctgtgcccaaggcccagaggaacatcagcgccaagacagcccccaggaagcaccctgctgtgtccatccgcagcgcccagagcgctgctgctgcccggccccagggcagcgagggcacagcccccagccgcatcctgcccaccgtgtccctgcagctgtgcagcttccagtag

SEQ ID NO: 147792 - DNA, 861 bp, synthetic construct
  misc_feature 1..861: note = Description of Artificial Sequence: Synthetic coding sequence
  source 1..861: mol_type = other DNA
atggaccctgagcacgccaagccagagagcagcgaggcccccagcggcaacctgaagcagcctgagacagctgctgccctggccagcagcggctctgtggtgtcctctgtgcccaaggcccagaggaacatcagcgccaagacagcccccaggaagcaccctgctgtgtccatccgcagcgcccagagcgctgctgctgcccggccccagggcagcgagggcacagcccccagcaggaaggccaccacccggcccccacccaagcccaccctgcccccacccaccccatctgcccacacagagagcaagctgctgaatgagatggccatcaaggagcgggtggagggccgggccaaggtgccctacaagttccgggacagcctgaagcgcttctccttcagccccaccggcatgctgaagatcctgcggctgagcctcatcctgggcgccctggcctgcttcatcatcacccaggccaatgaaagcttcatcaccatcaccagcctggagatctgcatcgtggtgttcttcatcctgatctacgtgctgaccctgcaccacctgctgacctacctgcactggcccctgctggacctgaccaacagcatcatcacagctgtgttcctgtctgtggtggccatcctggccatgcaggagaagaagaggaggcacctgctgtatgtgggcggcagcctgtgcctgacagctgtgattgtgtgctgcattgatgcctttgtggtgaccaccaagatgaggaccaacctgaagcgcttcctgggcgtggaggtggagaggaagctgagccctgccaaggatgcctacccagagactggaccagatgccccccagaggcctgcctag

SEQ ID NO: 147793 - DNA, 510 bp, synthetic construct
  misc_feature 1..510: note = Description of Artificial Sequence: Synthetic coding sequence
  source 1..510: mol_type = other DNA
atggaccctgagcacgccaagccagagagcagcgaggcccccagcggcaacctgaagcagcctgagacagctgctgccctgagcctcatcctgggcgccctggcctgcttcatcatcacccaggccaatgaaagcttcatcaccatcaccagcctggagatctgcatcgtggtgttcttcatcctgatctacgtgctgaccctgcaccacctgctgacctacctgcactggcccctgctggacctgaccaacagcatcatcacagctgtgttcctgtctgtggtggccatcctggccatgcaggagaagaagagaagacacctgctgtatgtgggcggcagcctgtgcctgacagctgtgattgtgtgctgcattgatgcctttgtggtgaccaccaagatgaggaccaacctgaagcgcttcctgggcgtggaggtggagaggaagctgagccctgccaaggatgcctacccagagaccggcccagatgccccccagaggcctgcctag

SEQ ID NO: 147794 - DNA, 345 bp, synthetic construct
  misc_feature 1..345: note = Description of Artificial Sequence: Synthetic coding sequence
  source 1..345: mol_type = other DNA
atggaccctgagcacgccaagccagagagcagcgaggcccccagcggcaacctgaagcagcctgagacagctgctgccctgagcctcatcctgggcgccctggcctgcttcatcatcacccaggccaatgaaagcttcatcaccatcaccagcctggagatctgcatcgtggtgttcttcatcctgatctacgtgctgaccctgcaccacctgctgacctacctgcactggcccctgctggacctgaccaacagcatcatcacagctgtgttcctgtctgtggtggccatcctggccatgcaggagaagaagagaagacacctgctgtatgtgggcggccgctag

SEQ ID NO: 147795 - DNA, 117 bp, synthetic construct
  misc_feature 1..117: note = Description of Artificial Sequence: Synthetic coding sequence
  source 1..117: mol_type = other DNA
atggaccctgagcacgccaagccagagagcagcgaggcccccagcggcaacctgaagcagcctgagacagctgctgccctggaggccgacaaggccaacatgagcaacttcaactag

SEQ ID NO: 147796 - DNA, 87 bp, synthetic construct
  misc_feature 1..87: note = Description of Artificial Sequence: Synthetic coding sequence
  source 1..87: mol_type = other DNA
atggaccctgagcacgccaagccagagagcagcgaggcccccagcggcaacctgaagcagcctgagacagctgctgccctgaggtag

SEQ ID NO: 147797 - DNA, 747 bp, synthetic construct
  misc_feature 1..747: note = Description of Artificial Sequence: Synthetic coding sequence
  source 1..747: mol_type = other DNA
atggcccccaaggccgccaagggggccaagccagagcccgccccagcccctcctcctcctggggccaagccagaggaggacaagaaggatggcaaggagcccagcgacaagccccagaaggctgtgcaggaccacaaggagcccagcgacaagccccagaaggctgtgcagcccaagcatgaggtgggcacccggcggggctgccgccgctaccgctgggagctgaaggacagcaacaaggagttctggctgctgggccacgccgagatcaagatccgcagcctgggctgcctgattgctgccatgatcctgctgagcagcctgactgtgcaccccatcctgcggctcatcatcaccatggagatctccttcttctccttcttcatcctgctgtacagctttgccatccaccgctacatccccttcatcctgtggcccatcagtgacctcttcaatgacctgattgcctgtgccttcctggtgggcgctgtggtgtttgctgtgcgcagcagaagatccatgaacctgcactacctgctggccgtcatcctgattggagctgctggggtgtttgccttcattgatgtgtgcctgcagaggaaccacttccggggcaagaaggccaagaagcacatgctggtgcccccacctgggaaggagaagggcccccagcagggcaaaggacctgagcccgccaagcccccagagcccgggaagcccccaggccctgccaagggcaagaagtag

SEQ ID NO: 147798 - DNA, 588 bp, synthetic construct
  misc_feature 1..588: note = Description of Artificial Sequence: Synthetic coding sequence
  source 1..588: mol_type = other DNA
atggcccccaaggccgccaagggggccaagccagagcccgccccagcccctcctcctcctggggccaagccagaggaggacaagaaggatggcaaggagcccagcgacaagccccagaaggctgtgcaggaccacaaggagcccagcgacaagccccagaaggctgtgcagcccaagcatgaggtgggcacccggcggggctgccgccgctaccgctgggagctgaaggacagcaacaaggagttctggctgctgggccacgccgagatcaagatccgcagcctggacctcttcaatgacctgattgcctgtgccttcctggtgggcgctgtggtgtttgctgtgcgcagccgccgctccatgaacctgcactacctgctggccgtcatcctgattggagctgctggggtgtttgccttcattgatgtgtgcctgcagaggaaccacttccggggcaagaaggccaagaagcacatgctggtgcccccacctgggaaggagaagggcccccagcagggcaagggccctgagcccgccaagcccccagagcccgggaagcccccaggccctgccaagggcaagaagtag

SEQ ID NO: 147799 - DNA, 180 bp, synthetic construct
  misc_feature 1..180: note = Description of Artificial Sequence: Synthetic coding sequence
  source 1..180: mol_type = other DNA
atgtggcccccagaccctgaccctgaccctgaccctgagcctgctgggggcagccggcccggccctgctgtgcccggcctgcgggccctgctgcctgcccgggccttcctgtgcagcctgaagggccctgggggctttgtgtgcacctggtgcagctgcccccaccagcccctgtggtag

SEQ ID NO: 147800 - DNA, 549 bp, synthetic construct
  misc_feature 1..549: note = Description of Artificial Sequence: Synthetic coding sequence
  source 1..549: mol_type = other DNA
atgtggcccccagaccctgaccctgaccctgaccctgagcctgctgggggcagccggcccggccctgctgtgcccggcctgcgggccctgctgcctgcccgggccttcctgtgcagcctgaagggccgcctgctgctggccgagagcggcctgtccttcatcaccttcatctgctacgtggccagcagcgccagcgccttcctgacagcccccctgctggagttcctgctggccctgtacttcctgtttgctgatgccatgcagctgaatgacaagtggcagggcctgtgctggcccatgatggacttcctgcgctgtgtgacagctgccctgatctactttgccatcagcatcacagccatcgccaagtacagtgatggagccagcaaggccgccggcgtgtttggcttctttgccaccatcgtgtttgccacagacttctacctgatcttcaatgatgtggccaagttcctgaagcagggcgacagcgcagatgagaccacagcccacaagacagaggaggagaacagcgacagcgacagcgactag

SEQ ID NO: 147801 - DNA, 549 bp, synthetic construct; identical to SEQ ID NO: 147800
  misc_feature 1..549: note = Description of Artificial Sequence: Synthetic coding sequence
  source 1..549: mol_type = other DNA

SEQ ID NO: 147802 - DNA, 549 bp, synthetic construct; identical to SEQ ID NO: 147800
  misc_feature 1..549: note = Description of Artificial Sequence: Synthetic coding sequence
  source 1..549: mol_type = other DNA

SEQ ID NO: 147803 - DNA, 705 bp, synthetic construct
  misc_feature 1..705: note = Description of Artificial Sequence: Synthetic coding sequence
  source 1..705: mol_type = other DNA
atgaggtctggagaggagctggatggctttgaaggagaggccagcagcacctccatgatcagcggggccagcagcccctaccagcccaccacagagcctgtgtcccagaggcggggcctggccggcctgcgctgtgaccctgactacctgcggggggccctgggccgcctgaaggtggcccaggtgatcctggccctgattgccttcatctgcatcgagaccatcatggcctgcagcccctgtgagggcctgtacttctttgaatttgtgtcctgcagcgcctttgtggtgactggagtgctgctgatcatgttcagcctgaacctgcacatgaggatcccccagatcaactggaacctgacagacctggtgaacacaggcctgagcgccttcctgttcttcatcgccagcatcgtgctggccgccctgaaccacagagctggagctgagattgctgctgtgatcttcggcttcctggccacagctgcctatgctgtgaacaccttcctggccgtgcagaagtggagggtgtctgtgcggcagcagagcaccaatgactacatccgggccaggacagagagcagagatgtggacagcaggcctgagatccagaggctggacaccttctcctacagcaccaacgtgacagtgaggaagaagagccccaccaacctgctgagcctgaaccactggcagctggcctag

SEQ ID NO: 147804 - DNA, 627 bp, synthetic construct
  misc_feature 1..627: note = Description of Artificial Sequence: Synthetic coding sequence
  source 1..627: mol_type = other DNA
atgaggtctggagaggagctggatggctttgaaggagaggccagcagcacctccatgatcagcggggccagcagcccctaccagcccaccacagagcctgtgtcccagaggcggggcctggccggcctgcgctgtgaccctgactacctgcggggggccctgggccgcctgaaggtggcccaggtgatcctggccctgattgccttcatctgcatcgagaccatcatggcctgcagcccctgtgagggcctgtacttctttgaatttgtgtcctgcagcgcctttgtggtgactggagtgctgctgatcatgttcagcctgaacctgcacatgaggatcccccagatcaactggaacctgacagacctggtgaacacaggcctgagcgccttcctgttcttcatcgccagcatcgtgctggccgccctgaaccacagagctggagctgagattgctgctgtgatcttcggcttcctggccacagctgcctatgctgtgaacaccttcctggccgtgcagaagtggagggtgtctgtgcggcagcagagcaccaatgactacatccgggccaggacagagagcagagatgtggacagcaggcctgagatccagaggctggacacctag

SEQ ID NO: 147805 - DNA, 672 bp, synthetic construct
  misc_feature 1..672: note = Description of Artificial Sequence: Synthetic coding sequence
  source 1..672: mol_type = other DNA
atgctgagcgcccgggacagaagagacagacaccctgaggagggcgtggtggccgagctgcagggctttgctgtggacaaggccttcctgaccagccacaagggcatcctgctggagacagagctggccctgaccctcatcatcttcatctgcttcaccgccagcatcagcgcctacatggccgccgccctgctggagttcttcatcaccctggccttcctgttcctgtatgccacccagtactaccagagatttgaccgcatcaactggccctgcctgctgcagggccacggccagagcggcggcccccaccccctggacctgctgagccacagcgccaaggtgcagccccagccctggccaggcctgaccccacctggctggcacaccccagctgctgtgccctgggtgcctgccccagcccctggcttctggagctggctgctgtggttcatctgcttccacagcctgggcagcagtgacttcctgcgctgtgtgtctgccatcatcatcttcctggtggtgtcctttgctgctgtgaccagcagagatggagctgccatcgccgcctttgtgtttggcatcatcctggtgtccatctttgcctatgatgccttcaagatctacagaacagagatggcccctggggccagccagggcgaccagcagtag

SEQ ID NO: 147806 - DNA, 225 bp, synthetic construct
  misc_feature 1..225: note = Description of Artificial Sequence: Synthetic coding sequence
  source 1..225: mol_type = other DNA
atgctgagcgcccgggacagaagagacagacaccctgaggagggcgtggtggccgagctgcagggctttgctgtggacaaggccttcctgaccagccacaagggcatcctgctggagacagagctggtgtttggcatcatcctggtgtccatctttgcctatgatgccttcaagatctacagaacagagatggcccctggggccagccagggcgaccagcagtag

SEQ ID NO: 147807 - DNA, 471 bp, synthetic construct
  misc_feature 1..471: note = Description of Artificial Sequence: Synthetic coding sequence
  source 1..471: mol_type = other DNA
atgctgagcgcccgggacagaagagacagacaccctgaggagggcgtggtggccgagctgcagggctttgctgtggacaaggccttcctgaccagccacaagggcatcctgctggagacagagctggccctgaccctcatcatcttcatctgcttcaccgccagcatcagcgcctacatggccgccgccctgctggagttcttcatcaccctggccttcctgttcctgtatgccacccagtactaccagagatttgaccgcatcaactggccctgcctggacttcctgcgctgtgtgtctgccatcatcatcttcctggtggtgtcctttgctgctgtgaccagcagagatggagctgccatcgccgcctttgtgtttggcatcatcctggtgtccatctttgcctatgatgccttcaagatctacagaacagagatggcccctggggccagccagggcgaccagcagtag

SEQ ID NO: 147808 - DNA, 378 bp, synthetic construct
  misc_feature 1..378: note = Description of Artificial Sequence: Synthetic coding sequence
  source 1..378: mol_type = other DNA
atgctgagcgcccgggacagaagagacagacaccctgaggagggcgtggtggccgagctgcagggctttgctgtggacaaggccttcctgaccagccacaagggcatcctgctggagacagagctggccctgaccctcatcatcttcatctgcttcaccgccagcatcagcgcctacatggccgccgccctgctggagttcttcatcaccctggccttcctgttcctgtatgccacccagtactaccagagatttgaccgcatcaactggccctgcctggtgtttggcatcatcctggtgtccatctttgcctatgatgccttcaagatctacagaacagagatggcccctggggccagccagggcgaccagcagtag

SEQ ID NO: 147809 - DNA, 318 bp, synthetic construct
  misc_feature 1..318: note = Description of Artificial Sequence: Synthetic coding sequence
  source 1..318: mol_type = other DNA
atgctgagcgcccgggacagaagagacagacaccctgaggagggcgtggtggccgagctgcagggctttgctgtggacaaggccttcctgaccagccacaagggcatcctgctggagacagagctggacttcctgcgctgtgtgtctgccatcatcatcttcctggtggtgtcctttgctgctgtgaccagcagagatggagctgccatcgccgcctttgtgtttggcatcatcctggtgtccatctttgcctatgatgccttcaagatctacagaacagagatggcccctggggccagccagggcgaccagcagtag

SEQ ID NO: 147810 - DNA, 1326 bp, synthetic construct
  misc_feature 1..1326: note = Description of Artificial Sequence: Synthetic coding sequence
  source 1..1326: mol_type = other DNA
cccagccctgccatcggcctgtttgcctccatggctgctgtgctgctgggcggggcccgggccagccggctgctcttccagaggctgctgtgggatgtggtgcgcagccccatctccttctttgagaggacccccatcggccacctgctgaaccgcttcagcaaggagacagacacagtggatgtggacatcccagacaagctgcggagcctgctgatgtatgccttcggcctgctggaggtgtccctggtggtggccgtggccacccccctgcccctgtggcccagctgccactgcttcagcagcaccctgggcttccgctggctggccgccaacgtggagctgctgggcaatggcctggtgtttgctgctgccacctgtgctgtgctgagcaaggcccacctgtctgctggcctggtgggcttctctgtgtctgctgccctgcaggtgacccagaccctgcagtgggtggtgaggaactggacagacctggagaacagcatcgtgtctgtggagaggatgcaggactatgcctggacccccaaggaggccccctggaggctgcccacctgtgccgcccagcccccctggccccagggcggccagatcgagttccgggactttggcctgcgctacagacctgagctgcccctggccgtgcagggcgtgtccttcaagatccatgctggggagaaggtgggcatcgtgggccgcactggagctgggaagagcagcctggccagcggcctgctgcggctgcaggaggccgctgagggcggcatctggattgatggagtgcccatcgcccacgtgggcctgcacaccctgcggagccgcatcagcatcatcccccaggaccccatcctcttccctggcagcctgaggatgaacctggacctgctgcaggagcacagtgatgaggccatctgggccgccctggagaccgtgcagctgaaggccctggtggccagcctgcccggccagctgcagtacaagtgtgccgacagaggagaggacctgtctgtgggccagaagcagctgctgtgcctggcccgggccctgctgaggaagacccagatcctgatcctggatgaggccacagctgctgtggaccccggcacagagctgcagatgcaggccatgctgggctcctggtttgcccagtgcaccgtgctgctgattgcccaccggctgcggtctgtgatggactgtgcccgggtgctggtgatggacaagggccaggtggccgagagcggcagccctgcccagctgctggcccagaagggcctcttctaccgcctggcccaggagagcggcctggtgtag

SEQ ID NO: 147811 - DNA, 528 bp, synthetic construct
  misc_feature 1..528: note = Description of Artificial Sequence: Synthetic coding sequence
  source 1..528: mol_type = other DNA
atgagccatggagctggcctggtgaggaccacctgcagcagcggcagcgccctgggccctggggccggggccgcccagcccagcgccagccccctggagggcctgctggacctgagctaccccaggacccatgctgccctgctgaaggtggcccagatggtgaccctgctgattgccttcatctgtgtgcgcagcagcctgtggaccaactacagcgcctacagctactttgaggtggtgaccatctgtgacctgatcatgatcctggccttctacctggtgcacctgttccgcttctacagagtgctgacctgcatctcctggcccctgtctgagctgctgcactacctgattggcaccctgctgctgctgattgccagcatcgtggccgccagcaagagctacaaccagagcggcctggtggccggggccatcttcggcttcatggccaccttcctgtgcatggccagcatctggctgagctacaagatcagctgtgtgacccagagcacagatgctgctgtgtag

SEQ ID NO: 147812 - DNA, 429 bp, synthetic construct
  misc_feature 1..429: note = Description of Artificial Sequence: Synthetic coding sequence
  source 1..429: mol_type = other DNA
atgagccatggagctggcctggtgaggaccacctgcagcagcggcagcgccctgggccctggggccggggccgcccagcccagcgccagccccctggagggcctgctggacctgagctaccccaggacccatgctgccctgctgaaggtggcccagatggtgaccctgctgattgccttcatctgtgtgcgcagcagcctgtggaccaactacagcgcctacagctactttgaggtggtgaccatctgtgacctgatcatgatcctggccttctacctggtgcacctgttccgcttctacagagtgctgacctgcatctcctggcccctgagcatcttcggcttcatggccaccttcctgtgcatggccagcatctggctgagctacaagatcagctgtgtgacccagagcacagatgctgctgtgtag

SEQ ID NO: 147813 - DNA, 522 bp, synthetic construct
  misc_feature 1..522: note = Description of Artificial Sequence: Synthetic coding sequence
  source 1..522: mol_type = other DNA
atggaggagccccagagggcccggagccacacagtgaccaccacagccagcagctttgctgagaacttcagcaccagcagcagcagctttgcctatgaccgggagttcctgcggaccctgcccggcttcctgattgtggccgagatcgtgctgggcctgctggtgtggaccctgattgctggaacagagtacttccgggtgcctgccttcggctgggtgatgtttgtggccgtgttctactgggtgctgaccgtcttcttcctgatcatctacatcaccatgacctacacccgcatcccccaggtgccctggaccaccgtgggcctgtgcttcaacggcagcgcctttgtgctgtacctgtctgctgctgtggtggatgccagctctgtgtccccagagcgggacagccacaacttcaacagctgggccgccagcagcttctttgccttcctggtgaccatctgctacgccggcaacacctacttctccttcatcgcctggaggagcaggaccatccagtag

SEQ ID NO: 147814 - DNA, 363 bp, synthetic construct
  misc_feature 1..363: note = Description of Artificial Sequence: Synthetic coding sequence
  source 1..363: mol_type = other DNA
atgcaggccctgcagcagcagcccgtcttcccagacctgctgaaggccatccctgtgtccatccacgtgaatgtcatcctcttcagcgccatcctgattgtgctgaccatggtgggcacagccttcttcatgtacaatgccttcggcaagccctttgagaccctgcacggccccctgggcctgtacctgctgtccttcatcagcggcagctgtggctgcctggtgatgatcctgtttgccagcgaggtgaagatccaccacctgtctgagaagatcgccaactacaaggagggcacctacgtgtacaagacccagagcgagaagtacaccaccagcttctggctgaccaagggccacagctag

SEQ ID NO: 147815 - DNA, 699 bp, synthetic construct
  misc_feature 1..699: note = Description of Artificial Sequence: Synthetic coding sequence
  source 1..699: mol_type = other DNA
atgcccagccagcagaagaagatcatcttctgcatggccggggtcttctcctttgcctgtgccctgggcgtggtgacagccctgggcacccccctgtggatcaaggccaccgtgctgtgcaagacaggagccctgctggtgaatgccagcggccaggagctggacaagttcatgggagagatgcagtatggcctcttccatggagagggcgtgcggcagtgtggcctgggcgcccggcccttccgcttctccttcttcccagacctgctgaaggccatccctgtgtccatccacgtgaatgtcatcctcttcagcgccatcctgattgtgctgaccatggtgggcacagccttcttcatgtacaatgccttcggcaagccctttgagaccctgcacggccccctgggcctgtacctgctgtccttcatcagcggcagctgtggctgcctggtgatgatcctgtttgccagcgaggtgaagatccaccacctgtctgagaagatcgccaactacaaggagggcacctacgtgtacaagacccagagcgagaagtacaccaccagcttctgggtgatcttcttctgcttctttgtgcacttcctgaatggcctgctgatccggctggccggcttccagttcccctttgccaagagcaaggatgctgagaccaccaacgtggccgctgacctgatgtactag

SEQ ID NO: 147816 - DNA, 738 bp, synthetic construct
  misc_feature 1..738: note = Description of Artificial Sequence: Synthetic coding sequence
  source 1..738: mol_type = other DNA
atgcccagccagcagaagaagatcatcttctgcatggccggggtcttctcctttgcctgtgccctgggcgtggtgacagccctgggcacccccctgtggatcaaggccaccgtgctgtgcaagacaggagccctgctggtgaatgccagcggccaggagctggacaagttcatgggagagatgcagtatggcctcttccatggagagggcgtgcggcagtgtggcctgggcgcccggcccttccgcttctccttcttcccagacctgctgaaggccatccctgtgtccatccacgtgaatgtcatcctcttcagcgccatcctgattgtgctgaccatggtgggcacagccttcttcatgtacaatgccttcggcaagccctttgagaccctgcacggccccctgggcctgtacctgctgtccttcatctctgtggccctgtggctgcctgccaccaggcaccaggcccagggcagctgtggctgcctggtgatgatcctgtttgccagcgaggtgaagatccaccacctgtctgagaagatcgccaactacaaggagggcacctacgtgtacaagacccagagcgagaagtacaccaccagcttctgggtgatcttcttctgcttctttgtgcacttcctgaatggcctgctgatccggctggccggcttccagttcccctttgccaagagcaaggatgctgagaccaccaacgtggccgctgacctgatgtactag

SEQ ID NO: 147817 - DNA, 348 bp, synthetic construct
  misc_feature 1..348: note = Description of Artificial Sequence: Synthetic coding sequence
  source 1..348: mol_type = other DNA
atgcaggccctgcagcagcagcccgtcttcccagacctgctgaaggccatccctgtgtccatccacgtgaatgtcatcctcttcagcgccatcctgattgtgctgaccatggtgggcacagccttcttcatgtacaatgccttcggcaagccctttgagaccctgcacggccccctgggcctgtacctgctgtccttcatcagcggcagctgtggctgcctggtgatgatcctgtttgccagcgaggtgaagatccaccacctgtctgagaagatcgccaactacaaggagggcacctacgtgtacaagacccagagcgagaagtacaccaccagcttctgggtgtag

SEQ ID NO: 147818 - DNA, 1878 bp, synthetic construct
  misc_feature 1..1878: note = Description of Artificial Sequence: Synthetic coding sequence
  source 1..1878: mol_type = other DNA
atgaactacagcgagattgagagcaaggtgcgggaggccaccaatgatgacccctggggccccagcggccagctgatgggagaaattgccaaggccaccttcatgtatgagcagtttcctgagctgatgaacatgctgtggagcaggatgctgaaggacaacaagaagaactggaggagagtgtacaagagcctgctgctgctggcctacctgatcagaaatggcagcgagcgggtggtgaccagcgcccgggagcacatctatgacctgcggagcctggagaactaccactttgtggatgagcacggcaaggaccagggcatcaacatccggcagaaggtgaaggagctggtggagtttgcccaggatgatgaccggctgcgggaggagaggaagaaggccaagaagaacaaggacaagtatgtgggcgtgtccagtgacagcgtgggcggcttccgctacagcgagagatatgaccctgagcccaagagcaagtgggatgaggagtgggacaagaacaagagcgccttccccttcagtgacaagctgggggagctgagtgacaagattggcagcaccattgatgacaccatcagcaagttccggaggaaggaccgggaggacagccctgagcgctgcagcgacagtgatgaggagaagaaggcccggcggggccgcagccccaagggggagttcaaggatgaggaggagaccgtgaccaccaagcacatccacatcacccaggccacagagaccaccaccaccaggcacaagaggacagccaaccccagcaagaccatcgacctgggcgccgccgcccactacaccggggacaaggccagcccagaccagaatgccagcacccacaccccccagagctctgtgaagacctctgtgcccagcagcaagagcagcggggacctggtggacctgtttgatggcaccagccagagcactggaggcagcgctgacctgtttggaggctttgctgactttggcagcgctgctgccagcggcagcttccccagccaggtgacagccaccagcggaaatggagactttggagactggagcgccttcaaccaggcccccagcggccctgtggccagcagtggagagttctttggaagtgccagccagcctgctgtggagctggtgtctggcagccagagcgccctgggccccccacctgctgccagcaacagcagtgacctgtttgacctgatgggcagcagccaggccaccatgaccagcagccagagcatgaacttctccatgatgagcaccaacacagtgggcctgggcctgcccatgagccgcagccagcccctgcagaatgtgtccacagtgctgcagaagcccaaccccctgtacaaccagaacacagacatggtgcagaagtctgtgtccaagaccctgcccagcacctggagcgaccccagcgtgaacatcagcctggacaacctgctgcccggcatgcagcccagcaagccccagcagcccagcctgaacaccatgatccagcagcagaacatgcagcagcccatgaatgtgatgacccagagctttggagctgtgaacctgagcagccccagcaacatgctgcctgtgcggccccagaccaatgccctgattggaggccccatgcccatgtccatgcccaacgtgatgacaggcaccatgggcatggcccccctgggcaacacccccatgatgaaccagagcatgatgggcatgaacatgaacatcggcatgtctgctgctggcatgggcctgaccggcaccatgggcatgggcatgcccaacatcgccatgaccagcggcaccgtgcagcccaagcaggatgcctttgccaactttgccaacttcagcaagtag

SEQ ID NO: 147819 - DNA, 1878 bp, synthetic construct
  misc_feature 1..1878: note = Description of Artificial Sequence: Synthetic coding sequence
  source 1..1878: mol_type = other DNA
atgctgaacatgtggaaggtgcgggagctggtggacaaggccaccaacgtggtgatgaactacagcgagattgagagcaaggtgcgggaggccaccaatgatgacccctggggccccagcggccagctgatgggagaaattgccaaggccaccttcatgtatgagcagtttcctgagctgatgaacatgctgtggagcaggatgctgaaggacaacaagaagaactggaggagagtgtacaagagcctgctgctgctggcctacctgatcagaaatggcagcgagcgggtggtgaccagcgcccgggagcacatctatgacctgcggagcctggagaactaccactttgtggatgagcacggcaaggaccagggcatcaacatccggcagaaggtgaaggagctggtggagtttgcccaggatgatgaccggctgcgggaggagaggaagaaggccaagaagaacaaggacaagtatgtgggcgtgtccagtgacagcgtgggcggcttccgctacagcgagagatatgaccctgagcccaagagcaagtgggatgaggagtgggacaagaacaagagcgccttccccttcagtgacaagctgggggagctgagtgacaagattggcagcaccattgatgacaccatcagcaagttccggaggaaggaccgggaggacagccctgagcgctgcagcgacagtgatgaggagaagaaggcccggcggggccgcagccccaagggggagttcaaggatgaggaggagaccgtgaccaccaagcacatccacatcacccaggccacagagaccaccaccaccaggcacaagaggacagccaaccccagcaagaccatcgacctgggcgccgccgcccactacaccggggacaaggccagcccagaccagaatgccagcacccacaccccccagagctctgtgaagacctctgtgcccagcagcaagagcagcggggacctggtggacctgtttgatggcaccagccagagcactggaggcagcgctgacctgtttggaggctttgctgactttggcagcgctgctgccagcggcagcttccccagccaggtgacagccaccagcggaaatggagactttggagactggagcgccttcaaccaggcccccagcggccctgtggccagcagtggagagttctttggaagtgccagccagcctgctgtggagctggtgtctggcagccagagcgccctgggccccccacctgctgccagcaacagcagtgacctgtttgacctgatgggcagcagccaggccaccatgaccagcagccagagcatgaacttctccatgatgagcaccaacacagtgggcctgggcctgcccatgagccgcagccagaacacagacatggtgcagaagtctgtgtccaagaccctgcccagcacctggagcgaccccagcgtgaacatcagcctggacaacctgctgcccggcatgcagcccagcaagccccagcagcccagcctgaacaccatgatccagcagcagaacatgcagcagcccatgaatgtgatgacccagagctttggagctgtgaacctgagcagccccagcaacatgctgcctgtgcggccccagaccaatgccctgattggaggccccatgcccatgtccatgcccaacgtgatgacaggcaccatgggcatggcccccctgggcaacacccccatgatgaaccagagcatgatgggcatgaacatgaacatcggcatgtctgctgctggcatgggcctgaccggcaccatgggcatgggcatgcccaacatcgccatgaccagcggcaccgtgcagcccaagcaggatgcctttgccaactttgccaacttcagcaagtag

SEQ ID NO: 147820 - DNA, 1878 bp, synthetic construct; identical to SEQ ID NO: 147818
  misc_feature 1..1878: note = Description of Artificial Sequence: Synthetic coding sequence
  source 1..1878: mol_type = other DNA

SEQ ID NO: 147821 - DNA, 1878 bp, synthetic construct; identical to SEQ ID NO: 147818
  misc_feature 1..1878: note = Description of Artificial Sequence: Synthetic coding sequence
  source 1..1878: mol_type = other DNA

SEQ ID NO: 147822 - DNA, 1932 bp, synthetic construct
  misc_feature 1..1932: note = Description of Artificial Sequence: Synthetic coding sequence
  source 1..1932: mol_type = other DNA
atgctgaacatgtggaaggtgcgggagctggtggacaaggccaccaacgtggtgatgaactacagcgagattgagagcaaggtgcgggaggccaccaatgatgacccctggggccccagcggccagctgatgggagaaattgccaaggccaccttcatgtatgagcagtttcctgagctgatgaacatgctgtggagcaggatgctgaaggacaacaagaagaactggaggagagtgtacaagagcctgctgctgctggcctacctgatcagaaatggcagcgagcgggtggtgaccagcgcccgggagcacatctatgacctgcggagcctggagaactaccactttgtggatgagcacggcaaggaccagggcatcaacatccggcagaaggtgaaggagctggtggagtttgcccaggatgatgaccggctgcgggaggagaggaagaaggccaagaagaacaaggacaagtatgtgggcgtgtccagtgacagcgtgggcggcttccgctacagcgagagatatgaccctgagcccaagagcaagtgggatgaggagtgggacaagaacaagagcgccttccccttcagtgacaagctgggggagctgagtgacaagattggcagcaccattgatgacaccatcagcaagttccggaggaaggaccgggaggacagccctgagcgctgcagcgacagtgatgaggagaagaaggcccggcggggccgcagccccaagggggagttcaaggatgaggaggagaccgtgaccaccaagcacatccacatcacccaggccacagagaccaccaccaccaggcacaagaggacagccaaccccagcaagaccatcgacctgggcgccgccgcccactacaccggggacaaggccagcccagaccagaatgccagcacccacaccccccagagctctgtgaagacctctgtgcccagcagcaagagcagcggggacctggtggacctgtttgatggcaccagccagagcactggaggcagcgctgacctgtttggaggctttgctgactttggcagcgctgctgccagcggcagcttccccagccaggtgacagccaccagcggaaatggagactttggagactggagcgccttcaaccaggcccccagcggccctgtggccagcagtggagagttctttggaagtgccagccagcctgctgtggagctggtgtctggcagccagagcgccctgggccccccacctgctgccagcaacagcagtgacctgtttgacctgatgggcagcagccaggccaccatgaccagcagccagagcatgaacttctccatgatgagcaccaacacagtgggcctgggcctgcccatgagccgcagccagcccctgcagaatgtgtccacagtgctgcagaagcccaaccccctgtacaaccagaacacagacatggtgcagaagtctgtgtccaagaccctgcccagcacctggagcgaccccagcgtgaacatcagcctggacaacctgctgcccggcatgcagcccagcaagccccagcagcccagcctgaacaccatgatccagcagcagaacatgcagcagcccatgaatgtgatgacccagagctttggagctgtgaacctgagcagccccagcaacatgctgcctgtgcggccccagaccaatgccctgattggaggccccatgcccatgtccatgcccaacgtgatgacaggcaccatgggcatggcccccctgggcaacacccccatgatgaaccagagcatgatgggcatgaacatgaacatcggcatgtctgctgctggcatgggcctgaccggcaccatgggcatgggcatgcccaacatcgccatgaccagcggcaccgtgcagcccaagcaggatgcctttgccaactttgccaacttcagcaagtag

SEQ ID NO: 147823 - DNA, 5028 bp, synthetic construct
  misc_feature 1..5028: note = Description of Artificial Sequence: Synthetic coding sequence
  source 1..5028: mol_type = other DNA
atggcccagatcctgcccatccgcttccaggagcacctgcagctgcagaacctgggcatcaacccagccaacatcggcttcagcaccctgaccatggagagtgacaagttcatctgcatccgggagaaggtgggggagcaggcccaggtggtgatcatcgacatgaatgaccccagcaaccccatcagaagacccatctctgctgacagcgccatcatgaacccagccagcaaggtgattgccctgaaggccggcaagaccctgcagatcttcaacatcgagatgaagagcaagatgaaggcccacaccatgacagatgatgtgaccttctggaagtggatcagcctgaacacagtggccctggtgacagacaatgctgtgtaccactggagcatggagggggagagccagcctgtgaagatgtttgacagacacagcagcctggccggctgccagatcatcaactacagaacagatgccaagcagaagtggctgctgctgaccggcatcagcgcccagcagaacagagtggtgggcgccatgcagctgtacagcgtggacaggaaggtgtcccagcccatcgagggccacgccgccagctttgcccagttcaagatggagggcaatgctgaggagagcaccctcttctgctttgctgtgcggggccaggccggcggcaagctgcacatcatcgaggtgggcaccccacccaccggcaaccagcccttccccaagaaggctgtggatgtgttcttccccccagaggcccagaatgacttccctgtggccatgcagatcagcgagaagcatgatgtggtgttcctgatcaccaagtatggctacatccacctgtatgacctggagaccggcacctgcatctacatgaaccgcatctctggagagaccatctttgtgacagcccctcatgaggccacagctggcatcatcggcgtgaacaggaagggccaggtgctgtctgtgtgtgtggaggaggagaacatcatcccctacatcaccaacgtgctgcagaacccagacctggccctgaggatggctgtgaggaacaacctggccggggctgaggagctgtttgccaggaagttcaatgccctgtttgcccagggcaactacagcgaggccgccaaggtggccgccaatgcccccaagggcatcctgcggaccccagacaccatccgccgcttccagagcgtgcctgcccagcccggccagaccagccccctgctgcagtacttcggcatcctgctggaccagggccagctgaacaagtatgagagcctggagctgtgcaggcctgtgctgcagcagggcaggaagcagctgctggagaagtggctgaaggaggacaagctggagtgcagcgaggagctgggggacctggtgaagtctgtggaccccaccctggccctgtctgtgtacctgcgggccaacgtgcccaacaaggtgatccagtgctttgctgagaccggccaggtgcagaagatcgtgctgtatgccaagaaggtgggctacaccccagactggatcttcctgctgagaaatgtgatgaggatcagcccagaccagggccagcagtttgcccagatgctggtgcaggatgaggagcccctggccgacatcacccagatcgtggatgtgttcatggagtacaacctgatccagcagtgcacagccttcctgctggatgccctgaagaacaaccggcccagcgagggccccctgcagacccggctgctggagatgaacctgatgcacgccccccaggtggctgatgccatcctgggcaaccagatgttcacccactatgaccgggcccacatcgcccagctgtgtgagaaggccggcctgctgcagagggccctggagcacttcacagacctgtatgacatcaagagagctgtggtgcacacccacctgctgaaccctgagtggctggtgaactacttcggcagcctgtctgtggaggacagcctggagtgcctgcgggccatgctgagcgccaacatccggcagaacctgcagatctgtgtgcaggtggccagcaagtaccacgagcagctgagcacccagagcctgattgagctgtttgagagcttcaagagctttgagggcctcttctacttcctgggcagcatcgtgaacttcagccaggaccctgatgtgcacttcaagtacatccaggccgcctgcaagacaggccagatcaaggaggtggagcgcatctgccgggagagcaactgctatgaccctgagcgggtgaagaacttcctgaaggaggccaagctgacagaccagctgcccctcatcatcgtgtgtgacagatttgattttgtgcatgacctggtgctgtacctgtacagaaacaacctgcagaagtacatcgagatctacgtgcagaaggtgaaccccagccggctgcctgtggtgattggaggcctgctggatgtggactgcagtgaagatgtgatcaagaacctgatcctggtggtgcggggccagttcagcacagatgagctggtggccgaggtggagaagaggaaccggctgaagctgctgctgccctggctggaggcccgcatccacgagggctgtgaggagcccgccacccacaatgccctggccaagatctacatcgacagcaacaacaaccctgagcgcttcctgcgggagaacccctactatgacagccgggtggtgggcaagtactgtgagaagagggacccccacctggcctgtgtggcctatgagcggggccagtgtgacctggagctgatcaacgtgtgcaatgaaaacagcctcttcaagagcctgagccgctacctggtgcggaggaaggaccctgagctgtggggctctgtgctgctggagagcaacccctacagaagacccctgattgaccaggtggtgcagacagccctgtctgagacccaggaccctgaggaggtgtctgtgacagtgaaggccttcatgacagctgacctgcccaatgagctgattgagctgctggagaagatcgtgctggacaacagcgtcttcagcgagcacaggaacctgcagaacctgctgatcctgacagccatcaaggctgacaggaccagggtgatggagtacatcaaccggctggacaactatgatgccccagacatcgccaacatcgccatcagcaatgagctgtttgaggaggcctttgccatcttcaggaagtttgatgtgaacaccagcgctgtgcaggtgctgattgagcacatcggcaacctggaccgggcctatgaatttgctgagcgctgcaatgaacctgctgtgtggagccagctggccaaggcccagctgcagaagggcatggtgaaggaggccatcgacagctacatcaaggcagatgaccccagcagctacatggaggtggtgcaggccgccaacaccagcggcaactgggaggagctggtgaagtacctgcagatggccaggaagaaggcccgggagagctatgtggagacagagctgatctttgccctggccaagaccaaccggctggccgagctggaggagttcatcaatggccccaacaatgcccacatccagcaggtgggggaccgctgctatgatgagaagatgtatgatgctgccaagctgctgtacaacaacgtgagcaactttggccgcctggccagcaccctggtgcacctgggggagtaccaggccgctgtggatggagccaggaaggccaacagcaccaggacctggaaggaggtgtgctttgcctgtgtggatggcaaggagttccggctggcccagatgtgtggcctgcacatcgtggtgcatgctgatgagctggaggagctgatcaactactaccaggaccggggctactttgaggagctgatcaccatgctggaggccgccctgggcctggagcgggcccacatgggcatgttcacagagctggccatcctgtacagcaagttcaagccccagaagatgagggagcacctggagctgttctggagccgggtgaacatccccaaggtgctgcgggctgctgagcaggcccacctgtgggccgagctggtgttcctgtatgacaagtatgaggagtatgacaatgccatcatcaccatgatgaaccaccccacagatgcctggaaggagggccagttcaaggacatcatcaccaaggtggccaacgtggagctgtactaccgggccatccagttctacctggagttcaagcccctgctgctgaatgacctgctgatggtgctgagcccccggctggaccacaccagggctgtgaactacttcagcaaggtgaagcagctgcccctggtgaagccctacctgcggtctgtgcagaaccacaacaacaagtctgtgaatgaaagcctgaacaacctcttcatcacagaggaggactaccaggccctgcggaccagcattgatgcctatgacaactttgacaacatcagcctggcccagaggctggagaagcatgagctgattgagttcagaagaattgctgcctacctgttcaagggcaacaaccgctggaagcagagcgtggagctgtgcaagaaggacagcctgtacaaggatgccatgcagtatgccagcgagagcaaggacacagagctggccgaggagctgctgcagtggttcctgcaggaggagaagcgggagtgcttcggggcctgcctcttcacctgctatgacctgctgcggccagatgtggtgctggagacagcctggaggcacaacatcatggactttgccatgccctacttcatccaggtgatgaaggagtacctgaccaaggtggacaagctggatgccagcgagagcctgaggaaggaggaggagcaggccacagagacccagcccatcgtgtatggccagccccagctgatgctgacagctggccccagcgtggccgtgcccccccaggcccccttcggctacggctacacagccccaccctacggccagccccagcccggcttcggctacagcatgtag

SEQ ID NO: 147824 - DNA, 4923 bp, synthetic construct
  misc_feature 1..4923: note = Description of Artificial Sequence: Synthetic coding sequence
  source 1..4923: mol_type = other DNA
atggcccagatcctgcctgtgcgcttccaggagcacttccagctgcagaacctgggcatcaacccagccaacatcggcttcagcaccctgaccatggagagtgacaagttcatctgcatccgggagaaggtgggggagcaggcccaggtgaccatcatcgacatgtctgaccccatggcccccatcagaagacccatctctgctgagagcgccatcatgaacccagccagcaaggtgattgccctgaaggccggcaagaccctgcagatcttcaacatcgagatgaagagcaagatgaaggcccacaccatggccgaggaggtgatcttctggaagtgggtgtctgtgaacacagtggccctggtgacagaaacagctgtgtaccactggagcatggagggggacagccagcccatgaagatgtttgacagacacaccagcctggtgggctgccaggtgatccactacagaacagatgagtaccagaagtggctgctgctggtgggcatcagcgcccagcagaacagagtggtgggcgccatgcagctgtacagcgtggacaggaaggtgtcccagcccatcgagggccacgccgccgcctttgctgagttcaagatggagggcaatgccaagccagccaccctcttctgctttgctgtgaggaaccccaccggcggcaagctgcacatcatcgaggtgggccagcctgctgctggcaaccagccctttgtgaagaaggctgtggatgtgttcttccccccagaggcccagaatgacttccctgtggccatgcagatcggggccaagcacggcgtcatctacctgatcaccaagtatggctacctgcacctgtatgacctggagagcggcgtgtgcatctgcatgaaccgcatctctgctgacaccatctttgtgacagccccccacaagcccaccagcggcatcatcggcgtgaacaagaagggccaggtgctgtctgtgtgtgtggaggaggacaacatcgtgaactatgccaccaacgtgctgcagaacccagacctgggcctgcggctggccgtgcgcagcaacctggccggggctgagaagctgtttgtgaggaagttcaacaccctgtttgcccagggcagctatgcagaggccgccaaggtggccgccagcgcccccaagggcatcctgcggacccgggagaccgtgcagaagttccagagcatcccagcccagagcggccaggccagccccctgctgcagtacttcggcatcctgctggaccagggccagctgaacaagctggagagcctggagctgtgccacctggtgctgcagcagggcaggaagcagctgctggagaagtggctgaaggaggacaagctggagtgcagcgaggagctgggggacctggtgaagaccacagaccccatgctggccctgtctgtgtacctgcgggccaacgtgcccagcaaggtgatccagtgctttgctgagaccggccagttccagaagatcgtgctgtatgccaagaaggtgggctacaccccagactggatcttcctgctgcggggcgtgatgaagatcagccctgagcagggcctgcagttcagcaggatgctggtgcaggatgaggagcccctggccaacatcagccagatcgtggacatcttcatggagaacagcctcatccagcagtgcaccagcttcctgctggatgccctgaagaacaacagacctgctgagggcctgctgcagacctggctgctggagatgaacctggtgcacgccccccaggtggctgatgccatcctgggcaacaagatgttcacccactatgaccgggcccacatcgcccagctgtgtgagaaggccggcctgctgcagcaggccctggagcactacacagacctgtatgacatcaagagagctgtggtgcacacccacctgctgaaccctgagtggctggtgaacttcttcggcagcctgtctgtggaggacagcgtggagtgcctgcacgccatgctgagcgccaacatccggcagaacctgcagctgtgtgtgcaggtggccagcaagtaccacgagcagctgggcacccaggccctggtggagctgtttgagagcttcaagagctacaagggcctcttctacttcctgggcagcatcgtgaacttcagccaggaccctgatgtgcacctgaagtacatccaggccgcctgcaagacaggccagatcaaggaggtggagcgcatctgccgggagagcagctgctacaaccctgagcgggtgaagaacttcctgaaggaggccaagctgacagaccagctgcccctcatcatcgtgtgtgacagatttggatttgtgcatgacctggtgctgtacctgtacagaaacaacctgcagcgctacatcgagatctacgtgcagaaggtgaaccccagcaggaccccagctgtgattggaggcctgctggatgtggactgcagcgaggaggtgatcaagcacctgatcatggctgtgcggggccagttcagcacagatgagctggtggccgaggtggagaagaggaaccggctgaagctgctgctgccctggctggagagccagatccaggagggctgtgaggagcccgccacccacaatgccctggccaagatctacatcgacagcaacaacagccctgagtgcttcctgcgggagaatgcctactatgacagctctgtggtgggccgctactgtgagaagagggacccccacctggcctgtgtggcctatgagcggggccagtgtgacctggagctgatcaaggtgtgcaatgaaaacagcctcttcaagtctgaggcccgctacctggtgtgcaggaaggaccctgagctgtgggcccacgtgctggaggagaccaaccccagccggcggcagctgattgaccaggtggtgcagacagccctgtctgagacccgggaccctgaggagatctctgtgacagtgaaggccttcatgacagctgacctgcccaatgagctgattgagctgctggagaagatcgtgctggacaacagcgtcttcagcgagcacaggaacctgcagaacctgctgatcctgacagccatcaaggctgacaggaccagggtgatggagtacatcagccggctggacaactatgatgccctggacatcgccagcattgctgtgagcagcgccctgtatgaggaggccttcaccgtcttccacaagtttgacatgaatgccagcgccatccaggtgctgattgagcacatcggcaacctggaccgggcctatgaatttgctgagcgctgcaatgaacctgctgtgtggagccagctggcccaggcccagctgcagaaggacctggtgaaggaggccatcaacagctacatcagaggagatgaccccagcagctacctggaggtggtgcagagcgccagccgcagcaacaactgggaggacctggtgaagttcctgcagatggccaggaagaagggccgggagagctacattgaaacagagctgatctttgccctggccaagaccagccgggtgtctgagctggaggacttcatcaatggccccaacaatgcccacatccagcaggtgggggaccgctgctatgaggagggcatgtatgaagctgccaagctgctgtacagcaatgtgagcaactttgcccggctggccagcaccctggtgcacctgggggagtaccaggccgctgtggacaacagcaggaaggccagcagcaccaggacctggaaggaggtgtgctttgcctgcatggatggccaggagttccgctttgcccagctgtgtggcctgcacatcgtcatccacgcagatgagctggaggagctgatgtgctactaccaggaccggggctactttgaggagctgatcctgctgctggaggccgccctgggcctggagcgggcccacatgggcatgttcacagagctggccatcctgtacagcaagttcaagccccagaagatgctggagcacctggagctgttctggagccgggtgaacatccccaaggtgctgcgggctgctgagcaggcccacctgtgggccgagctggtgttcctgtatgacaagtatgaggagtatgacaatgctgtgctgaccatgatgagccaccccacagaggcctggaaggagggccagttcaaggacatcatcaccaaggtggccaacgtggagctgtgctaccgggccctgcagttctacctggactacaagcccctgctgatcaatgacctgctgctggtgctgagcccccggctggaccacacctggacagtgtccttcttcagcaaggccggccagctgcccctggtgaagccctacctgcggtctgtgcagagccacaacaacaagtctgtgaatgaggccctgaaccacctgctgacagaggaggaggactaccagggcctgcgggccagcattgatgcctatgacaactttgacaacatcagcctggcccagcagctggagaagcaccagctgatggagttccgctgcatcgccgcctacctgtacaagggcaacaactggtgggcccagagcgtggagctgtgcaagaaggaccacctgtacaaggatgccatgcagcacgccgctgagagcagagatgctgagctggcccagaagctgctgcagtggttcctggaggagggcaagcgggagtgctttgctgcctgcctcttcacctgctatgacctgctgcggccagacatggtgctggagctggcctggaggcacaacctggtggacctggccatgccctacttcatccaggtgatgagggagtacctgagcaaggtggacaagctggatgccctggagagcctgaggaagcaggaggagcacgtgacagagcccgcccccctggtgtttgattttgatggccatgaatag

SEQ ID NO: 147825 - DNA, 4752 bp, synthetic construct
  misc_feature 1..4752: note = Description of Artificial Sequence: Synthetic coding sequence
  source 1..4752: mol_type = other DNA
atggcccagatcctgcctgtgcgcttccaggagcacttccagctgcagaacctgggcatcaacccagccaacatcggcttcagcaccctgaccatggagagtgacaagttcatctgcatccgggagaaggtgggggagcaggcccaggtgaccatcatcgacatgtctgaccccatggcccccatcagaagacccatctctgctgagagcgccatcatgaacccagccagcaaggtgattgccctgaaggccggcaagaccctgcagatcttcaacatcgagatgaagagcaagatgaaggcccacaccatggccgaggaggtgatcttctggaagtgggtgtctgtgaacacagtggccctggtgacagaaacagctgtgtaccactggagcatggagggggacagccagcccatgaagatgtttgacagacacaccagcctggtgggctgccaggtgatccactacagaacagatgagtaccagaagtggctgctgctggtgggcatcagcgcccagcagaacagagtggtgggcgccatgcagctgtacagcgtggacaggaaggtgtcccagcccatcgagggccacgccgccgcctttgctgagttcaagatggagggcaatgccaagccagccaccctcttctgctttgctgtgaggaaccccaccggcggcaagctgcacatcatcgaggtgggccagcctgctgctggcaaccagccctttgtgaagaaggctgtggatgtgttcttccccccagaggcccagaatgacttccctgtggccatgcagatcggggccaagcacggcgtcatctacctgatcaccaagtatggctacctgcacctgtatgacctggagagcggcgtgtgcatctgcatgaaccgcatctctgctgacaccatctttgtgacagccccccacaagcccaccagcggcatcatcggcgtgaacaagaagggccaggtgctgtctgtgtgtgtggaggaggacaacatcgtgaactatgccaccaacgtgctgcagaacccagacctgggcctgcggctggccgtgcgcagcaacctggccggggctgagaagctgtttgtgaggaagttcaacaccctgtttgcccagggcagctatgcagaggccgccaaggtggccgccagcgcccccaagggcatcctgcggacccgggagaccgtgcagaagttccagagcatcccagcccagagcggccaggccagccccctgctgcagtacttcggcatcctgctggaccagggccagctgaacaagctggagagcctggagctgtgccacctggtgctgcagcagggcaggaagcagctgctggagaagtggctgaaggaggacaagctggagtgcagcgaggagctgggggacctggtgaagaccacagaccccatgctggccctgtctgtgtacctgcgggccaacgtgcccagcaaggtgatccagtgctttgctgagaccggccagttccagaagatcgtgctgtatgccaagaaggtgggctacaccccagactggatcttcctgctgcggggcgtgatgaagatcagccctgagcagggcctgcagttcagcaggatgctggtgcaggatgaggagcccctggccaacatcagccagatcgtggacatcttcatggagaacagcctcatccagcagtgcaccagcttcctgctggatgccctgaagaacaacagacctgctgagggcctgctgcagacctggctgctggagatgaacctggtgcacgccccccaggtggctgatgccatcctgggcaacaagatgttcacccactatgaccgggcccacatcgcccagctgtgtgagaaggccggcctgctgcagcaggccctggagcactacacagacctgtatgacatcaagagagctgtggtgcacacccacctgctgaaccctgagtggctggtgaacttcttcggcagcctgtctgtggaggacagcgtggagtgcctgcacgccatgctgagcgccaacatccggcagaacctgcagctgtgtgtgcaggtggccagcaagtaccacgagcagctgggcacccaggccctggtggagctgtttgagagcttcaagagctacaagggcctcttctacttcctgggcagcatcgtgaacttcagccaggaccctgatgtgcacctgaagtacatccaggccgcctgcaagacaggccagatcaaggaggtggagcgcatctgccgggagagcagctgctacaaccctgagcgggtgaagaacttcctgaaggaggccaagctgacagaccagctgcccctcatcatcgtgtgtgacagatttggatttgtgcatgacctggtgctgtacctgtacagaaacaacctgcagcgctacatcgagatctacgtgcagaaggtgaaccccagcaggaccccagctgtgattggaggcctgctggatgtggactgcagcgaggaggtgatcaagcacctgatcatggctgtgcggggccagttcagcacagatgagctggtggccgaggtggagaagaggaaccggctgaagctgctgctgccctggctggagagccagatccaggagggctgtgaggagcccgccacccacaatgccctggccaagatctacatcgacagcaacaacagccctgagtgcttcctgcgggagaatgcctactatgacagctctgtggtgggccgctactgtgagaagagggacccccacctggcctgtgtggcctatgagcggggccagtgtgacctggagctgatcaaggtgtgcaatgaaaacagcctcttcaagtctgaggcccgctacctggtgtgcaggaaggaccctgagctgtgggcccacgtgctggaggagaccaaccccagccggcggcagctgattgaccaggtggtgcagacagccctgtctgagacccgggaccctgaggagatctctgtgacagtgaaggccttcatgacagctgacctgcccaatgagctgattgagctgctggagaagatcgtgctggacaacagcgtcttcagcgagcacaggaacctgcagaacctgctgatcctgacagccatcaaggctgacaggaccagggtgatggagtacatcagccggctggacaactatgatgccctggacatcgccagcattgctgtgagcagcgccctgtatgaggaggccttcaccgtcttccacaagtttgacatgaatgccagcgccatccaggtgctgattgagcacatcggcaacctggaccgggcctatgaatttgctgagcgctgcaatgaacctgctgtgtggagccagctggcccaggcccagctgcagaaggacctggtgaaggaggccatcaacagctacatcagaggagatgaccccagcagctacctggaggtggtgcagagcgccagccgcagcaacaactgggaggacctggtgaagttcctgcagatggccaggaagaagggccgggagagctacattgaaacagagctgatctttgccctggccaagaccagccgggtgtctgagctggaggacttcatcaatggccccaacaatgcccacatccagcaggtgggggaccgctgctatgaggagggcatgtatgaagctgccaagctgctgtacagcaatgtgagcaactttgcccggctggccagcaccctggtgcacctgggggagtaccaggccgctgtggacaacagcaggaaggccagcagcaccaggacctggaaggaggtgtgctttgcctgcatggatggccaggagttccgctttgcccagctgtgtggcctgcacatcgtcatccacgcagatgagctggaggagctgatgtgctactaccaggaccggggctactttgaggagctgatcctgctgctggaggccgccctgggcctggagcgggcccacatgggcatgttcacagagctggccatcctgtacagcaagttcaagccccagaagatgctggagcacctggagctgttctggagccgggtgaacatccccaaggtgctgcgggctgctgagcaggcccacctgtgggccgagctggtgttcctgtatgacaagtatgaggagtatgacaatgctgtgctgaccatgatgagccaccccacagaggcctggaaggagggccagttcaaggacatcatcaccaaggtggccaacgtggagctgtgctaccgggccctgcagttctacctggactacaagcccctgctgatcaatgacctgctgctggtgctgagcccccggctggaccacacctggacagtgtccttcttcagcaaggccggccagctgcccctggtgaagccctacctgcggtctgtgcagagccacaacaacaagtctgtgaatgaggccctgaaccacctgctgacagaggaggaggactaccaggatgccatgcagcacgccgctgagagcagagatgctgagctggcccagaagctgctgcagtggttcctggaggagggcaagagagaatgttttgctgcctgcctcttcacctgctatgacctgctgcggccagacatggtgctggagctggcctggaggcacaacctggtggacctggccatgccctacttcatccaggtgatgagggagtacctgagcaaggtggacaagctggatgccctggagagcctgaggaagcaggaggagcacgtgacagagcccgcccccctggtgtttgattttgatggccacgagtag

SEQ ID NO: 147826 - DNA, 4923 bp, synthetic construct; identical to SEQ ID NO: 147824
  misc_feature 1..4923: note = Description of Artificial Sequence: Synthetic coding sequence
  source 1..4923: mol_type = other DNA

SEQ ID NO: 147827 - DNA, 747 bp, synthetic construct
  misc_feature 1..747: note = Description of Artificial Sequence: Synthetic coding sequence
  source 1..747: mol_type = other DNA
atggccgagctggacccctttggagccccagctggggcccctgggggccctgccctgggcaatggagtggccggggccggggaggaggaccctgctgctgccttcctggcccagcaggagagcgagattgctggcattgaaaatgatgaggcctttgccatcctggatggaggagcccctggcccccagccccatggagagcccccaggcggcccagatgctgtggatggagtgatgaatggagagtactaccaggagagcaatggccccacagacagctatgctgccatcagccaggtggaccggctgcagagcgagcctgagagcatcaggaagtggagggaggagcagatggagcggctggaggccctggatgccaacagcaggaagcaggaggccgagtggaaggagaaggccatcaaggagctggaggagtggtacgcccggcaggatgagcagctgcagaagaccaaggccaacaacagagtggctgatgaggccttctacaagcagccctttgctgatgtgattggctacgtgaccaacatcaaccacccctgctacagcctggagcaggccgctgaggaggcctttgtgaatgacattgatgagagcagccctggaacagagtgggagcgggtggcccggctgtgtgacttcaaccccaagagcagcaagcaggccaaggatgtgtccaggatgaggtctgtgctgatcagcctgaagcaggcccccctggtgcactag

SEQ ID NO: 147828 - DNA, 657 bp, synthetic construct
  misc_feature 1..657: note = Description of Artificial Sequence: Synthetic coding sequence
  source 1..657: mol_type = other DNA
atggccgagctggacccctttggagccccagctggggcccctgggggccctgccctgggcaatggagtggccggggccggggaggaggaccctgctgctgccttcctggcccagcaggagagcgagattgctggcattgaaaatgatgaggcctttgccatcctggatggaggagcccctggcccccagccccatggagagcccccaggcggcccagatgctgtggatggagtgatgaatggagagtactaccaggagagcaatggccccacagacagctatgctgccatcagccaggtggaccggctgcagagcgagcctgagagcatcaggaagtggagggaggagcagatggagcggctggaggccctggatgccaacagcaggaagcaggaggccgagtggaaggagaaggccatcaaggagctggaggagtggtacgcccggcaggatgagcagctgcagaagaccaaggccaacaacagagctgctgaggaggcctttgtgaatgacattgatgagagcagccctggaacagagtgggagcgggtggcccggctgtgtgacttcaaccccaagagcagcaagcaggccaaggatgtgtccaggatgaggtctgtgctgatcagcctgaagcaggcccccctggtgcactag

SEQ ID NO: 147829 - DNA, 711 bp, synthetic construct
  misc_feature 1..711: note = Description of Artificial Sequence: Synthetic coding sequence
  source 1..711: mol_type = other DNA
atggccgagctggacccctttggagccccagctggggcccctgggggccctgccctgggcaatggagtggccggggccggggaggaggaccctgctgctgccttcctggcccagcaggagagcgagattgctggcattgaaaatgatgaggcctttgccatcctggatggaggagcccctggcccccagccccatggagagcccccaggcggcccagatgctgtggatggagtgatgaatggagagtactaccaggagagcaatggccccacagacagctatgctgccatcagccaggtggaccggctgcagagcgagcctgagagcatcaggaagtggagggaggagcagatggagcggctggaggccctggatgccaacagcaggaagcaggaggccgagtggaaggagaaggccatcaaggagctggaggagtggtacgcccggcaggatgagcagctgcagaagaccaaggccaacaacagagtggctgatgaggccttctacaagcagccctttgctgatgtgattggctacgtggccgctgaggaggcctttgtgaatgacattgatgagagcagccctggaacagagtgggagcgggtggcccggctgtgtgacttcaaccccaagagcagcaagcaggccaaggatgtgtccaggatgaggtctgtgctgatcagcctgaagcaggcccccctggtgcactag

SEQ ID NO: 147830 - DNA, 747 bp, synthetic construct; identical to SEQ ID NO: 147827
  misc_feature 1..747: note = Description of Artificial Sequence: Synthetic coding sequence
  source 1..747: mol_type = other DNA

SEQ ID NO: 147831 - DNA, 693 bp, synthetic construct
  misc_feature 1..693: note = Description of Artificial Sequence: Synthetic coding sequence
  source 1..693: mol_type = other DNA
atggccgagctggacccctttggagccccagctggggcccctgggggccctgccctgggcaatggagtggccggggccggggaggaggaccctgctgctgccttcctggcccagcaggagagcgagattgctggcattgaaaatgatgaggcctttgccatcctggatggaggagcccctggcccccagccccatggagagcccccaggcggcccagatgctgtggatggagtgatgaatggagagtactaccaggagagcaatggccccacagacagctatgctgccatcagccaggtggaccggctgcagagcgagcctgagagcatcaggaagtggagggaggagcagatggagcggctggaggccctggatgccaacagcaggaagcaggaggccgagtggaaggagaaggccatcaaggagctggaggagtggtacgcccggcaggatgagcagctgcagaagaccaaggccaacaacagcaccaacatcaaccacccctgctacagcctggagcaggccgctgaggaggcctttgtgaatgacattgatgagagcagccctggaacagagtgggagcgggtggcccggctgtgtgacttcaaccccaagagcagcaagcaggccaaggatgtgtccaggatgaggtctgtgctgatcagcctgaagcaggcccccctggtgcactag

SEQ ID NO: 147832 - DNA, 693 bp, synthetic construct; identical to SEQ ID NO: 147831
  misc_feature 1..693: note = Description of Artificial Sequence: Synthetic coding sequence
  source 1..693: mol_type = other DNA

SEQ ID NO: 147833 - DNA, 501 bp, synthetic construct
  misc_feature 1..501: note = Description of Artificial Sequence: Synthetic coding sequence
  source 1..501: mol_type = other DNA
atggccgagctggacccctttggagccccagctggggcccctgggggccctgccctgggcaatggagtggccggggccggggaggaggaccctgctgctgccttcctggcccagcaggagagcgagattgctggcattgaaaatgatgaggcctttgccatcctggatggaggagcccctggcccccagccccatggagagcccccaggcggcccagatgccaacagcaggaagcaggaggccgagtggaaggagaaggccatcaaggagctggaggagtggtacgcccggcaggatgagcagctgcagaagaccaaggccaacaacagagctgctgaggaggcctttgtgaatgacattgatgagagcagccctggaacagagtgggagcgggtggcccggctgtgtgacttcaaccccaagagcagcaagcaggccaaggatgtgtccaggatgaggtctgtgctgatcagcctgaagcaggcccccctggtgcactag

SEQ ID NO: 147834 - DNA, 690 bp, synthetic construct
  misc_feature 1..690: note = Description of Artificial Sequence: Synthetic coding sequence
  source 1..690: mol_type = other DNA
atggctgatgactttggcttcttcagcagcagcgagagcggggcccctgaggccgcagaagaagatcctgctgctgccttcctggcccagcaggagagcgagattgctggcattgaaaatgatgagggctttggagccccagctggcagccacgccgccccagcccagcccggccccaccagcggggccggcagcgaggacatgggcaccaccgtgaatggagatgtgttccaggaggccaatggaccagcagatggctacgccgccatcgcccaggccgaccggctgacccaggagcctgagagcatcaggaagtggagggaggagcagaggaagaggctgcaggagctggatgctgccagcaaggtgacagagcaggagtggagggagaaggccaagaaggacctggaggagtggaaccagaggcagagcgagcaggtggagaagaacaagatcaacaacagaattgctgacaaggccttctaccagcagccagatgctgacatcatcggctacgtggccagcgaggaggcctttgtgaaggagagcaaggaggagaccccaggcacagagtgggagaaggtggcccagctgtgtgacttcaaccccaagagcagcaagcagtgcaaggatgtgtcccggctgcggtctgtgctgatgagcctgaagcagacccccctgagcaggtag

SEQ ID NO: 147835 - DNA, 636 bp, synthetic construct
  misc_feature 1..636: note = Description of Artificial Sequence: Synthetic coding sequence
  source 1..636: mol_type = other DNA
atggctgatgactttggcttcttcagcagcagcgagagcggggcccctgaggccgcagaagaagatcctgctgctgccttcctggcccagcaggagagcgagattgctggcattgaaaatgatgagggctttggagccccagctggcagccacgccgccccagcccagcccggccccaccagcggggccggcagcgaggacatgggcaccaccgtgaatggagatgtgttccaggaggccaatggaccagcagatggctacgccgccatcgcccaggccgaccggctgacccaggagcctgagagcatcaggaagtggagggaggagcagaggaagaggctgcaggagctggatgctgccagcaaggtgacagagcaggagtggagggagaaggccaagaaggacctggaggagtggaaccagaggcagagcgagcaggtggagaagaacaagatcaacaacagagccagcgaggaggcctttgtgaaggagagcaaggaggagaccccaggcacagagtgggagaaggtggcccagctgtgtgacttcaaccccaagagcagcaagcagtgcaaggatgtgtcccggctgcggtctgtgctgatgagcctgaagcagacccccctgagcaggtag

SEQ ID NO: 147836 - DNA, 405 bp, synthetic construct
  misc_feature 1..405: note = Description of Artificial Sequence: Synthetic coding sequence
  source 1..405: mol_type = other DNA
atggctgatgactttggcttcttcagcagcagcgagagcggggcccctgaggccgcagaagaagatcctgctgctgccttcctggcccagcaggagagcgagattgctggcattgaaaatgatgagggctttggagccccagctggcagccacgccgccccagcccagcccggccccaccagcggggccggcagcgaggacatgggcaccaccgtgaatggagatgtgttccagcctgtgcaccaccagagggtgcagctgcagacccagctgcccatccagcccaaggatgagcccgcccacaactacagcagcagcatctggcacagccagggccagggccagaagggccctgctggcctgcggctgcccaccagcgcccagatcctgagccccttcccctag

SEQ ID NO: 147837 - DNA, 636 bp, synthetic construct
  misc_feature 1..636: note = Description of Artificial Sequence: Synthetic coding sequence
  source 1..636: mol_type = other DNA
atggccaatgccggcctgcagctgctgggcttcatcctggccttcctgggctggattggagccatcgtgtccacagccctgccccagtggaggatctacagctatgctggggacaacatcgtgacagcccaggccatgtatgagggcctgtggatgagctgtgtgtcccagagcacaggccagatccagtgcaaggtgtttgacagcctgctgaacctgagcagcaccctgcaggccacccgggccctgatggtggtgggcatcctgctgggcgtgattgccatctttgtggccaccgtgggcatgaagtgcatgaagtgcctggaggatgatgaggtgcagaagatgaggatggctgtgattggaggagccatcttcctgctggccggcctggccatcctggtggccacagcctggtacggcaaccgcatcgtgcaggagttctatgaccccatgacccctgtgaatgcccgctatgaatttggccaggccctcttcaccggctgggccgccgccagcctgtgcctgctgggcggggccctgctgtgctgcagctgccccaggaagaccaccagctaccccaccccccggccctaccccaagccagcccccagcagcggcaaggactatgtgtag

SEQ ID NO: 147838 - DNA, 501 bp, synthetic construct
  misc_feature 1..501: note = Description of Artificial Sequence: Synthetic coding sequence
  source 1..501: mol_type = other DNA
atgtatgagggcctgtggatgagctgtgtgtcccagagcacaggccagatccagtgcaaggtgtttgacagcctgctgaacctgagcagcaccctgcaggccacccgggccctgatggtggtgggcatcctgctgggcgtcatcgccatctttgtggccaccgtgggcatgaagtgcatgaagtgcctggaggatgatgaggtgcagaagatgaggatggccgtcatcggcggggccatcttcctgctggccggcctggccatcctggtggccacagcctggtacggcaacagaattgtgcaggagttctatgaccccatgacccctgtgaatgcccgctatgaatttggccaggccctcttcaccggctgggccgccgccagcctgtgcctgctgggcggggccctgctgtgctgcagctgccccaggaagaccaccagctaccccaccccccggccctaccccaagccagcccccagcagcggcaaggactatgtgtag

SEQ ID NO: 147839 - DNA, 624 bp, synthetic construct
  misc_feature 1..624: note = Description of Artificial Sequence: Synthetic coding sequence
  source 1..624: mol_type = other DNA
atggtggccacctgcctgcaggtggtgggctttgtgaccagctttgtgggctggattggagtcatcgtgaccaccagcaccaatgactgggtggtgacctgtggctacaccatccccacctgcaggaagctggatgagctgggcagcaagggcctgtgggccgactgtgtgatggccaccggcctgtaccactgcaagcccctggtggacatcctgatcctgcccggctacgtgcaggcctgccgggccctgatgattgctgcctctgtgctgggcctgcctgccatcctgctgctgctgactgtgctgccctgcatccgcatgggccaggagcccggggtggccaagtaccgccgggcccagctggccggcgtgctgctgatcctgctggccctgtgtgccctggtggccaccatctggttccctgtgtgtgcccaccgggagaccaccatcgtgtcctttggctacagcctgtatgccggctggattggagctgtgctgtgcctggtgggcggctgtgtgatcctgtgctgtgctggagatgcccaggcctttggagaaaatcgcttctactacacagctggcagcagcagccccacccacgccaagagcgcccacgtgtag

SEQ ID NO: 147840 - DNA, 498 bp, synthetic construct
  misc_feature 1..498: note = Description of Artificial Sequence: Synthetic coding sequence
  source 1..498: mol_type = other DNA
atggtggccacctgcctgcaggtggtgggctttgtgaccagctttgtgggctggattggagtcatcgtgaccaccagcaccaatgactgggtggtgacctgtggctacaccatccccacctgcaggaagctggatgagctgggcagcaagggcctgtgggccgactgtgtgatggccaccggcctgtaccactgcaagcccctggtggacatcctgatcctgcccggctacgtgcaggcctgccgggccctgatgattgctgcctctgtgctgggcctgcctgccatcctgctgctgctgactgtgctgccctgcatccgcatgggccaggagcccggggtggccaagtaccgccgggcccagctggccggcgtgctgctgatcctgctgggctgccagctgctgtgggccaagacagagagcagcctgcacagccagcacctggtgcagttcaagcagaagtacctggaggacttctcctacctgcagggcgactag

SEQ ID NO: 147841 - DNA, 498 bp, synthetic construct; identical to SEQ ID NO: 147840
  misc_feature 1..498: note = Description of Artificial Sequence: Synthetic coding sequence
  source 1..498: mol_type = other DNA

SEQ ID NO: 147842 - DNA, 720 bp, synthetic construct
  misc_feature 1..720: note = Description of Artificial Sequence: Synthetic coding sequence
  source 1..720: mol_type = other DNA
atggccagcacagctgtgcagctgctgggcttcctgctgtccttcctgggcatggtgggcaccctcatcaccaccatcctgccccactggaggagaacagcccacgtgggcaccaacatcctgacagctgtgtcctacctgaagggcctgtggatggagtgtgtgtggcacagcacaggcatctaccagtgccagatctaccgcagcctgctggccctgccccaggacctgcaggccgcccgggccctgatggtgatcagctgcctgctgtctggaattgcctgtgcctgtgccgtcatcggcatgaagtgcacccgctgtgccaagggcaccccagccaagaccacctttgccatcctgggcggcaccctcttcatcctggccggcctgctgtgcatggtggccgtgtcctggaccaccaatgatgtggtgcagaacttctacaaccccctgctgcccagcggcatgaagtttgagatcggccaggccctgtacctgggcttcatcagcagcagcctgagcctcatcggcggcaccctgctgtgcctgagctgccaggatgaggccccctaccggccctaccaggccccaccccgggccaccaccaccacagccaacacagccccagcctaccagcccccagctgcctacaaggacaacagagcccccagcgtgaccagcgccacccacagcggctaccgcctgaatgactatgtgtag

SEQ ID NO: 147843 - DNA, 720 bp, synthetic construct; identical to SEQ ID NO: 147842
  misc_feature 1..720: note = Description of Artificial Sequence: Synthetic coding sequence
  source 1..720: mol_type = other DNA

SEQ ID NO: 147844 - DNA, 720 bp, synthetic construct; identical to SEQ ID NO: 147842
  misc_feature 1..720: note = Description of Artificial Sequence: Synthetic coding sequence
  source 1..720: mol_type = other DNA

SEQ ID NO: 147845 - DNA, 720 bp, synthetic construct; identical to SEQ ID NO: 147842
  misc_feature 1..720: note = Description of Artificial Sequence: Synthetic coding sequence
  source 1..720: mol_type = other DNA

SEQ ID NO: 147846 - DNA, 720 bp, synthetic construct; identical to SEQ ID NO: 147842
  misc_feature 1..720: note = Description of Artificial Sequence: Synthetic coding sequence
  source 1..720: mol_type = other DNA

SEQ ID NO: 147847 - DNA, 918 bp, synthetic construct
  misc_feature 1..918: note = Description of Artificial Sequence: Synthetic coding sequence
  source 1..918: mol_type = other DNA
atgaccagcaggacccccctgctggtgacagcctgcctgtactacagctactgcaacagccgccacctgcagcagggcgtgaggaagagcaagaggcctgtgttcagccactgccaggtgcctgagacccagaagacagacaccaggcacctgagcggggcccgggccggcgtgtgcccctgctgccacccagatggcctgctggccaccatgagggacctgctgcagtacatcgcctgcttctttgccttcttctctgctggcttcctgattgtggccacctggacagactgctggatggtgaatgctgatgacagcctggaggtgtccaccaagtgccggggcctgtggtgggagtgtgtgaccaatgcctttgatggcatccgcacctgtgatgaatatgacagcatcctggccgagcaccccctgaagctggtggtgacccgggccctgatgatcacagctgacatcctggccggcttcggcttcctgaccctgctgctgggcctggactgtgtgaagttcctgcctgatgagccctacatcaaggtgcgcatctgctttgtggccggggccaccctgctgattgctggcaccccaggcatcatcggctctgtgtggtatgctgtggatgtgtatgtggagaggagcaccctggtgctgcacaacatcttcctgggcatccagtacaagtttggctggagctgctggctgggcatggccggcagcctgggctgcttcctggccggggctgtgctgacctgctgcctgtacctgttcaaggatgtgggccctgagaggaactacccctacagcctgaggaaggcctacagcgctgctggggtgtccatggccaagagctacagcgcccccaggacagaaacagccaagatgtatgctgtggacaccagggtgtag

SEQ ID NO: 147848 - DNA, 360 bp, synthetic construct
  misc_feature 1..360: note = Description of Artificial Sequence: Synthetic coding sequence
  source 1..360: mol_type = other DNA
atgaccagcaggacccccctgctggtgacagcctgcctgtactacagctactgcaacagccgccacctgcagcagggcgtgaggaagagcaagaggcctgtgttcagccactgccaggtgcctgagacccagaagacagacaccaggcacctgagcggggcccgggccggcgtgtgcccctgctgccacccagatggcctgctggccaccatgagggacctgctgcagtacatcgcctgcttctttgccttcttctctgctggcttcctgattgtggccacctggacagactgctggatggtgaatgctgatgacagcctggagatgctggacctgcgggagaccatcctgatcccctag

SEQ ID NO: 147849 - DNA, 675 bp, synthetic construct
  misc_feature 1..675: note = Description of Artificial Sequence: Synthetic coding sequence
  source 1..675: mol_type = other DNA
atggccaacagcggcctgcagctgctgggctacttcctggccctgggcggctgggtgggcatcatcgccagcacagccctgccccagtggaagcagagcagctatgctggagatgccatcatcacagctgtgggcctgtatgagggcctgtggatgagctgtgccagccagagcacaggccaggtgcagtgcaagctgtatgacagcctgctggccctggatggccacatccagagcgcccgggccctgatggtggtggccgtgctgctgggctttgtggccatggtgctgtctgtggtgggcatgaagtgcaccagggtgggggacagcaaccccatcgccaagggccgggtggccatcgccggcggggccctcttcatcctggccggcctgtgcaccctgacagctgtgtcctggtacgccaccctggtgacccaggagttcttcaaccccagcacccctgtgaatgcccgctatgaatttggacctgccctgtttgtgggctgggccagcgctggcctggccgtgctgggcggcagcttcctgtgctgcacctgcccagagcctgagcggcccaacagcagcccccagccctacagacctggccccagcgctgctgcccgggagcctgtggtgaagctgcctgccagcgccaagggccccctgggcgtgtag

SEQ ID NO: 147850 - DNA, 636 bp, synthetic construct
  misc_feature 1..636: note = Description of Artificial Sequence: Synthetic coding sequence
  source 1..636: mol_type = other DNA
atggccaacagcggcctgcagctgctgggctacttcctggccctgggcggctgggtgggcatcatcgccagcacagccctgccccagtggaagcagagcagctatgctggagatgccatcatcacagctgtgggcctgtatgagggcctgtggatgagctgtgccagccagagcacaggccaggtgcagtgcaagctgtatgacagcctgctggccctggatggccacatccagagcgcccgggccctgatggtggtggccgtgctgctgggctttgtggccatggtgctgtctgtggtgggcatgaagtgcaccagggtgggggacagcaaccccatcgccaagggccgggtggccatcgccggcggggccctcttcatcctggccggcctgtgcaccctgacagctgtgtcctggtacgccaccctggtgacccaggagttcttcaaccccagcacccctgtgaatgcccgctatgaatttggacctgccctgtttgtgggctgggccagcgctggcctggccgtgctgggcggcagcttcctgtgctgcacctgcccagagcctgagcggcccaacagcagcccccagccctacagacctggccccagcgctgctgcccgggagtatgtgtag

SEQ ID NO: 147851 - DNA, 657 bp, synthetic construct
  misc_feature 1..657: note = Description of Artificial Sequence: Synthetic coding sequence
  source 1..657: mol_type = other DNA
atggccaacagcggcctgcagctgctgggctacttcctggccctgggcggctgggtgggcatcatcgccagcacagccctgccccagtggaagcagagcagctatgctggagatgccatcatcacagctgtgggcctgtatgagggcctgtggatgagctgtgccagccagagcacaggccaggtgcagtgcaagctgtatgacagcctgctggccctggatggccacatccagagcgcccgggccctgatggtggtggccgtgctgctgggctttgtggccatggtgctgtctgtggtgggcatgaagtgcaccagggtgggggacagcaaccccatcgccaagggccgggtggccatcgccggcggggccctcttcatcctggccggcatgaacctggcccagccctgctcctgggccggcccccagctggcctggccctgctgggccgcccccagcagcgctgcccacgcccggagccagagggaccccacagctgcccacagccccatcggcctggaccccctgctgctgcctgagagcaccagcgagctgcggctgccctggccagccccccaccctgtggcccccctgcccagcatccagcctgccagccagcaccctggccagggccactggggcatcggctgggcctag

SEQ ID NO: 147852 - DNA, 663 bp, synthetic construct
  misc_feature 1..663: note = Description of Artificial Sequence: Synthetic coding sequence
  source 1..663: mol_type = other DNA
atgtccatgggcctggagatcaccggcacagccctggccgtgctgggctggctgggcaccatcgtgtgctgtgccctgcccatgtggagggtgtctgccttcatcggcagcaacatcatcaccagccagaacatctgggagggcctgtggatgaactgtgtggtgcagagcacaggccagatgcagtgcaaggtgtatgacagcctgctggccctgccccaggacctgcaggccgcccgggccctgattgtggtggccatcctgctggccgccttcggcctgctggtggccctggtgggcgcccagtgcaccaactgtgtgcaggatgacacagccaaggccaagatcaccatcgtggccggcgtgctcttcctgctggccgccctgctgaccctggtgcctgtgtcctggagcgccaacaccatcatccgggacttctacaaccctgtggtgcctgaggcccagaagcgggagatgggcgccggcctgtatgtgggctgggccgccgccgccctgcagctgctgggcggggccctgctgtgctgcagctgccccccccgggagaagaagtacacagccaccaaggtggtgtacagcgcccccaggagcacaggccctggggccagcctgggcaccggctatgacaggaaggactatgtgtag

SEQ ID NO: 147853 - DNA, 630 bp, synthetic construct
  misc_feature 1..630: note = Description of Artificial Sequence: Synthetic coding sequence
  source 1..630: mol_type = other DNA
atggcctccatgggcctgcaggtgatgggcatcgccctggccgtgctgggctggctggccgtgatgctgtgctgtgccctgcccatgtggagggtgacagccttcatcggcagcaacatcgtgaccagccagaccatctgggagggcctgtggatgaactgtgtggtgcagagcacaggccagatgcagtgcaaggtgtatgacagcctgctggccctgccccaggacctgcaggccgcccgggccctggtgatcatcagcatcatcgtggccgccctgggcgtgctgctgtctgtggtgggcggcaagtgcaccaactgcctggaggatgagagcgccaaggccaagaccatgattgtggccggcgtggtgttcctgctggccggcctgatggtgattgtgcctgtgtcctggacagcccacaacatcatccaggacttctacaaccccctggtggccagcggccagaagcgggagatgggcgccagcctgtatgtgggctgggccgccagcggcctgctgctgctgggcggcggcctgctgtgctgcaactgcccccccaggacagacaagccctacagcgccaagtacagcgctgcccggtctgctgctgccagcaactacgtgtag

SEQ ID NO: 147854 - DNA, 630 bp, synthetic construct; identical to SEQ ID NO: 147853
  misc_feature 1..630: note = Description of Artificial Sequence: Synthetic coding sequence
  source 1..630: mol_type = other DNA

SEQ ID NO: 147855 - DNA, 630 bp, synthetic construct; identical to SEQ ID NO: 147853
  misc_feature 1..630: note = Description of Artificial Sequence: Synthetic coding sequence
  source 1..630: mol_type = other DNA

SEQ ID NO: 147856 - DNA, 591 bp, synthetic construct
  misc_feature 1..591: note = Description of Artificial Sequence: Synthetic coding sequence
  source 1..591: mol_type = other DNA
atggcctccatgggcctgcaggtgatgggcatcgccctggccgtgctgggctggctggccgtgatgctgtgctgtgccctgcccatgtggagggtgacagccttcatcggcagcaacatcgtgaccagccagagcacaggccagatgcagtgcaaggtgtatgacagcctgctggccctgccccaggacctgcaggccgcccgggccctggtgatcatcagcatcatcgtggccgccctgggcgtgctgctgtctgtggtgggcggcaagtgcaccaactgcctggaggatgaaagtgccaaggccaagaccatgattgtggccggcgtggtgttcctgctggccggcctgatggtgattgtgcctgtgtcctggacagcccacaacatcatccaggacttctacaaccccctggtggccagcggccagaagcgggagatgggcgccagcctgtatgtgggctgggccgccagcggcctgctgctgctgggcggcggcctgctgtgctgcaactgcccccccaggacagacaagccctacagcgccaagtacagcgctgcccggtctgctgctgccagcaactacgtgtag

SEQ ID NO: 147857 - DNA, 912 bp, synthetic construct
  misc_feature 1..912: note = Description of Artificial Sequence: Synthetic coding sequence
  source 1..912: mol_type = other DNA
atgacccgggcccgcatcggctgctttggacctgggggccgggcccggggcacagagagcgcccctgagcccagcaagagggtgcccccaggccgctcctggcagacccaggaggtgcggcagaccaggggggccaacggcctgggcccccgggccggcagcgctggggccaaggcccctggccctgcccagggcgccgcccagcacggcctgggcggcagcgctggcctgcgggtgcgggtgagccccctggccatgggcagcgctgccctggagatcctgggcctggtgctgtgcctggtgggctggggcggcctcatcctggcctgtggcctgcccatgtggcaggtgacagccttcctggaccacaacatcgtgacagcccagaccacctggaagggcctgtggatgagctgtgtggtgcagagcacaggccacatgcagtgcaaggtgtatgacagcgtgctggccctgagcacagaggtgcaggccgcccgggccctgactgtgtctgctgtgctgctggcctttgtggccctgtttgtgaccctggccggggcccagtgcaccacctgtgtggcccctggccctgccaaggcccgggtggccctgactggaggagtgctgtacctgttctgtggcctgctggccctggtgcccctgtgctggtttgccaacatcgtggtgcgggagttctatgaccccagcgtgcctgtgtcccagaagtatgagctgggcgccgccctgtacatcggctgggccgccacagccctgctgatggtgggcggctgcctgctgtgctgcggggcctgggtgtgcaccggccgcccagacctgtccttccctgtgaagtacagcgccccccggcggcccacagccaccggggactatgacaagaagaactacgtgtag

SEQ ID NO: 147858 - DNA, 912 bp, synthetic construct; identical to SEQ ID NO: 147857
  misc_feature 1..912: note = Description of Artificial Sequence: Synthetic coding sequence
  source 1..912: mol_type = other DNA

SEQ ID NO: 147859 - DNA, 912 bp, synthetic construct; identical to SEQ ID NO: 147857
  misc_feature 1..912: note = Description of Artificial Sequence: Synthetic coding sequence
  source 1..912: mol_type = other DNA

SEQ ID NO: 147860 - DNA, 1086 bp, synthetic construct
  misc_feature 1..1086: note = Description of Artificial Sequence: Synthetic coding sequence
  source 1..1086: mol_type = other DNA
atgggagaggaggccaatgatgacaagaagcccaccaccaagtttgagctggagcgggagacagagctgcgctttgaggtggaggccagccagagcgtgcagctggagctgctgaccggcatggccgagatctttggaacagagctgaccaggaacaagaagttcacctttgatgctggggccaaggtggccgtgttcacctggcacggctgcagcgtgcagctgagcggccgcacagaggtggcctacgtgtccaaggacacccccatgctgctgtacctgaacacccacacagccctggagcagatgaggcggcaggccgagaaggaggaggagcggggcccccgggtgatggtggtgggccccacagatgtgggcaagagcacagtgtgccgcctgctgctgaactatgccatcaccagccggctggctgatgtgttcaaccagagatgtgaggtgaacagaagagcctctgtgtctggctgcgtcatcaacacctgtggctgggtgaagggcagcggctaccaggccctggtgcatgctgccagcgcctttgaggtggatgtggtggtggtgctggaccaggagcggctgtacaatgagctgaagagggacctgccccactttgtgaggacagtgctgctgcccaagagcggcggcgtggtggagaggagcaaggacttcagaagagaatgtagagatgagcgcatccgggagtacttctacggcttccggggctgcttctacccccacgccttcaacgtgaagttcagtgatgtgaagatctacaaggtgggcgcccccaccatcccagacagctgcctgcccctgggcatgagccaggaggacaaccagctgaagctggtgcctgtgaccccaggccgggacatggtgcaccacctgctgtctgtgtccacagctgagggcacagaggagaacctgtctgagacctctgtggccggcttcatcgtggtgacctctgtggacctggagcaccaggtgttcaccgtgctgagccctgccccccggcccctgcccaagaacttcctgctgatcatggacatccgcttcatggacctgaagtag

SEQ ID NO: 147861 - DNA, 810 bp, synthetic construct
  misc_feature 1..810: note = Description of Artificial Sequence: Synthetic coding sequence
  source 1..810: mol_type = other DNA
atgcaggagatcatcgcctctgtggaccacatcaagtttgacctggagattgctgtggagcagcagctgggcgcccagcccctgcccttccctggcatggacaagagcggggctgctgtgtgtgagttcttcctgaaggccgcctgtgggaaaggaggcatgtgccccttccgccacatctctggagagaagacagtggtgtgcaagcactggctgcggggcctgtgcaagaagggggaccagtgtgagttcctgcacgagtatgacatgaccaagatgcctgagtgctacttctacagcaagtttggagagtgcagcaacaaggaatgtcccttcctgcacattgatcctgagagcaagatcaaggactgcccctggtatgaccggggcttctgcaagcacggccccctgtgccgccaccgccacacccggcgggtcatctgtgtgaactacctggtgggcttctgcccagagggccccagctgcaagttcatgcaccccaggtttgagctgcccatgggcaccacagagcagccccccctgccccagcagacccagcccccagccaagcagagcaacaacccccccctgcagaggagcagcagcctcatccagctgaccagccagaacagcagccccaaccagcagaggaccccccaggtgattggagtgatgcagagccagaacagcagcgctggcaacagaggcccccggcccctggagcaggtgacctgctacaagtgtggggagaagggccactacgccaaccgctgcaccaagggccacctggccttcctgagcggccagtag

SEQ ID NO: 147862 - DNA, 735 bp, synthetic construct
  misc_feature 1..735: note = Description of Artificial Sequence: Synthetic coding sequence
  source 1..735: mol_type = other DNA
atgcaggagatcatcgcctctgtggaccacatcaagtttgacctggagattgctgtggagcagcagctgggcgcccagcccctgcccttccctggcatggacaagagcggggctgctgtgtgtgagttcttcctgaaggccgcctgtgggaaaggaggcatgtgccccttccgccacatctctggagagaagacagtggtgtgcaagcactggctgcggggcctgtgcaagaagggggaccagtgtgagttcctgcacgagtatgacatgaccaagatgcctgagtgctacttctacagcaagtttggagagtgcagcaacaaggaatgtcccttcctgcacattgatcctgagagcaagatcaaggactgcccctggtatgaccggggcttctgcaagcacggccccctgtgccgccaccgccacacccggcgggtcatctgtgtgaactacctggtgggcttctgcccagagggccccagctgcaagttcatgcaccccaggtttgagctgcccatgggcaccacagagcagccccccctgccccagcagacccagcccccagccaagcagaggaccccccaggtgattggagtgatgcagagccagaacagcagcgctggcaacagaggcccccggcccctggagcaggtgacctgctacaagtgtggggagaagggccactacgccaaccgctgcaccaagggccacctggccttcctgagcggccagtag

SEQ ID NO: 147863 - DNA, 636 bp, synthetic construct
  misc_feature 1..636: note = Description of Artificial Sequence: Synthetic coding sequence
  source 1..636: mol_type = other DNA
atgcaggagatcatcgcctctgtggaccacatcaagtttgacctggagattgctgtggagcagcagctgggcgcccagcccctgcccttccctggcatggacaagagcggggctgctgtgtgtgagttcttcctgaaggccgcctgtgggaaaggaggcatgtgccccttccgccacatctctggagagaagacagtggtgtgcaagcactggctgcggggcctgtgcaagaagggggaccagtgtgagttcctgcacgagtatgacatgaccaagatgcctgagtgctacttctacagcaagtttggccccctgtgccgccaccgccacacccggcgggtcatctgtgtgaactacctggtgggcttctgcccagagggccccagctgcaagttcatgcaccccaggtttgagctgcccatgggcaccacagagcagccccccctgccccagcagacccagcccccagccaagaggaccccccaggtgattggagtgatgcagagccagaacagcagcgctggcaacagaggcccccggcccctggagcaggtgacctgctacaagtgtggggagaagggccactacgccaaccgctgcaccaagggccacctggccttcctgagcggccagtag

SEQ ID NO: 147864 - DNA, 1767 bp, synthetic construct
  misc_feature 1..1767: note = Description of Artificial Sequence: Synthetic coding sequence
  source 1..1767: mol_type = other DNA
atggctgatggagtggaccacatcgacatctatgcagatgtgggggaggagttcaaccaggaggccgagtatggaggccatgaccagattgacctgtatgatgatgtgatcagccccagcgccaacaatggagatgcccctgaggaccgggactacatggacaccctgcccccaacagtgggagatgatgtgggcaagggggccgccccaaatgtggtgtacacctacacaggcaagagaattgccctgtacatcggcaacctgacctggtggaccacagatgaggacctgacagaggccgtgcacagcctgggcgtgaatgacatcctggagatcaagttctttgagaacagagccaacggccagagcaagggctttgccctggtgggcgtgggcagcgaggccagcagcaagaagctgatggacctgctgcccaagcgggagctgcacggccagaaccctgtggtgaccccctgcaacaagcagttcctgagccagtttgagatgcagagcaggaagaccacccagagcggccagatgtctggagagggcaaggccggccccccaggcggcagcagcagagctgccttcccccagggcggccggggccggggccgcttccctggagctgtgcctggaggagaccgcttccctggccctgctggccctgggggccccccaccacccttccctggcaacctgatcaagcacctggtgaagggcacccggcccctcttcctggagacccgcatcccctggcacatgggccacagcattgaggagatccccatcttcggcctgaaggccggccagaccccaccccggccccccctgggccccccaggccccccaggccccccaggccccccacctcctggccaggtgctgcccccacccctggccggcccccccaacagaggagaccggcccccacctcctgtgctcttccctggccagcccttcggccagccccccctgggccccctgcccccaggccccccacctcctgtgcccggctacggccccccacctggccccccaccaccccagcagggccccccacctcctcctggccccttccccccccggcccccaggccccctgggcccccccctgaccctggcccccccaccccacctgcccggccccccacctggggcccctcctccagcccctcatgtgaacccagccttcttccccccacccaccaacagcggcatgcccaccagtgacagccggggccccccacccacagacccctacggccggcccccaccctatgacagaggagactatggccccccaggccgggagatggacacagcccggacccccctgtctgaggccgagtttgaggagatcatgaacagaaacagagccatcagcagcagcgccatcagcagagctgtgtctgatgccagcgctggggactatggcagcgccatcgagaccctggtgacagccatcagcctcatcaagcagagcaaggtgtctgcagatgaccgctgcaaggtgctgatcagcagcctgcaggactgcctgcatggaattgagagcaagagctatggcagcggcagcagaagagagaggagccgggagcgggaccacagccgcagccgggagaagagccgccgccacaagagccgcagccgggacagacatgatgactactaccgggagaggagccgggagcgggagcggcaccgggaccgggaccgggaccgggaccgggagcgggaccgggagcgggagtaccgccacaggtag

SEQ ID NO: 147865 - DNA, 1656 bp, synthetic construct
  misc_feature 1..1656: note = Description of Artificial Sequence: Synthetic coding sequence
  source 1..1656: mol_type = other DNA
atggctgatggagtggaccacatcgacatctatgcagatgtgggggaggagttcaaccaggaggccgagtatggaggccatgaccagattgacctgtatgatgatgtgatcagccccagcgccaacaatggagatgcccctgaggaccgggactacatggacaccctgcccccaacagtgggagatgatgtgggcaagggggccgccccaaatgtggtgtacacctacacaggcaagagaattgccctgtacatcggcaacctgacctggtggaccacagatgaggacctgacagaggccgtgcacagcctgggcgtgaatgacatcctggagatcaagttctttgagaacagagccaacggccagagcaagggctttgccctggtgggcgtgggcagcgaggccagcagcaagaagctgatggacctgctgcccaagcgggagctgcacggccagaaccctgtggtgaccccctgcaacaagcagttcctgagccagtttgagatgcagagcaggaagaccacccagagcggccagatgtctggagagggcaaggccggccccccaggcggcagcagcagagctgccttcccccagggcggccggggccggggccgcttccctggagctgtgcctggaggagaccgcttccctggccctgctggccctgggggccccccaccacccttccctgctggccagaccccacccaggcctcccctgggccccccaggccccccaggccccccaggccccccacctcctggccaggtgctgcccccacccctggccggcccccccaacagaggagacaggcctcctcctcctgtgctcttccctggccagcccttcggccagccccccctgggccccctgcccccaggccccccacctcctgtgcccggctacggccccccacctggccccccaccaccccagcagggccccccacctcctcctggccccttcccccccaggcctcctggccccctgggcccccccctgaccctggcccccccaccccacctgcccggccccccacctggggcccctcctccagccccccacgtgaacccagccttcttccccccacccaccaacagcggcatgcccaccagtgacagccggggccccccacccacagacccctacggccggcccccaccctatgacagaggagactatggccccccaggccgggagatggacacagcccggacccccctgtctgaggccgagtttgaggagatcatgaacagaaacagagccatcagcagcagcgccatcagcagagctgtgtctgatgccagcgctggggactatggcagcgccatcgagaccctggtgacagccatcagcctcatcaagcagagcaaggtgtctgcagatgaccgctgcaaggtgctgatcagcagcctgcaggactgcctgcacggcatcgagagcaagagctatggcagcggcagccggcgggagaggagccgggagcgggaccacagccgcagccgggagaagagcagaagacacaagagccgcagccgggacagacatgatgactactaccgggagaggagccgggagcgggagcggcaccgggaccgggaccgggaccgggaccgggagcgggaccgggagcgggagtaccgccacaggtag

SEQ ID NO: 147866 - DNA, 1437 bp, synthetic construct
  misc_feature 1..1437: note = Description of Artificial Sequence: Synthetic coding sequence
  source 1..1437: mol_type = other DNA
atggctgatggagtggaccacatcgacatctatgcagatgtgggggaggagttcaaccaggaggccgagtatggaggccatgaccagattgacctgtatgatgatgtgatcagccccagcgccaacaatggagatgcccctgaggaccgggactacatggacaccctgcccccaacagtgggagatgatgtgggcaagggggccgccccaaatgtggtgtacacctacacaggcaagagaattgccctgtacatcggcaacctgacctggtggaccacagatgaggacctgacagaggccgtgcacagcctgggcgtgaatgacatcctggagatcaagttctttgagaacagagccaacggccagagcaagggctttgccctggtgggcgtgggcagcgaggccagcagcaagaagctgatggacctgctgcccaagcgggagctgcacggccagaaccctgtggtgaccccctgcaacaagcagttcctgagccagtttgagatgcagagcaggaagaccacccagagcggccagatgtctggagagggcaaggccggccccccaggagctggcccccccaacagaggagaccggcccccacctcctgtgctcttccctggccagcccttcggccagccccccctgggccccctgcccccaggccccccacctcctgtgcccggctacggccccccacctggccccccaccaccccagcagggccccccacctcctcctggccccttccccccccggcccccaggccccctgggcccccccctgaccctggcccccccaccccacctgcccggccccccacctggggcccctcctccagcccctcatgtgaacccagccttcttccccccacccaccaacagcggcatgcccaccagtgacagccggggccccccacccacagacccctacggccggcccccaccctatgacagaggagactatggccccccaggccgggagatggacacagcccggacccccctgtctgaggccgagtttgaggagatcatgaacagaaacagagccatcagcagcagcgccatcagcagagctgtgtctgatgccagcgctggggactatggcagcgccatcgagaccctggtgacagccatcagcctcatcaagcagagcaaggtgtctgcagatgaccgctgcaaggtgctgatcagcagcctgcaggactgcctgcatggaattgagagcaagagctatggcagcggcagcagaagagagaggagccgggagcgggaccacagccgcagccgggagaagagccgccgccacaagagccgcagccgggacagacatgatgactactaccgggagaggagccgggagcgggagcggcaccgggaccgggaccgggaccgggaccgggagcgggaccgggagcgggagtaccgccacaggtag

SEQ ID NO: 147867 - DNA, 1851 bp, synthetic construct
  misc_feature 1..1851: note = Description of Artificial Sequence: Synthetic coding sequence
  source 1..1851: mol_type = other DNA
atgagcagcctggccgtgcgggaccctgccatggacaggagcctgcggtctgtgtttgtgggcaacatcccctatgaggccacagaggagcagctgaaggacatcttcagcgaggtgggctctgtggtgtccttccggctggtgtatgaccgggagaccgggaagcccaagggctacggcttctgtgagtaccaggaccaggagacagccctgagcgccatgaggaacctgaatggccgggagttcagcggccgggccctgcgggtggacaatgctgccagcgagaagaacaaggaggagctgaagagcctgggccctgctgcccccatcatcgacagcccctatggagaccccattgatcctgaagatgcccctgagagcatcaccagggctgtggccagcctgcccccagagcagatgtttgagctgatgaagcagatgaagctgtgtgtgcagaacagccaccaggaggccaggaacatgctgctgcagaacccccagctggcctatgccctgctgcaggcccaggtggtgatgaggatcatggaccctgagatcgccctgaagatcctgcacaggaagatccacgtgacccccctcatccctgggaagagccagagcgtgtctgtgtctggccctggccctggccctggccctggcctgtgccccggccccaacgtgctgctgaaccagcagaaccccccagccccccagccccagcacctggcccggcggcctgtgaaggacatcccccccctgatgcagacccccatccagggcggcatcccagcccctggccccatcccagctgctgtgcctggagctggccctggcagcctgacccctgggggcgccatgcagccccagctgggcatgcctggggtgggccctgtgcccctggagcggggccaggtgcagatgtctgacccccgggcccccatcccccggggccctgtgaccccaggcggcctgcccccccggggcctgctgggagatgccccaaatgacccccggggcggcaccctgctgtctgtgactggagaggtggagccccggggctacctgggccccccccaccagggcccccccatgcaccacgccagcggccatgacacccggggccccagcagccatgagatgaggggcggccccctgggggacccccggctgctgattggagagccccggggccccatgattgaccagaggggcctgcccatggatggccggggcggccgggacagccgggccatggagacccgggccatggagacagaggtgctggagaccagggtgatggagcggcggggcatggagacctgtgccatggagacccggggcatggaggcccggggcatggatgcccggggcctggagatgaggggccctgtgcccagcagccggggccccatgactggaggcatccagggccctggccccatcaacattggagctgggggccccccccagggcccccggcaggtgcccggcatctctggagtgggcaaccctggggccggcatgcagggcaccggcatccagggcaccggcatgcagggcgccggcatccagggcggcggcatgcagggcgccggcatccagggcgtgtccatccagggcggcggcatccagggcggcggcatccagggcgccagcaagcagggcggcagccagcccagcagcttcagccctggccagagccaggtgaccccccaggaccaggagaaggccgccctgatcatgcaggtgctgcagctgacagctgaccagatcgccatgctgcccccagagcagaggcagagcatcctgatcctgaaggagcagatccagaagagcactggagccagctag

SEQ ID NO: 147868 - DNA, 2541 bp, synthetic construct
  misc_feature 1..2541: note = Description of Artificial Sequence: Synthetic coding sequence
  source 1..2541: mol_type = other DNA
atgctgttcaccgtgtcctgcagcaagatgagcagcatcgtggacagagatgacagcagcatctttgatggcctggtggaggaggatgacaaggacaaggccaagagggtgtccaggaacaagtctgagaagaagaggcgggaccagttcaacgtgctgatcaaggagctgggctccatgctgcctggaaatgccaggaagatggacaagagcacagtgctgcagaagagcattgacttcctgaggaagcacaaggagatcacagcccagagtgatgccagcgagatccggcaggactggaagcccaccttcctgagcaatgaggagttcacccagctgatgctggaggccctggatggcttcttcctggccatcatgacagatggcagcatcatctacgtgtctgagagcgtgaccagcctgctggagcacctgcccagcgacctggtggaccagagcatcttcaacttcatccctgagggggagcacagcgaggtgtacaagatcctgagcacccacctgctggagagtgacagcctgaccccagagtacctgaagagcaagaaccagctggagttctgctgccacatgctgcggggcaccatcgaccccaaggagcccagcacctatgaatatgtgaagttcatcggcaacttcaagagcctgaacagcgtgagcagcagcgcccacaatggatttgagggcaccatccagaggacccaccggcccagctatgaggacagagtgtgctttgtggccaccgtgcggctggccaccccccagttcatcaaggagatgtgcaccgtggaggagcccaatgaggagttcaccagccgccacagcctggagtggaagttcctgttcctggaccaccgggccccacccatcatcggctacctgccctttgaggtgctgggcaccagcggctatgactactaccacgtggatgacctggagaacctggccaagtgccacgagcacctgatgcagtatggcaagggcaagagctgctactaccgcttcctgaccaagggccagcagtggatctggctgcagacccactactacatcacctaccaccagtggaacagcaggcctgagttcatcgtgtgcacccacacagtggtgtcctatgcagaggtgcgggcagagcggcggcgggagctgggcatcgaggagagcctgcctgagacagctgctgacaagagccaggacagcggcagtgacaaccgcatcaacacagtgtccctgaaggaggccctggagagatttgaccacagccccaccccatctgccagcagccgcagcagcaggaagagcagccacacagctgtgtctgaccccagcagcacccccaccaagatccccacagacaccagcaccccaccccggcagcacctgcctgcccacgagaagatggtgcagaggaggagcagcttcagcagccagagcatcaacagccagagcgtgggcagcagcctgacccagcctgtgatgagccaggccaccaacctgcccatcccccagggcatgagccagttccagttcagcgcccagctgggcgccatgcagcacctgaaggaccagctggagcagaggaccaggatgattgaggccaacatccaccggcagcaggaggagctgaggaagatccaggagcagctgcagatggtgcacggccagggcctgcagatgttcctgcagcagagcaaccctggcctgaactttggatctgtgcagctgagcagcggcaacagcagcaacatccagcagctggcccccatcaacatgcagggccaggtggtgcccaccaaccagatccagagcggcatgaacacaggccacatcggcaccacccagcacatgatccagcagcagaccctgcagagcaccagcacccagagccagcagaatgtgctgagcggccacagccagcagaccagcctgcccagccagacccagagcaccctgacagcccccctgtacaacaccatggtgatcagccagcctgctgctggctccatggtgcagatccccagctccatgccccagaacagcacccagagcgctgctgtgaccaccttcacccaggaccggcagatccgcttcagccagggccagcagctggtgaccaagctggtgacagcccctgtggcctgtggggctgtgatggtgcccagcaccatgctgatgggccaggtggtgacagcctaccccacctttgccacccagcagcagcagagccagaccctgtctgtgacccagcagcagcagcagcagagcagccaggagcagcagctgacctctgtgcagcagcccagccaggcccagctgacccagcccccccagcagttcctgcagaccagccggctgctgcacggcaaccccagcacccagctgatcctgtctgctgccttccccctgcagcagagcaccttcccccagagccaccaccagcagcaccagagccagcagcagcagcagctgagccgccacaggacagacagcctgcctgaccccagcaaggtgcagccccagtag

SEQ ID NO: 147869 - DNA, 1278 bp, synthetic construct
  misc_feature 1..1278: note = Description of Artificial Sequence: Synthetic coding sequence
  source 1..1278: mol_type = other DNA
atgggagaggaggccaatgatgacaagaagcccaccaccaagtttgagctggagcgggagacagagctgcgctttgaggtggaggccagccagagcgtgcagctggagctgctgaccggcatggccgagatctttggaacagagctgaccaggaacaagaagttcacctttgatgctggggccaaggtggccgtgttcacctggcacggctgcagcgtgcagctgagcggccgcacagaggtggcctacgtgtccaaggacacccccatgctgctgtacctgaacacccacacagccctggagcagatgaggcggcaggccgagaaggaggaggagcggggcccccgggtgatggtggtgggccccacagatgtgggcaagagcacagtgtgccgcctgctgctgaactatgctgtgcggctgggcagaagacccacctacgtggagctggatgtgggccagggctctgtgtccatccctggcaccatgggcgccctgtacatcgagaggcctgcagatgtggaggagggcttcagcatccaggcccccctggtgtaccacttcggcagcaccaccccaggcaccaacatcaagctgtacaacaagatcaccagccggctggctgatgtgttcaaccagagatgtgaggtgaacagaagagcctctgtgtctggctgcgtcatcaacacctgtggctgggtgaagggcagcggctaccaggccctggtgcatgctgccagcgcctttgaggtggatgtggtggtggtgctggaccaggagcggctgtacaatgagctgaagagggacctgccccactttgtgaggacagtgctgctgcccaagagcggcggcgtggtggagaggagcaaggacttcagaagagaatgtagagatgagcgcatccgggagtacttctacggcttccggggctgcttctacccccacgccttcaacgtgaagttcagtgatgtgaagatctacaaggtgggcgcccccaccatcccagacagctgcctgcccctgggcatgagccaggaggacaaccagctgaagctggtgcctgtgaccccaggccgggacatggtgcaccacctgctgtctgtgtccacagctgagggcacagaggagaacctgtctgagacctctgtggccggcttcatcgtggtgacctctgtggacctggagcaccaggtgttcaccgtgctgagccctgccccccggcccctgcccaagaacttcctgctgatcatggacatccgcttcatggacctgaagtag

SEQ ID NO: 147870 - DNA, 1311 bp, synthetic construct
  misc_feature 1..1311: note = Description of Artificial Sequence: Synthetic coding sequence
  source 1..1311: mol_type = other DNA
atgacagacctgcacagcagctacacagaggagatgggagaggaggccaatgatgacaagaagcccaccaccaagtttgagctggagcgggagacagagctgcgctttgaggtggaggccagccagagcgtgcagctggagctgctgaccggcatggccgagatcttcggcacagagctgaccaggaacaagaagttcacctttgatgctggggccaaggtggccgtgttcacctggcacggctgcagcgtgcagctgagcggccgcacagaggtggcctacgtgtccaaggacacccccatgctgctgtacctgaacacccacacagccctggagcagatgaggcggcaggccgagaaggaggaggagcggggcccccgggtgatggtggtgggccccacagatgtgggcaagagcacagtgtgccgcctgctgctgaactatgctgtgcggctgggccggcggcccacctacgtggagctggatgtgggccagggctctgtgtccatccctggcaccatgggcgccctgtacatcgagaggcctgcagatgtggaggagggcttcagcatccaggcccccctggtgtaccacttcggcagcaccaccccaggcaccaacatcaagctgtacaacaagatcaccagccggctggctgatgtgttcaaccagagatgtgaggtgaacagaagagcctctgtgtctggctgtgtgatcaacacctgtggctgggtgaagggcagcggctaccaggccctggtgcacgccgccagcgcctttgaggtggatgtggtggtggtgctggaccaggagcggctgtacaatgagctgaagagggacctgccccactttgtgaggacagtgctgctgcccaagtctggaggagtggtggagaggagcaaggacttccggcgggagtgcagagatgagcgcatccgggagtacttctacggcttccggggctgcttctacccccacgccttcaacgtgaagttcagtgatgtgaagatctacaaggtgggcgcccccaccatcccagacagctgcctgcccctgggcatgagccaggaggacaaccagctgaagctggtgcctgtgaccccaggccgggacatggtgcaccacctgctgtctgtgtccacagctgagggcacagaggagaacctgtctgagacctctgtggccggcttcatcgtggtgacctctgtggacctggagcaccaggtgttcaccgtgctgagccctgccccccggcccctgcccaagaacttcctgctgatcatggacatccgcttcatggacctgaagtag

SEQ ID NO: 147871 - DNA, 279 bp, synthetic construct
  misc_feature 1..279: note = Description of Artificial Sequence: Synthetic coding sequence
  source 1..279: mol_type = other DNA
atgggagaggaggccaatgatgacaagaagcccaccaccaagtttgagctggagcgggagacagagctgcgctttgaggtggaggccagccagagcgtgcagctggagctgctgaccggcatggccgagatctttggaacagagctgaccaggaacaagaagttcacctttgatgctggggccaaggtggccgtgttcacctggcacggctgcagcgtgcagctgagcggccgcacagaggtggcctacgtgtccaaggacacccccatgctgctgtag

SEQ ID NO: 147872 - DNA, 1278 bp, synthetic construct; identical to SEQ ID NO: 147869
  misc_feature 1..1278: note = Description of Artificial Sequence: Synthetic coding sequence
  source 1..1278: mol_type = other DNA

SEQ ID NO: 147873 - DNA, 399 bp, synthetic construct
  misc_feature 1..399: note = Description of Artificial Sequence: Synthetic coding sequence
  source 1..399: mol_type = other DNA
atgggagaggaggccaatgatgacaagaagcccaccaccaagtttgagctggagcgggagacagagctgcgctttgaggtggaggccagccagagcgtgcagctggagctgctgaccggcatggccgagatctttggaacagagctgaccaggaacaagaagttcacctttgatgctggggccaaggtggccgtgttcacctggcacggctgcagcgtgcagctgagcggccgcacagaggtggcctacgtgtccaaggacacccccatgctgctgtacctgaacacccacacagccctggagcagatgaggcggcaggccgagaaggaggaggagcggggcccccgggtgatggtggtgggccccacagatgtgggcaagagcacagtgtgcaggtag

SEQ ID NO: 147874 - DNA, 834 bp, synthetic construct
  misc_feature 1..834: note = Description of Artificial Sequence: Synthetic coding sequence
  source 1..834: mol_type = other DNA
atgtggccaggcatcctggtgggcggggcccgggtggccagctgccgctacccagccctgggcccccggctggccgcccacttccctgcccagaggcctccccagaggaccctgcagaatggcctggccctgcagcgctgcctgcacgccacagccacccgggccctgcccctcatccccatcgtggtggagcagacaggccgcggggagcgggcctatgacatctacagccggctgctgcgggagcgcatcgtgtgtgtgatgggccccattgatgacagcgtggccagcctggtgattgcccagctgctcttcctgcagagcgagagcaacaagaagcccatccacatgtacatcaacagccctgggggcgtggtgacagctggcctggccatctatgacaccatgcagtacatcctgaaccccatctgcacctggtgtgtgggccaggccgcctccatgggcagcctgctgctggccgccggcaccccaggcatgaggcacagcctgcccaacagccgcatcatgatccaccagcccagcggcggggcccggggccaggccacagacatcgccatccaggccgaggagatcatgaagctgaagaagcagctgtacaacatctatgccaagcacaccaagcagagcctgcaggtgattgagagcgccatggagcgggaccgctacatgagccccatggaggcccaggagtttggcatcctggacaaggtgctggtgcaccccccccaggatggagaagatgagcccaccctggtgcagaaggagcctgtggaggccgccccagctgctgagcctgtgcctgccagcacctag

SEQ ID NO: 147875 - DNA, 1617 bp, synthetic construct
  misc_feature 1..1617: note = Description of Artificial Sequence: Synthetic coding sequence
  source 1..1617: mol_type = other DNA
atgtggagcggccgcagcagcttcaccagcctggtggtgggcgtgtttgtggtgtatgtggtgcacacctgctgggtgatgtatggcatcgtgtacacccggccctgcagcggagatgccaactgcatccagccctacctggcccggcggcccaagctgcagctgtctgtgtacaccaccaccaggagccacctgggcgctgagaacaacatcgacctggtgctgaatgtggaggactttgatgtggagagcaagtttgagaggacagtgaatgtgtctgtgcccaagaagaccagaaataatggcaccctgtatgcctacatcttcctgcaccacgccggcgtgctgccctggcatgatggcaagcaggtgcacctggtgagccccctgaccacctacatggtgcccaagccagaggagatcaacctgctgactggagagagtgacacccagcagattgaagctgagaagaagcccaccagcgccctggatgagcctgtgagccactggaggccccggctggccctgaatgtgatggctgacaactttgtgtttgatggcagcagcctgcctgcagatgtgcaccgctacatgaagatgatccagctgggcaagacagtgcactacctgcccatcctcttcatcgaccagctgagcaacagagtgaaggacctgatggtgatcaacagaagcaccacagagctgcccctgactgtgtcctatgacaaggtgtccctgggccgcctgcgcttctggatccacatgcaggatgctgtgtacagcctgcagcagtttggcttcagcgagaaggatgctgatgaggtgaagggcatctttgtggacaccaacctgtacttcctggccctgaccttctttgtggccgccttccacctgctgtttgacttcctggccttcaagaatgacatctccttctggaagaagaagaagtccatgattggcatgagcaccaaggctgtgctgtggcgctgcttcagcacagtggtgatcttcctgttcctgctggatgagcagaccagcctgctggtgctggtgcctgctggggtgggcgccgccatcgagctgtggaaggtgaagaaggccctgaagatgaccatcttctggaggggcctgatgcctgagttccagtttggcacctacagcgagagcgagaggaagacagaggagtatgacacccaggccatgaagtacctgagctacctgctgtaccccctgtgtgtgggcggcgctgtgtacagcctgctgaacatcaagtacaagtcctggtacagctggctgatcaacagctttgtgaatggagtgtatgccttcggcttcctgttcatgctgccccagctgtttgtgaactacaagctgaagtctgtggcccacctgccctggaaggccttcacctacaaggccttcaacaccttcattgatgatgtgtttgccttcatcatcaccatgcccaccagccaccggctggcctgcttcagagatgatgtggtgttcctggtgtacctgtaccagcgctggctgtaccctgtggacaagagaagagtgaatgaatttggagagagctatgaggagaaggccacccgggccccccacacagactag

SEQ ID NO: 147876 - DNA, 1509 bp, synthetic construct
  misc_feature 1..1509: note = Description of Artificial Sequence: Synthetic coding sequence
  source 1..1509: mol_type = other DNA
atgtggagcggccgcagcagcttcaccagcctggtggtgggcgtgtttgtggtgtatgtggtgcacacctgctgggtgatgtatggcatcgtgtacacccggccctgcagcggagatgccaactgcatccagccctacctggcccggcggcccaagctgcagctgtctgtgtacaccaccaccaggagccacctgggcgctgagaacaacatcgacctggtgctgaatgtggaggactttgatgtggagagcaagtttgagaggacagtgaatgtgtctgtgcccaagaagaccagaaataatggcaccctgtatgcctacatcttcctgcaccacgccggcgtgctgccctggcatgatggcaagcaggtgcacctggtgagccccctgaccacctacatggtgcccaagccagaggagatcaacctgctgactggagagagtgacacccagcagattgaagctgagaagaagcccaccagcgccctggatgagcctgtgagccactggaggccccggctggccctgaatgtgatggctgacaactttgtgtttgatggcagcagcctgcctgcagatgtgcaccgctacatgaagatgatccagctgggcaagacagtgcactacctgcccatcctcttcatcgaccagctgagcaacagagtgaaggacctgatggtgatcaacagaagcaccacagagctgcccctgactgtgtcctatgacaaggtgtccctgggccgcctgcgcttctggatccacatgcaggatgctgtgtacagcctgcagcagtttggcttcagcgagaaggatgctgatgaggtgaagggcatctttgtggacaccaacctgtacttcctggccctgaccttctttgtggccgccttccacctgctgtttgacttcctggccttcaagaatgacatctccttctggaagaagaagaagtccatgattggcatgagcaccaagctgtggaaggtgaagaaggccctgaagatgaccatcttctggaggggcctgatgcctgagttccagtttggcacctacagcgagagcgagaggaagacagaggagtatgacacccaggccatgaagtacctgagctacctgctgtaccccctgtgtgtgggcggcgctgtgtacagcctgctgaacatcaagtacaagtcctggtacagctggctgatcaacagctttgtgaatggagtgtatgccttcggcttcctgttcatgctgccccagctgtttgtgaactacaagctgaagtctgtggcccacctgccctggaaggccttcacctacaaggccttcaacaccttcattgatgatgtgtttgccttcatcatcaccatgcccaccagccaccggctggcctgcttcagagatgatgtggtgttcctggtgtacctgtaccagcgctggctgtaccctgtggacaagagaagagtgaatgaatttggagagagctatgaggagaaggccacccgggccccccacacagactag

SEQ ID NO: 147877 - DNA, 1350 bp, synthetic construct
  misc_feature 1..1350: note = Description of Artificial Sequence: Synthetic coding sequence
  source 1..1350: mol_type = other DNA
atgatgaagaccctgctgctgtttgtgggcctgctgctgacctgggagagcggccaggtgctgggggaccagacagtgtctgacaatgagctgcaggagatgagcaaccagggcagcaaatatgtgaacaaggagatccagaatgctgtgaatggagtgaagcagatcaagaccctcatcgagaagaccaatgaggagaggaagaccctgctgagcaacctggaggaggccaagaagaagaaggaggatgccctgaatgagacccgggagagcgagaccaagctgaaggagctgcccggggtgtgcaatgagaccatgatggccctgtgggaggagtgcaagccctgcctgaagcagacctgcatgaagttctacgcccgggtgtgccgcagcggcagcggcctggtgggccggcagctggaggagttcctgaaccagagcagccccttctacttctggatgaatggagacagaattgacagcctgctggagaatgaccggcagcagacccacatgctggatgtgatgcaggaccacttcagccgggccagcagcatcattgatgagctgttccaggaccgcttcttcacccgggagccccaggacacctaccactacctgcccttcagcctgccccaccggcggccccacttcttcttccccaagagcagaattgtgcgcagcctgatgcccttcagcccctatgagcccctgaacttccacgccatgttccagcccttcctggagatgatccacgaggcccagcaggccatggacatccacttccacagccctgccttccagcaccccccaacagagttcatccgggagggagatgatgacagaacagtgtgccgggagatccgccacaacagcacaggctgcctgaggatgaaggaccagtgtgacaagtgccgggagatcctgtctgtggactgcagcaccaacaaccccagccaggccaagctgcggcgggagctggatgagagcctgcaggtggccgagcggctgaccaggaagtacaatgagctgctgaagagctaccagtggaagatgctgaacaccagcagcctgctggagcagctgaatgagcagttcaactgggtgtcccggctggccaacctgacccagggcgaggaccagtactacctgcgggtgaccaccgtggccagccacaccagtgacagtgatgtgcccagcggcgtgacagaggtggtggtgaagctgtttgacagcgaccccatcaccgtgacagtgcctgtggaggtgtccaggaagaaccccaagttcatggagaccgtggccgagaaggccctgcaggagtacaggaagaagcaccgggaggagtag

SEQ ID NO: 147878 - DNA, 825 bp, synthetic construct
  misc_feature 1..825: note = Description of Artificial Sequence: Synthetic coding sequence
  source 1..825: mol_type = other DNA
atgcaggaccacttcagccgggccagcagcatcattgatgagctgttccaggaccgcttcttcacccgggagccccaggacacctaccactacctgcccttcagcctgccccacagaagaccccacttcttcttccccaagagccgcatcgtgcgcagcctgatgcccttcagcccctatgagcccctgaacttccacgccatgttccagcccttcctggagatgattcatgaggcccagcaggccatggacatccacttccacagccctgccttccagcaccccccaacagagttcatccgggagggagatgatgacagaacagtgtgccgggagatccgccacaacagcacaggctgcctgaggatgaaggaccagtgtgacaagtgccgggagatcctgtctgtggactgcagcaccaacaaccccagccaggccaagctgcggcgggagctggatgagagcctgcaggtggccgagcggctgaccaggaagtacaatgagctgctgaagagctaccagtggaagatgctgaacaccagcagcctgctggagcagctgaatgagcagttcaactgggtgtcccggctggccaacctgacccagggcgaggaccagtactacctgcgggtgaccaccgtggccagccacaccagtgacagtgatgtgcccagcggcgtgacagaggtggtggtgaagctgtttgacagcgaccccatcaccgtgacagtgcctgtggaggtgtccaggaagaaccccaagttcatggagaccgtggccgagaaggccctgcaggagtacaggaagaagcaccgggaggagtag

SEQ ID NO: 147879 - DNA, 1350 bp, synthetic construct; identical to SEQ ID NO: 147877
  misc_feature 1..1350: note = Description of Artificial Sequence: Synthetic coding sequence
  source 1..1350: mol_type = other DNA

SEQ ID NO: 147880 - DNA, 615 bp, synthetic construct
  misc_feature 1..615: note = Description of Artificial Sequence: Synthetic coding sequence
  source 1..615: mol_type = other DNA
atgatgaagaccctgctgctgtttgtgggcctgctgctgacctgggagagcggccaggtgctgggggaccagacagtgtctgacaatgagctgcaggagatgagcaaccagggcagcaaatatgtgaacaaggagatccagaatgctgtgaatggagtgaagcagatcaagaccctcatcgagaagaccaatgaggagaggaagaccctgctgagcaacctggaggaggccaagaagaagaaggaggatgccctgaatgagacccgggagagcgagaccaagctgaaggagctgcccggggtgtgcaatgagaccatgatggccctgtgggaggagtgcaagccctgcctgaagcagacctgcatgaagttctacgcccgggtgtgccgcagcggcagcggcctggtgggccggcagctggaggagttcctgaaccagagcagccccttctacttctggatgaatggagacagaattgacagcctgctggagaatgaccggcagcagacccacatgctggatgtgatgcaggaccacttcagccgggccagcagcatcattgatgagctgttccaggaccgcttcttcacccgggagccccaggacacctactag

SEQ ID NO: 147881 - DNA, 1350 bp, synthetic construct; identical to SEQ ID NO: 147877
  misc_feature 1..1350: note = Description of Artificial Sequence: Synthetic coding sequence
  source 1..1350: mol_type = other DNA

SEQ ID NO: 147882 - DNA, 816 bp, synthetic construct
  misc_feature 1..816: note = Description of Artificial Sequence: Synthetic coding sequence
  source 1..816: mol_type = other DNA
atgatgaagaccctgctgctgtttgtgggcctgctgctgacctgggagagcggccaggtgctgggggaccagacagtgtctgacaatgagctgcaggagatgagcaaccagggcagcaaatatgtgaacaaggagatccagaatgctgtgaatggagtgaagcagatcaagaccctcatcgagaagaccaatgaggagaggaagaccctgctgagcaacctggaggaggccaagaagaagaaggaggatgccctgaatgagacccgggagagcgagaccaagctgaaggagctgcccggggtgtgcaatgagaccatgatggccctgtgggaggagtgcaagccctgcctgaagcagacctgcatgaagttctacgcccgggtgtgccgcagcggcagcggcctggtgggccggcagctggaggagttcctgaaccagagcagccccttctacttctggatgaatggagacagaattgacagcctgctggagaatgaccggcagcagacccacatgctggatgtgatgcaggaccacttcagccgggccagcagcatcattgatgagctgttccaggacagcctgatgcccttcagcccctatgagcccctgaacttccacgccatgttccagcccttcctggagatgatccacgaggcccagcaggccatggacatccacttccacagccctgccttccagcaccccccaacagagttcatccgggagggagatgatgacagaacagtgtgccgggagatccgccacaacagcacaggctgcctgaggatgaaggaccagtgtgacaagtgctag

SEQ ID NO: 147883 - DNA, 1383 bp, synthetic construct
  misc_feature 1..1383: note = Description of Artificial Sequence: Synthetic coding sequence
  source 1..1383: mol_type = other DNA
atggaggcctgcaaggacagcagaattggaggcatgatgaagaccctgctgctgtttgtgggcctgctgctgacctgggagagcggccaggtgctgggggaccagacagtgtctgacaatgagctgcaggagatgagcaaccagggcagcaaatatgtgaacaaggagatccagaatgctgtgaatggagtgaagcagatcaagaccctgattgagaagaccaatgaggagaggaagaccctgctgagcaacctggaggaggccaagaagaagaaggaggatgccctgaatgagacccgggagagcgagaccaagctgaaggagctgcccggggtgtgcaatgagaccatgatggccctgtgggaggagtgcaagccctgcctgaagcagacctgcatgaagttctacgcccgggtgtgccgcagcggcagcggcctggtgggccggcagctggaggagttcctgaaccagagcagccccttctacttctggatgaatggagacagaattgacagcctgctggagaatgaccggcagcagacccacatgctggatgtgatgcaggaccacttcagccgggccagcagcatcattgatgagctgttccaggaccgcttcttcacccgggagccccaggacacctaccactacctgcccttcagcctgccccacagaagaccccacttcttcttccccaagagccgcatcgtgcgcagcctgatgcccttcagcccctatgagcccctgaacttccacgccatgttccagcccttcctggagatgattcatgaggcccagcaggccatggacatccacttccacagccctgccttccagcaccccccaacagagttcatccgggagggagatgatgacagaacagtgtgccgggagatccgccacaacagcacaggctgcctgaggatgaaggaccagtgtgacaagtgccgggagatcctgtctgtggactgcagcaccaacaaccccagccaggccaagctgcggcgggagctggatgagagcctgcaggtggccgagcggctgaccaggaagtacaatgagctgctgaagagctaccagtggaagatgctgaacaccagcagcctgctggagcagctgaatgagcagttcaactgggtgtcccggctggccaacctgacccagggcgaggaccagtactacctgcgggtgaccaccgtggccagccacaccagtgacagtgatgtgcccagcggcgtgacagaggtggtggtgaagctgtttgacagcgaccccatcaccgtgacagtgcctgtggaggtgtccaggaagaaccccaagttcatggagaccgtggccgagaaggccctgcaggagtacaggaagaagcaccgggaggagtag

SEQ ID NO: 147884 - DNA, 1506 bp, synthetic construct
  misc_feature 1..1506: note = Description of Artificial Sequence: Synthetic coding sequence
  source 1..1506: mol_type = other DNA
atgcaggtgtgcagccagccccagaggggctgtgtgcgggagcagagcgccatcaacacagccccacccagcgcccacaatgctgccagccctggaggagcccggggccaccgggtgcccctgacagaggcctgcaaggacagccgcatcggcggcatgatgaagaccctgctgctgtttgtgggcctgctgctgacctgggagagcggccaggtgctgggggaccagacagtgtctgacaatgagctgcaggagatgagcaaccagggcagcaaatatgtgaacaaggagatccagaatgctgtgaatggagtgaagcagatcaagaccctcatcgagaagaccaatgaggagaggaagaccctgctgagcaacctggaggaggccaagaagaagaaggaggatgccctgaatgagacccgggagagcgagaccaagctgaaggagctgcccggggtgtgcaatgagaccatgatggccctgtgggaggagtgcaagccctgcctgaagcagacctgcatgaagttctacgcccgggtgtgccgcagcggcagcggcctggtgggccggcagctggaggagttcctgaaccagagcagccccttctacttctggatgaatggagacagaattgacagcctgctggagaatgaccggcagcagacccacatgctggatgtgatgcaggaccacttcagccgggccagcagcatcattgatgagctgttccaggaccgcttcttcacccgggagccccaggacacctaccactacctgcccttcagcctgccccaccggcggccccacttcttcttccccaagagcagaattgtgcgcagcctgatgcccttcagcccctatgagcccctgaacttccacgccatgttccagcccttcctggagatgatccacgaggcccagcaggccatggacatccacttccacagccctgccttccagcaccccccaacagagttcatccgggagggagatgatgacagaacagtgtgccgggagatccgccacaacagcacaggctgcctgaggatgaaggaccagtgtgacaagtgccgggagatcctgtctgtggactgcagcaccaacaaccccagccaggccaagctgcggcgggagctggatgagagcctgcaggtggccgagcggctgaccaggaagtacaatgagctgctgaagagctaccagtggaagatgctgaacaccagcagcctgctggagcagctgaatgagcagttcaactgggtgtcccggctggccaacctgacccagggcgaggaccagtactacctgcgggtgaccaccgtggccagccacaccagtgacagtgatgtgcccagcggcgtgacagaggtggtggtgaagctgtttgacagcgaccccatcaccgtgacagtgcctgtggaggtgtccaggaagaaccccaagttcatggagaccgtggccgagaaggccctgcaggagtacaggaagaagcaccgggaggagtag

SEQ ID NO: 147885 - DNA, 894 bp, synthetic construct
  misc_feature 1..894: note = Description of Artificial Sequence: Synthetic coding sequence
  source 1..894: mol_type = other DNA
atggaggcctgcaaggacagcagaattggaggcatgatgaagaccctgctgctgtttgtgggcctgctgctgacctgggagagcggccaggtgctgggggaccagacagtgtctgacaatgagctgcaggagatgagcaaccagggcagcaaatatgtgaacaaggagatccagaatgctgtgaatggagtgaagcagatcaagaccctgattgagaagaccaatgaggagaggaagaccctgctgagcaacctggaggaggccaagaagaagaaggaggatgccctgaatgagacccgggagagcgagaccaagctgaaggagctgcccggggtgtgcaatgagaccatgatggccctgtgggaggagtgcaagccctgcctgaagcagacctgcatgaagttctacgcccgggtgtgccgcagcggcagcggcctggtgggccggcagctggaggagttcctgaaccagagcagccccttctacttctggatgaatggagacagaattgacagcctgctggagaatgaccggcagcagacccacatgctggatgtgatgcaggaccacttcagccgggccagcagcatcattgatgagctgttccaggaccgcttcttcacccgggagccccaggacacctaccactacctgcccttcagcctgccccacagaagaccccacttcttcttccccaagagccgcatcgtgcgcagcctgatgcccttcagcccctatgagcccctgaacttccacgccatgttccagcccttcctggagatgattcatgaggcccagcaggccatggacatccacttccacagccctgccttccagcaccccccaacagagttcatccgggagggagatgatgacagaacagtgtgcaggtag

SEQ ID NO: 147886 - DNA, 2040 bp, synthetic construct
  misc_feature 1..2040: note = Description of Artificial Sequence: Synthetic coding sequence
  source 1..2040: mol_type = other DNA
ctgggccagtttgagcagcccaccggctacatggagaacagcgtgtcctacagcgccattgaagatgtgcagctgctgtcctgggagaatgcccccaagtactgcctgcagctgaccatccctgggggcaccgtgctgctgcaggccgccaacagctacctgcgggaccagtggttccacagcctgcagtggaagaagaagatctacaagtacaagaaggtgctgagcaaccccagccgctgggaggtggtgctgaaggagatccgcaccctggtggacatggccctgaccagccccctgcaggatgacagcatcaaccaggcccccctggagatcgtgtccaagctgctgtctgagaacaccaacctgaccacccaggagcacgagaacatcatcgtggccatcgcccccctgctggagaacaaccaccccccaccagacctgtgtgagttcttctgcaagcactgccgggagcggcccaggtccatggtggtgattgaggtgttcacccctgtggtgcagaggatcctgaagcacaacatggactttggaaaatgtccccggctgcggctcttcacccaggagtacatcctggccctgaatgagctgaatgccggcatggaggtggtgaagaagttcatccagagcatgcacggccccaccggccactgcccccacccccgggtgctgcccaacctggtggccgtgtgcctggccgccatctacagctgctatgaggagttcatcaacagccgggacaacagccccagcctgaaggagatcagaaatggctgccagcagccctgtgacaggaagcccaccctgcccctgcggctgctgcaccccagcccagacctggtgtcccaggaggccaccctgtctgaggcccggctgaagtctgtggtggtggccagcagcgagatccacgtggaggtggagaggaccagcacagccaagccagccctgacagccagcgctggaaatgacagcgagcccaacctgattgactgcctgatggtgtccccagcctgcagcaccatgagcattgagctgggcccccaggccgacaggaccctgggctgctacgtggagatcctgaagctgctgagtgactatgatgactggaggcccagcctggccagcctgctgcagcccatccccttccccaaggaggccctggcccacgagaagttcaccaaggagctgaagtatgtgatccagagatttgctgaggacccccggcaggaggtgcacagctgcctgctgtctgtgcgggccggcaaggatggctggttccagctgtacagccctggaggagtggcctgtgatgatgatggagagctgtttgcctccatggtgcacatcctgatgggcagctgctacaagaccaagaagttcctgctgagcctggccgagaacaagctgggcccctgcatgctgctggccctgcggggcaaccagaccatggtggagatcctgtgcctgatgctggagtacaacatcatcgacaacaatgacacccagctgcagatcatcagcaccctggagagcacagatgtgggcaagaggatgtatgagcagctgtgtgaccggcagcgggagctgaaggagctgcagaggaaaggaggccccacccggctgaccctgcccagcaagagcacagatgctgacctggcccggctgctgagcagcggcagctttggaaacctggagaacctgagcctggccttcaccaacgtgaccagcgcctgtgccgagcacctgatcaagctgcccagcctgaagcagctgaacctgtggagcacccagtttggagatgctggcctgcggctgctgtctgagcacctgaccatgctgcaggtgctgaacctgtgtgagacccctgtgacagatgctggcctgctggccctgagctccatgaagagcctgtgcagcctgaacatgaacagcaccaagctgtctgctgacacctatgaggacctgaaggccaagctgcccaacctgaaggaggtggatgtgcgctacacagaggcctggtag

SEQ ID NO: 147887 - DNA, 2322 bp, synthetic construct
  misc_feature 1..2322: note = Description of Artificial Sequence: Synthetic coding sequence
  source 1..2322: mol_type = other DNA
atggatgtgaccagcagcagcggcggcggcggggacccccggcagatcgaggagaccaagcccctgctgggcggagatgtgtctgcccctgagggcaccaagatgggcgctgtgccctgcagaagagccctgctgctgtgcaatggcatgagatacaagctgctgcaggagggggacatccaggtgtgtgtgatccgccaccccaggaccttcctgagcaagatcctgaccagcaagttcctgcggcgctgggagccccaccacctgaccctggccgacaacagcctggccagcgccacccccaccggctacatggagaacagcgtgtcctacagcgccattgaagatgtgcagctgctgtcctgggagaatgcccccaagtactgcctgcagctgaccatccctgggggcaccgtgctgctgcaggccgccaacagctacctgcgggaccagtggttccacagcctgcagtggaagaagaagatctacaagtacaagaaggtgctgagcaaccccagccgctgggaggtggtgctgaaggagatccgcaccctggtggacatggccctgaccagccccctgcaggatgacagcatcaaccaggcccccctggagatcgtgtccaagctgctgtctgagaacaccaacctgaccacccaggagcacgagaacatcatcgtggccatcgcccccctgctggagaacaaccaccccccaccagacctgtgtgagttcttctgcaagcactgccgggagcggcccaggtccatggtggtgattgaggtgttcacccctgtggtgcagaggatcctgaagcacaacatggactttggaaaatgtccccggctgcggctcttcacccaggagtacatcctggccctgaatgagctgaatgccggcatggaggtggtgaagaagttcatccagagcatgcacggccccaccggccactgcccccacccccgggtgctgcccaacctggtggccgtgtgcctggccgccatctacagctgctatgaggagttcatcaacagccgggacaacagccccagcctgaaggagatcagaaatggctgccagcagccctgtgacaggaagcccaccctgcccctgcggctgctgcaccccagcccagacctggtgtcccaggaggccaccctgtctgaggcccggctgaagtctgtggtggtggccagcagcgagatccacgtggaggtggagaggaccagcacagccaagccagccctgacagccagcgctggaaatgacagcgagcccaacctgattgactgcctgatggtgtccccagcctgcagcaccatgagcattgagctgggcccccaggccgacaggaccctgggctgctacgtggagatcctgaagctgctgagtgactatgatgactggaggcccagcctggccagcctgctgcagcccatccccttccccaaggaggccctggcccacgagaagttcaccaaggagctgaagtatgtgatccagagatttgctgaggacccccggcaggaggtgcacagctgcctgctgtctgtgcgggccggcaaggatggctggttccagctgtacagccctggaggagtggcctgtgatgatgatggagagctgtttgcctccatggtgcacatcctgatgggcagctgctacaagaccaagaagttcctgctgagcctggccgagaacaagctgggcccctgcatgctgctggccctgcggggcaaccagaccatggtggagatcctgtgcctgatgctggagtacaacatcatcgacaacaatgacacccagctgcagatcatcagcaccctggagagcacagatgtgggcaagaggatgtatgagcagctgtgtgaccggcagcgggagctgaaggagctgcagaggaaaggaggccccacccggctgaccctgcccagcaagagcacagatgctgacctggcccggctgctgagcagcggcagctttggaaacctggagaacctgagcctggccttcaccaacgtgaccagcgcctgtgccgagcacctgatcaagctgcccagcctgaagcagctgaacctgtggagcacccagtttggagatgctggcctgcggctgctgtctgagcacctgaccatgctgcaggtgctgaacctgtgtgagacccctgtgacagatgctggcctgctggccctgagctccatgaagagcctgtgcagcctgaacatgaacagcaccaagctgtctgctgacacctatgaggacctgaaggccaagctgcccaacctgaaggaggtggatgtgcgctacacagaggcctggtag

SEQ ID NO: 147888 - DNA, 2040 bp, synthetic construct
  misc_feature 1..2040: note = Description of Artificial Sequence: Synthetic coding sequence
  source 1..2040: mol_type = other DNA
atgggccaggccgctgagcccaccggctacatggagaacagcgtgtcctacagcgccattgaagatgtgcagctgctgtcctgggagaatgcccccaagtactgcctgcagctgaccatccctgggggcaccgtgctgctgcaggccgccaacagctacctgcgggaccagtggttccacagcctgcagtggaagaagaagatctacaagtacaagaaggtgctgagcaaccccagccgctgggaggtggtgctgaaggagatccgcaccctggtggacatggccctgaccagccccctgcaggatgacagcatcaaccaggcccccctggagatcgtgtccaagctgctgtctgagaacaccaacctgaccacccaggagcacgagaacatcatcgtggccatcgcccccctgctggagaacaaccaccccccaccagacctgtgtgagttcttctgcaagcactgccgggagcggcccaggtccatggtggtgattgaggtgttcacccctgtggtgcagaggatcctgaagcacaacatggactttggaaaatgtccccggctgcggctcttcacccaggagtacatcctggccctgaatgagctgaatgccggcatggaggtggtgaagaagttcatccagagcatgcacggccccaccggccactgcccccacccccgggtgctgcccaacctggtggccgtgtgcctggccgccatctacagctgctatgaggagttcatcaacagccgggacaacagccccagcctgaaggagatcagaaatggctgccagcagccctgtgacaggaagcccaccctgcccctgcggctgctgcaccccagcccagacctggtgtcccaggaggccaccctgtctgaggcccggctgaagtctgtggtggtggccagcagcgagatccacgtggaggtggagaggaccagcacagccaagccagccctgacagccagcgctggaaatgacagcgagcccaacctgattgactgcctgatggtgtccccagcctgcagcaccatgagcattgagctgggcccccaggccgacaggaccctgggctgctacgtggagatcctgaagctgctgagtgactatgatgactggaggcccagcctggccagcctgctgcagcccatccccttccccaaggaggccctggcccacgagaagttcaccaaggagctgaagtatgtgatccagagatttgctgaggacccccggcaggaggtgcacagctgcctgctgtctgtgcgggccggcaaggatggctggttccagctgtacagccctggaggagtggcctgtgatgatgatggagagctgtttgcctccatggtgcacatcctgatgggcagctgctacaagaccaagaagttcctgctgagcctggccgagaacaagctgggcccctgcatgctgctggccctgcggggcaaccagaccatggtggagatcctgtgcctgatgctggagtacaacatcatcgacaacaatgacacccagctgcagatcatcagcaccctggagagcacagatgtgggcaagaggatgtatgagcagctgtgtgaccggcagcgggagctgaaggagctgcagaggaaaggaggccccacccggctgaccctgcccagcaagagcacagatgctgacctggcccggctgctgagcagcggcagctttggaaacctggagaacctgagcctggccttcaccaacgtgaccagcgcctgtgccgagcacctgatcaagctgcccagcctgaagcagctgaacctgtggagcacccagtttggagatgctggcctgcggctgctgtctgagcacctgaccatgctgcaggtgctgaacctgtgtgagacccctgtgacagatgctggcctgctggccctgagctccatgaagagcctgtgcagcctgaacatgaacagcaccaagctgtctgctgacacctatgaggacctgaaggccaagctgcccaacctgaaggaggtggatgtgcgctacacagaggcctggtag

SEQ ID NO: 147889 - DNA, 1761 bp, synthetic construct
  misc_feature 1..1761: note = Description of Artificial Sequence: Synthetic coding sequence
  source 1..1761: mol_type = other DNA
atggccctgaccagccccctgcaggatgacagcatcaaccaggcccccctggagatcgtgtccaagctgctgtctgagaacaccaacctgaccacccaggagcacgagaacatcatcgtggccatcgcccccctgctggagaacaaccaccccccaccagacctgtgtgagttcttctgcaagcactgccgggagcggcccaggtccatggtggtgattgaggtgttcacccctgtggtgcagaggatcctgaagcacaacatggactttgggaagtgcccccggctgcggctcttcacccaggagtacatcctggccctgaatgagctgaatgccggcatggaggtggtgaagaagttcatccagagcatgcacggccccaccggccactgcccccacccccgggtgctgcccaacctggtggccgtgtgcctggccgccatctacagctgctatgaggagttcatcaacagccgggacaacagccccagcctgaaggagatcagaaatggctgccagcagccctgtgacaggaagcccaccctgcccctgcggctgctgcaccccagcccagacctggtgtcccaggaggccaccctgtctgaggcccggctgaagtctgtggtggtggccagcagcgagatccacgtggaggtggagaggaccagcacagccaagccagccctgacagccagcgctggaaatgattctgagcccaacctgattgactgcctgatggtgtccccagcctgcagcaccatgagcattgagctgggcccccaggccgacaggaccctgggctgctacgtggagatcctgaagctgctgagtgactatgatgactggaggcccagcctggccagcctgctgcagcccatccccttccccaaggaggccctggcccacgagaagttcaccaaggagctgaagtatgtgatccagagatttgctgaggacccccggcaggaggtgcacagctgcctgctgtctgtgcgggccggcaaggatggctggttccagctgtacagccctgggggcgtggcctgtgatgatgatggagagctgtttgcctccatggtgcacatcctgatgggcagctgctacaagaccaagaagttcctgctgagcctggccgagaacaagctgggcccctgcatgctgctggccctgcggggcaaccagaccatggtggagatcctgtgcctgatgctggagtacaacatcatcgacaacaatgacacccagctgcagatcatcagcaccctggagagcacagatgtgggcaagaggatgtatgagcagctgtgtgaccggcagcgggagctgaaggagctgcagaggaagggcggccccacccggctgaccctgcccagcaagagcacagatgctgacctggcccggctgctgagcagcggcagctttggaaacctggagaacctgagcctggccttcaccaacgtgaccagcgcctgtgccgagcacctgatcaagctgcccagcctgaagcagctgaacctgtggagcacccagtttggagatgctggcctgcggctgctgtctgagcacctgaccatgctgcaggtgctgaacctgtgtgagacccctgtgacagatgctggcctgctggccctgagctccatgaagagcctgtgcagcctgaacatgaacagcaccaagctgtctgctgacacctatgaggacctgaaggccaagctgcccaacctgaaggaggtggatgtgcgctacacagaggcctggtag

SEQ ID NO: 147890 - DNA, 312 bp, synthetic construct
  misc_feature 1..312: note = Description of Artificial Sequence: Synthetic coding sequence
  source 1..312: mol_type = other DNA
atggcccactacaaggctgctgacagcaagcgggagcagttccgccgctacctggagaagtctggagtgctggacaccctgaccaaggtgctggtggccctgtatgaggagcctgagaagcccaacagcgccctggacttcctgaagcaccacctgggcgccgccaccccagagaaccctgagattgagctgctgcggctggagctggccgagatgaaggagaagtatgaggccatcgtggaggagaacaagaagctgaaggccaagctggcccagtatgagcccccccaggaggagaagagagctgagtag

SEQ ID NO: 147891 - DNA, 1695 bp, synthetic construct
  misc_feature 1..1695: note = Description of Artificial Sequence: Synthetic coding sequence
  source 1..1695: mol_type = other DNA
atggctgtgttccgcagcggcctgctggtgctgaccacccccctggccagcctggccccccggctggccagcatcctgaccagcgctgcccggctggtgaaccacaccctgtatgtgcacctgcagcccggcatgagcctggagggccctgcccagccccagagcagccctgtgcaggccacctttgaggtgctggacttcatcacccacctgtatgctggagcagatgtgcaccgccacctggatgtgcgcatcctgctgaccaacatccgcaccaagagcaccttcctgccccccctgcccacctctgtgcagaacctggcccaccccccagaggtggtgctgacagacttccagaccctggatggcagccagtacaaccctgtgaagcagcagctggtgcgctatgccaccagctgctacagctgctgcccccggctggcctctgtgctgctgtacagcgactatggcatcggggaggtgcctgtggagcccctggatgtgcccctgcccagcaccatccggcctgccagccctgtggccggcagccccaagcagcctgtgcggggctactacagaggagctgtgggcggcacctttgaccggctgcacaatgcccacaaggtgctgctgtctgtggcctgcatcctggcccaggagcagctggtggtgggcgtggccgacaaggacctgctgaagagcaagctgctgcctgagctgctgcagccctacacagagcgggtggagcacctgtctgagttcctggtggacatcaagcccagcctgacctttgatgtgatccccctgctggacccctacggccctgctggcagtgaccccagcctggagttcctggtggtgtctgaggagacctaccggggcggcatggccatcaaccgcttccggctggagaatgacctggaggagctggccctgtaccagatccagctgctgaaggacctgcggcacacagaaaatgaggaggacaaggtgagcagcagcagcttccggcagaggatgctgggcaacctgctgcggcccccctatgaaagacctgagctgcccacctgcctgtatgtgattggcctgaccggcatcagcggcagcggcaagagcagcatcgcccagaggctgaagggcctgggcgccttcgtcatcgacagcgaccacctgggccaccgggcctatgcccctgggggccctgcctaccagcctgtggtggaggccttcggcacagacatcctgcacaaggatggcatcatcaacaggaaggtgctgggcagccgggtgtttggaaacaagaagcagctgaagatcctgacagacatcatgtggcccatcatcgccaagctggcccgggaggagatggacagagctgtggccgagggcaagagggtgtgtgtgattgatgctgctgtgctgctggaggccggctggcagaacctggtgcatgaggtgtggacagctgtgattcctgagacagaggccgtgcggcgcatcgtggagagagatggcctgtctgaggccgccgcccagagccggctgcagagccagatgagcggccagcagctggtggagcagagccacgtggtgctgagcaccctgtgggagccccacatcacccagaggcaggtggagaaggcctgggccctgctgcagaagaggatccccaagacccaccaggccctggactag

SEQ ID NO: 147892 - DNA, 1695 bp, synthetic construct; identical to SEQ ID NO: 147891
  misc_feature 1..1695: note = Description of Artificial Sequence: Synthetic coding sequence
  source 1..1695: mol_type = other DNA

SEQ ID NO: 147893 - DNA, 1782 bp, synthetic construct
  misc_feature 1..1782: note = Description of Artificial Sequence: Synthetic coding sequence
  source 1..1782: mol_type = other DNA
atgaggaccccccggctgcgggcccagcccagaggagctgtgtaccaggcccccagccccccaccagcccctgtgggcctgggctccatggctgtgttccgcagcggcctgctggtgctgaccacccccctggccagcctggccccccggctggccagcatcctgaccagcgctgcccggctggtgaaccacaccctgtatgtgcacctgcagcccggcatgagcctggagggccctgcccagccccagagcagccctgtgcaggccacctttgaggtgctggacttcatcacccacctgtatgctggagcagatgtgcaccgccacctggatgtgcgcatcctgctgaccaacatccgcaccaagagcaccttcctgccccccctgcccacctctgtgcagaacctggcccaccccccagaggtggtgctgacagacttccagaccctggatggcagccagtacaaccctgtgaagcagcagctggtgcgctatgccaccagctgctacagctgctgcccccggctggcctctgtgctgctgtacagcgactatggaattggagaggtgcctgtggagcccctggatgtgcccctgcccagcaccatccggcctgccagccctgtggccggcagccccaagcagcctgtgcggggctactacagaggagctgtgggcggcacctttgaccggctgcacaatgcccacaaggtgctgctgtctgtggcctgcatcctggcccaggagcagctggtggtgggcgtggccgacaaggacctgctgaagagcaagctgctgcctgagctgctgcagccctacacagagcgggtggagcacctgtctgagttcctggtggacatcaagcccagcctgacctttgatgtgatccccctgctggacccctacggccctgctggcagtgaccccagcctggagttcctggtggtgtctgaggagacctacagaggaggcatggccatcaaccgcttccggctggagaatgacctggaggagctggccctgtaccagatccagctgctgaaggacctgcggcacacagaaaatgaggaggacaaggtgagcagcagcagcttccggcagaggatgctgggcaacctgctgcggcccccctatgaaagacctgagctgcccacctgcctgtatgtgattggcctgaccggcatcagcggcagcggcaagagcagcatcgcccagaggctgaagggcctgggcgcctttgtgattgacagcgaccacctgggccaccgggcctatgcccctgggggccctgcctaccagcctgtggtggaggcctttggaacagacatcctgcacaaggatggcatcatcaacaggaaggtgctgggcagccgggtgtttggaaacaagaagcagctgaagatcctgacagacatcatgtggcccatcatcgccaagctggcccgggaggagatggacagagctgtggccgagggcaagagggtgtgtgtgattgatgctgctgtgctgctggaggccggctggcagaacctggtgcatgaggtgtggacagctgtgattcctgagacagaagctgtgagaagaattgtggagagagatggcctgtctgaggccgccgcccagagccggctgcagagccagatgagcggccagcagctggtggagcagagccacgtggtgctgagcaccctgtgggagccccacatcacccagaggcaggtggagaaggcctgggccctgctgcagaagaggatccccaagacccaccaggccctggactag

SEQ ID NO: 147894 - DNA, 528 bp, synthetic construct
  misc_feature 1..528: note = Description of Artificial Sequence: Synthetic coding sequence
  source 1..528: mol_type = other DNA
atggctgtgttccgcagcggcctgctggtgctgaccacccccctggccagcctggccccccggctggccagcatcctgaccagcgctgcccggctggtgaaccacaccctgtatgtgcacctgcagcccggcatgagcctggagggccctgcccagccccagagcagccctgtgcaggccacctttgaggtgctggacttcatcacccacctgagccccagccctgcccacctgagccctgagagccggcccccagcccggagccgggtggaccgcttcccagaccccggctggaagcctgtgcagcccggccagacagctgccagcgccctgcggcaccagctgctgcagctgctgagcgccaccggcctgggcgccgccatcctgcggctgtgggaccggcgcagcgcccggggggcccctggctgccccctgaccctgcatgaccaggccagcttcccccggggccgggtgtccaaggccgccggggcctggctgctgccctggcgctgccgctggcacgtgtag

SEQ ID NO: 147895 - DNA, 810 bp, synthetic construct
  misc_feature 1..810: note = Description of Artificial Sequence: Synthetic coding sequence
  source 1..810: mol_type = other DNA
atggccatcaaccgcttccggctggagaatgacctggaggagctggccctgtaccagatccagctgctgaaggacctgcggcacacagaaaatgaggaggacaaggtgagcagcagcagcttccggcagaggatgctgggcaacctgctgcggcccccctatgaaagacctgagctgcccacctgcctgtatgtgattggcctgaccggcatcagcggcagcggcaagagcagcatcgcccagaggctgaagggcctgggcgcctttgtgattgacagcgaccacctgggccaccgggcctatgcccctgggggccctgcctaccagcctgtggtggaggcctttggaacagacatcctgcacaaggatggcatcatcaacaggaaggtgctgggcagccgggtgtttggaaacaagaagcagctgaagatcctgacagacatcatgtggcccatcatcgccaagctggcccgggaggagatggacagagctgtggccgagggcaagagggtgtgtgtgattgatgctgctgtgctgctggaggccggctggcagaacctggtgcatgaggtgtggacagctgtgattcctgagacagaagctgtgagaagaattgtggagagagatggcctgtctgaggccgccgcccagagccggctgcagagccagatgagcggccagcagctggtggagcagagccacgtggtgctgagcaccctgtgggagccccacatcacccagaggcaggtggagaaggcctgggccctgctgcagaagaggatccccaagacccaccaggccctggactag

SEQ ID NO: 147896 - DNA, 1782 bp, synthetic construct; identical to SEQ ID NO: 147893
  misc_feature 1..1782: note = Description of Artificial Sequence: Synthetic coding sequence
  source 1..1782: mol_type = other DNA

SEQ ID NO: 147897 - DNA, 429 bp, synthetic construct
  misc_feature 1..429: note = Description of Artificial Sequence: Synthetic coding sequence
  source 1..429: mol_type = other DNA
atggccaccaagattgacaaggaggcctgccgggccgcctacaacctggtgagagatgatggcagcgctgtgatctgggtgaccttcaagtatgatggcagcaccatcgtgcctggagagcagggcgctgagtaccagcacttcatccagcagtgcacagatgatgtgcggctgtttgcctttgtgcgcttcaccactggagatgccatgagcaagaggagcaagtttgccctgatcacctggattggagaaaatgtgtctggcctgcagagggccaagacaggaacagacaagaccctggtgaaggaggtggtgcagaactttgccaaggagtttgtgatcagtgacaggaaggagctggaggaggacttcatcaagtctgagctgaagaaggccggcggggccaactatgatgcccagacagaatag

SEQ ID NO: 147898 - DNA, 1731 bp, synthetic construct
  misc_feature 1..1731: note = Description of Artificial Sequence: Synthetic coding sequence
  source 1..1731: mol_type = other DNA
atgaggggccccaacagcggcacagagaagggccgcctggtgattcctgagaagcagggctttgacttcctgtgcatgcctgtgttccacccccgcttcaagcgggagttcatccaggagcccgccaagaaccggcccggcccccagaccaggagtgacctgctgctgagcggccgggccttcctgctgcccctgaaccaggaggacaacaccaacctggcccgggtgctgaccaaccacatccacacaggccaccacagctccatgttctggatgagggtgcccctggtggcccctgaggacctgagagatgacatcattgaaaatgcccccaccacccacacagaggagtacagcggggaggagaagacctggatgtggtggcacaacttccgcaccctgtgtgactacagcaagagaattgctgtggccctggagattggagctgacctgcccagcaaccacgtgattgaccgctggctgggggagcccatcaaggccgccatcctgcccaccagcatcttcctgaccaacaagaagggcttccctgtgctgagcaagatgcaccagaggctcatcttccggctgctgaagctggaggtgcagttcatcatcaccggcaccaaccaccacagcgagaaggagttctgcagctacctgcagtacctggagtacctgagccagaacagacctcctccaaatgcctatgagctgtttgccaagggctatgaggactacctgcagagccccctgcagcccctgatggacaacctggagagccagacctatgaggtgtttgagaaggaccccatcaagtacagccagtaccagcaggccatctacaagtgcctgctggacagagtgcctgaggaggagaaggacaccaacgtgcaggtgctgatggtgctgggcgccggccggggccccctggtgaatgccagcctgcgggccgccaagcaggccgaccggcgcatcaagctgtatgctgtggagaagaaccccaatgctgtggtgaccctggagaactggcagtttgaggagtggggcagccaggtgacagtggtgtccagtgacatgagggagtgggtggcccctgagaaggctgacatcatcgtgtctgagctgctgggcagctttgctgacaatgagctgagcccagaatgtctggatggagcccagcacttcctgaaggatgatggagtgtccatccctggagagtacaccagcttcctggcccccatcagcagcagcaagctgtacaatgaggtgcgggcctgccgggagaaggaccgggaccctgaggcccagtttgagatgccctacgtggtgcggctgcacaacttccaccagctgagcgccccccagccctgcttcaccttcagccaccccaacagagaccccatgattgacaacaaccgctactgcaccctggagttccctgtggaggtgaacacagtgctgcacggctttgctggctactttgagaccgtgctgtaccaggacatcaccctgagcatccggcctgagacccacagccctggcatgttctcctggttccccatcctcttccccatcaagcagcccatcaccgtgcgggagggccagaccatctgtgtgcgcttctggcgctgcagcaacagcaagaaggtgtggtatgagtgggccgtgacagcccctgtgtgcagcgccatccacaaccccaccggccgcagctacaccatcggcctgtag

SEQ ID NO: 147899 - DNA, 1206 bp, synthetic construct
  misc_feature 1..1206: note = Description of Artificial Sequence: Synthetic coding sequence
  source 1..1206: mol_type = other DNA
atgctgggcatcggcacagagggcccccacgtgggcctggtgcaggccagcgagcaccccaagattgagttctacctgaagaacttcaccagcgccaaggatgtgctgtttgccatcaaggaggtgggcttccggggcggcaacagcaacacagacatcaccctggagaagtacctgtttgtgatgctgaagagaagtgagaaccagcagacctacctgatgaatgctgatgtggccgagaggatgagcagcaccaccgtggacagcgaggagcggctgctgcggggcaaggccctgaagcacacagcccagaagttcttcaccgtggatgctggggtgaggaagggcatccccaaggtggtggtggtgttcattgatggctggcccagtgatgacatcgaggaggccggcatcgtggcccgggagtttggagtgaatgtgttcatcgtgtctgtggccaagcccatccctgaggagctgggcatggtgcaggatgtgacctttgtggacaaggctgtgtgcagaaataatggcttcttctcctaccacatgcccaactggtttggcaccaccaagtatgtgaagcccctggtgcagaagctgtgcacccatgagcagatgatgtgcagcaagacctgctacaacagcgtgaacatcgccttcctgattgatggcagcagctctgtgggggacagcaacttccggctgatgctggagtttgtgagcaacatcgccaagacctttgagatcagtgacattggagccaagattgctgctgtgcagttcacctatgaccagaggacagagttctccttcacagactacagcaccaaggaaaatgtgctggccgtcatccggaacatccgctacatgtctgggggcacagccactggagatgccatctccttcaccgtgagaaatgtgtttggccccatccgggagagccccaacaagaacttcctggtgattgtgacagatggccagagctatgatgatgtgcagggccctgctgctgctgcccatgatgctggcatcaccatcttctctgtgggcgtggcctgggcccccctggatgacctgaaggacatggccagcaagcccaaggagagccacgccttcttcacccgggagttcaccggcctggagcccatcgtgtctgatgtgatccggggcatctgccgggacttcctggagagccagcagtag

SEQ ID NO: 147900 - DNA, 1653 bp, synthetic construct; identical to SEQ ID NO: 142756
  misc_feature 1..1653: note = Description of Artificial Sequence: Synthetic coding sequence
  source 1..1653: mol_type = other DNA

SEQ ID NO: 147901 - DNA, 732 bp, synthetic construct
  misc_feature 1..732: note = Description of Artificial Sequence: Synthetic coding sequence
  source 1..732: mol_type = other DNA
atgctgagccgctggagcgccagcttcaccgtgaccaagggcaagagcagcacccaggaggccaccggccaggccgtgtccacagcccaccccccaacaggcaagaggctgaagaagaccccagagaagaagacaggcaacaaggactgcaaggctgacatcgccttcctgattgatggcagcttcaacatcggccagaggcgcttcaacctgcagaagaactttgtgggcaaggtggccctgatgctgggcattggaacagagggcccccacgtgggcctggtgcaggccagcgagcaccccaagattgagttctacctgaagaacttcaccagcgccaaggatgtgctgtttgccatcaaggaggtgggcttccggggcggcaacagcaacacaggcaaggccctgaagcacacagcccagaagttcttcaccgtggatgctggggtgaggaagggcatccccaaggtggtggtggtgttcattgatggctggcccagtgatgacatcgaggaggccggcatcgtggcccgggagtttggagtgaatgtgttcatcgtgtctgtggccaagcccatccctgaggagctgggcatggtgcaggatgtgacctttgtggacaaggctgtgtgcaggaacaacggcttcttctcctaccacatgcccaactggtttggcaccaccaagtatgtgtccctgtggtaccgcagctgtgccctgatgaacaagtag

SEQ ID NO: 147902 - DNA, 1278 bp, synthetic construct
  misc_feature 1..1278: note = Description of Artificial Sequence: Synthetic coding sequence
  source 1..1278: mol_type = other DNA
atgggcccccggcggctgctgctggtggccgcctgcttcagcctgtgtggccccctgctgagcgcccggacccgggcccggcggcctgagagcaaggccaccaatgccaccctggaccccaggagcttcctgctgaggaaccccaatgacaagtatgagcccttctgggaggatgaggagaagaatgaaagtggcctgacagagtaccgcctggtgtccatcaacaagagcagccccctgcagaagcagctgcctgccttcatcagtgaagatgccagcggctacctgaccagctcctggctgaccctgtttgtgcccagcgtgtacacaggagtgtttgtggtgtccctgcccctgaacatcatggccatcgtggtgttcatcctgaagatgaaggtgaagaagccagctgtggtgtacatgctgcacctggccacagcagatgtgctgtttgtgtctgtgctgcccttcaagatctcctactacttcagcggcagtgactggcagtttggcagcgagctgtgccgctttgtgacagctgccttctactgcaacatgtatgccagcatcctgctgatgaccgtcatcagcattgaccgcttcctggccgtggtgtaccccatgcagagcctgtcctggaggaccctgggccgggccagcttcacctgcctggccatctgggccctggccatcgccggcgtggtgcccctgctgctgaaggagcagaccatccaggtgcccggcctgaacatcaccacctgccatgatgtgctgaatgagaccctgctggagggctactatgcctactacttcagcgccttctctgctgtgttcttctttgtgcccctcatcatcagcacagtgtgctacgtgtccatcatccgctgcctgagcagcagcgctgtggccaacagaagcaagaagagccgggccctcttcctgtctgctgctgtgttctgcatcttcatcatctgcttcggccccaccaacgtgctgctgattgcccactacagcttcctgagccacaccagcaccacagaggccgcctactttgcctacctgctgtgtgtgtgtgtgagcagcatcagctgctgcatcgaccccctcatctactactatgccagcagcgagtgccagagatatgtgtacagcatcctgtgctgcaaggagagcagtgaccccagcagctacaacagcagcggccagctgatggccagcaagatggacacctgcagcagcaacctgaacaacagcatctacaagaagctgctgacctag

SEQ ID NO: 147903 - DNA, 1194 bp, synthetic construct
  misc_feature 1..1194: note = Description of Artificial Sequence: Synthetic coding sequence
  source 1..1194: mol_type = other DNA
atgaggagccccagcgctgcctggctgctgggcgccgccatcctgctggccgccagcctgagctgcagcggcaccatccagggcaccagccgcagcagcaagggccgcagcctgattggcaaggtggatggcaccagccacgtgactggaaaaggagtgacagtggagaccgtcttctctgtggatgagttcagcgcctctgtgctgaccgggaagctgaccaccgtcttcctgcccatcgtgtacaccatcgtgtttgtggtgggcctgcccagcaatggcatggccctgtgggtgttcctgttccgcaccaagaagaagcaccctgctgtgatctacatggccaacctggccctggccgacctgctgagcgtcatctggttccccctgaagatcgcctaccacatccacggcaacaactggatctatggagaggccctgtgcaatgtgctgattggcttcttctacggcaacatgtactgcagcatcctcttcatgacctgcctgtctgtgcagcgctactgggtgattgtgaaccccatgggccacagcaggaagaaggccaacatcgccatcggcatcagcctggccatctggctgctgatcctgctggtgaccatccccctgtatgtggtgaagcagaccatcttcatcccagccctgaacatcaccacctgccatgatgtgctgcctgagcagctgctggtgggggacatgttcaactacttcctgagcctggccatcggggtcttcctgtttcctgccttcctgacagccagcgcctacgtgctgatgatccgcatgctgcggagcagcgccatggatgagaacagcgagaagaagaggaagagggccatcaagctgattgtgacagtgctggccatgtacctgatctgcttcacccccagcaacctgctgctggtggtgcactacttcctgatcaagagccagggccagagccacgtgtatgccctgtacatcgtggccctgtgcctgagcaccctgaacagctgcatcgacccctttgtgtactactttgtgtcccatgacttccgggaccacgccaagaatgccctgctgtgccgctctgtgaggacagtgaagcagatgcaggtgtccctgaccagcaagaagcacagcaggaagagcagcagctacagcagcagcagcaccaccgtgaagaccagctactag

SEQ ID NO: 147904 - DNA, 1125 bp, synthetic construct
  misc_feature 1..1125: note = Description of Artificial Sequence: Synthetic coding sequence
  source 1..1125: mol_type = other DNA
atgaaggccctgatctttgctgctgctggcctgctgctgctgctgcccaccttctgccagagcggcatggagaatgacaccaacaacctggccaagcccaccctgcccatcaagaccttccggggggccccacccaacagctttgaggagttccccttcagcgccctggagggctggacaggagccaccatcaccgtgaagatcaagtgcccagaggagagcgccagccacctgcacgtgaagaatgccaccatgggctacctgaccagcagcctgagcaccaagctgatcccagccatctacctgctggtgtttgtggtgggcgtgcctgccaatgctgtgaccctgtggatgctgttcttccgcaccaggagcatctgcaccaccgtcttctacaccaacctggccatcgctgacttcctgttctgtgtgaccctgcccttcaagatcgcctaccacctgaatggaaacaactgggtgtttggagaggtgctgtgccgggccaccaccgtcatcttctacggcaacatgtactgcagcatcctgctgctggcctgcatcagcatcaaccgctacctggccatcgtgcaccccttcacctaccggggcctgcccaagcacacctacgccctggtgacctgtggcctggtgtgggccaccgtcttcctgtacatgctgcccttcttcatcctgaagcaggagtactacctggtgcagcctgacatcaccacctgccatgatgtgcacaacacctgtgagagcagcagccccttccagctgtactacttcatcagcctggccttcttcggcttcctgatcccctttgtgctgatcatctactgctatgctgccatcatccgcaccctgaatgcctatgaccaccgctggctgtggtacgtgaaggccagcctgctgatcctggtgatcttcaccatctgctttgcccccagcaacatcatcctgatcatccaccacgccaactactactacaacaacacagatggcctgtacttcatctacctgattgccctgtgcctgggcagcctgaacagctgcctggaccccttcctgtacttcctgatgagcaagaccaggaaccacagcacagcctacctgaccaagtag

SEQ ID NO: 147905 - DNA, 1059 bp, synthetic construct
  misc_feature 1..1059: note = Description of Artificial Sequence: Synthetic coding sequence
  source 1..1059: mol_type = other DNA
atggagaatgacaccaacaacctggccaagcccaccctgcccatcaagaccttccggggggccccacccaacagctttgaggagttccccttcagcgccctggagggctggacaggagccaccatcaccgtgaagatcaagtgcccagaggagagcgccagccacctgcacgtgaagaatgccaccatgggctacctgaccagcagcctgagcaccaagctgatcccagccatctacctgctggtgtttgtggtgggcgtgcctgccaatgctgtgaccctgtggatgctgttcttccgcaccaggagcatctgcaccaccgtcttctacaccaacctggccatcgctgacttcctgttctgtgtgaccctgcccttcaagatcgcctaccacctgaatggaaacaactgggtgtttggagaggtgctgtgccgggccaccaccgtcatcttctacggcaacatgtactgcagcatcctgctgctggcctgcatcagcatcaaccgctacctggccatcgtgcaccccttcacctaccggggcctgcccaagcacacctacgccctggtgacctgtggcctggtgtgggccaccgtcttcctgtacatgctgcccttcttcatcctgaagcaggagtactacctggtgcagcctgacatcaccacctgccatgatgtgcacaacacctgtgagagcagcagccccttccagctgtactacttcatcagcctggccttcttcggcttcctgatcccctttgtgctgatcatctactgctatgctgccatcatccgcaccctgaatgcctatgaccaccgctggctgtggtacgtgaaggccagcctgctgatcctggtgatcttcaccatctgctttgcccccagcaacatcatcctgatcatccaccacgccaactactactacaacaacacagatggcctgtacttcatctacctgattgccctgtgcctgggcagcctgaacagctgcctggaccccttcctgtacttcctgatgagcaagaccaggaaccacagcacagcctacctgaccaagtag

SEQ ID NO: 147906 - DNA, 1158 bp, synthetic construct
  misc_feature 1..1158: note = Description of Artificial Sequence: Synthetic coding sequence
  source 1..1158: mol_type = other DNA
atgtggggccgcctgctgctgtggcccctggtgctgggcttcagcctgagcggcggcacccagacccccagcgtgtatgatgaaagtggcagcactggaggaggagatgacagcacccccagcatcctgcctgccccccggggctacccaggccaggtgtgtgccaatgacagcgacaccctggagctgcctgacagcagccgggccctgctgctgggctgggtgcccacccggctggtgcctgccctgtatggcctggtgctggtggtgggcctgcctgccaacggcctggccctgtgggtgctggccacccaggccccccggctgcccagcaccatgctgctgatgaacctggccgctgctgacctgctgctggccctggccctgcccccaagaattgcctaccacctgcggggccagcgctggccctttggagaggccgcctgccgcctggccacagctgccctgtatggccacatgtatggctctgtgctgctgctggccgctgtgtccctggaccgctacctggccctggtgcaccccctgcgggcccgggccctgcggggccggcggctggccctgggcctgtgcatggccgcctggctgatggctgctgccctggccctgcccctgaccctgcagaggcagaccttccggctggcccggagtgacagagtgctgtgccatgatgccctgcccctggatgcccaggccagccactggcagcctgccttcacctgcctggccctgctgggctgcttcctgcccctgctggccatgctgctgtgctacggggccaccctgcacaccctggccgccagcggccgccgctatggccacgccctgcggctgacagctgtggtgctggccagcgctgtggccttctttgtgcccagcaacctgctgctgctgctgcactacagcgaccccagccccagcgcctggggcaacctgtatggagcctacgtgcccagcctggccctgagcaccctgaacagctgtgtggaccccttcatctactactacgtgtctgctgagttccgggacaaggtgcgggccggcctcttccagaggagccctggggacacagtggccagcaaggccagcgctgagggcggcagccggggcatgggcacccacagcagcctgctgcagtag

SEQ ID NO: 147907 - DNA, 1848 bp, synthetic construct
  misc_feature 1..1848: note = Description of Artificial Sequence: Synthetic coding sequence
  source 1..1848: mol_type = other DNA
atgagggccctgctgctgctgggcttcctgctggtgtccctggagagcaccctgagcatccccccctgggaggcccccaaggagcacaagtacaaggccgaggagcacacagtggtgctgactgtgactggagagccctgccacttccccttccagtaccaccggcagctgtaccacaagtgcacccacaagggccggcccggcccccagccctggtgtgccaccacccccaactttgaccaggaccagcgctggggctactgcctggagcccaagaaggtgaaggaccactgcagcaagcacagcccctgccagaagggcggcacctgtgtgaacatgcccagcggcccccactgcctgtgcccccagcacctgaccggcaaccactgccagaaggagaagtgctttgagccccagctgctgcgcttcttccacaagaatgagatctggtacagaacagagcaggccgctgtggcccgctgccagtgcaagggcccagatgcccactgccagaggctggccagccaggcctgcaggaccaacccctgcctgcatggaggccgctgcctggaggtggagggccaccggctgtgccactgccctgtgggctacacaggagccttctgtgatgtggacaccaaggccagctgctatgatggccggggcctgagctaccggggcctggcccggaccaccctgagcggggccccctgccagccctgggccagcgaggccacctacagaaatgtgacagctgagcaggccaggaactggggcctgggcggccacgccttctgcagaaatccagacaatgacatccggccctggtgctttgtgctgaacagagaccggctgtcctgggagtactgtgacctggcccagtgccagacccccacccaggccgccccacccacccctgtgagcccccggctgcacgtgcccctgatgcctgcccagcctgccccacccaagccccagcccaccaccaggaccccaccccagagccagacccctggggccctgcctgccaagcgggagcagccccccagcctgaccagaaatggccccctgagctgtggccagaggctgaggaagagcctgagctccatgaccagggtggtgggcggcctggtggccctgcggggggcccacccctacatcgccgccctgtactggggccacagcttctgtgccggcagcctcatcgccccctgctgggtgctgacagctgcccactgcctgcaggacaggcctgcccctgaggacctgactgtggtgctgggccaggagaggaggaaccacagctgtgagccctgccagaccctggccgtgcgcagctaccgcctgcacgaggccttcagccctgtgtcctaccagcacgacctggccctgctgcggctgcaggaggatgctgatggcagctgtgccctgctgagcccctacgtgcagcctgtgtgcctgcccagcggggccgcccggcccagcgagaccaccctgtgccaggtggccggctggggccaccagtttgaaggagctgaggagtatgccagcttcctgcaggaggcccaggtgcccttcctgagcctggagcgctgcagcgccccagatgtgcacggcagcagcatcctgcccggcatgctgtgtgccggcttcctggagggcggcacagatgcctgccagggcgacagcggcggccccctggtgtgtgaggaccaggccgctgagcggcggctgaccctgcagggcatcatctcctggggcagcggctgtggggacaggaacaagccaggagtgtacacagatgtggcctactacctggcctggatccgggagcacacagtgtcctag

SEQ ID NO: 147908 - DNA, 1986 bp, synthetic construct
  misc_feature 1..1986: note = Description of Artificial Sequence: Synthetic coding sequence
  source 1..1986: mol_type = other DNA
atgaggctgaagaacctgaccttcatcatcatcctgatcatctctggagagctgtatgcagaggagaagccctgtggcttcccccacgtggagaatggaagaattgcccagtactactacaccttcaagagcttctacttccccatgagcattgacaagaagctgtccttcttctgcctggccggctacaccacagaaagtggccggcaggaggagcagaccacctgcaccacagagggctggagccctgagccccgctgcttcaagaagtgcaccaagccagacctgagcaatggctacatcagtgatgtgaagctgctgtacaagatccaggagaacatgagatatggctgtgccagcggctacaagaccactggaggcaaggatgaggaggtggtgcagtgcctgagtgatggctggagcagccagcccacctgcaggaaggagcacgagacctgcctggcccctgagctgtacaacggcaactacagcaccacccagaagaccttcaaggtgaaggacaaggtgcagtatgaatgtgccaccggctactacacagctgggggcaagaagacagaggaggtggagtgcctgacctacggctggagcctgacccccaagtgcaccaagctgaagtgcagcagcctgcggctgattgaaaatggctacttccaccctgtgaagcagacctatgaggagggagatgtggtgcagttcttctgccacgagaactactacctgagcggcagtgacctgatccagtgctacaactttggctggtacccagagagccctgtgtgtgagggcagaagaaaccgctgccccccaccacccctgcccatcaacagcaagatccagacccacagcaccacctaccgccacggggagatcgtgcacattgaatgtgagctgaactttgagatccacggcagcgctgagatccgctgtgaagatggcaagtggacagagccccccaagtgcatcgagggccaggagaaggtggcctgtgaggagccccccttcattgaaaatggagctgccaacctgcacagcaagatctactacaacggggacaaggtgacctacgcctgcaagagcggctacctgctgcacggcagcaatgagatcacctgcaacagaggcaagtggaccctgcccccagaatgtgtggagaacaatgaaaactgcaagcacccccctgtggtgatgaatggagctgtggctgatggcatcctggccagctatgccaccggcagctctgtggagtaccgctgcaatgagtactacctgctgcggggcagcaagatcagccgctgtgagcagggcaagtggagcagcccccctgtgtgcctggagccctgcaccgtgaatgtggactacatgaacagaaacaacatcgagatgaagtggaagtatgagggcaaggtgctgcacggggacctgattgactttgtgtgcaagcagggctatgacctgagccccctgacccccctgtctgagctgtctgtgcagtgcaacagaggagaggtgaagtaccccctgtgcaccaggaaggagagcaagggcatgtgcaccagccccccactcatcaagcacggcgtcatcatcagcagcacagtggacacctatgaaaatggcagctctgtggagtaccgctgctttgaccaccacttcctggagggcagccgggaggcctactgcctggatggcatgtggaccaccccacccctgtgcctggagccctgcaccctgtccttcacagagatggagaagaacaacctgctgctgaagtgggactttgacaaccggccccacatcctgcacggggagtacatcgagttcatctgccgcggggacacctacccagctgagctgtacatcaccggcagcatcctgaggatgcagtgtgaccggggccagctgaagtacccccgctgcatcccccggcagagcaccctgagctaccaggagcccctgcggacctag

SEQ ID NO: 147909 - DNA, 3675 bp, synthetic construct
  misc_feature 1..3675: note = Description of Artificial Sequence: Synthetic coding sequence
  source 1..3675: mol_type = other DNA
atgctgaccaagtttgagaccaagagcgcccgggtgaagggcctgtccttccaccccaagaggccctggatcctgaccagcctgcacaacggggtcatccagctgtgggactacaggatgtgcaccctgattgacaagtttgatgaacatgatggccctgtgcggggcatcgacttccacaagcagcagcccctgtttgtgtctggaggagatgactacaagatcaaggtgtggaactacaagctgcggcgctgcctcttcaccctgctgggccacctggactacatccgcaccaccttcttccaccacgagtacccctggatcctgagcgccagtgatgaccagaccatccgggtgtggaactggcagagcaggacctgtgtgtgtgtgctgaccggccacaaccactacgtgatgtgtgcccagttccaccccacagaggacctggtggtgtctgccagcctggaccagacagtgcgggtgtgggacatcagcggcctgaggaagaagaacctgagccctggagctgtggagagtgatgtgcggggcatcactggagtggacctgtttggcaccacagatgctgtggtgaagcacgtgctggagggccatgacagaggagtgaactgggccgccttccaccccaccatgcccctcatcgtgtctggagcagatgaccggcaggtgaagatctggaggatgaatgaaagcaaggcctgggaggtggacacctgccggggccactacaacaacgtgtcctgtgctgtgttccacccccggcaggagctgatcctgagcaacagcgaggacaagagcatccgggtgtgggacatgagcaagaggactggagtgcagaccttccggcgggaccatgaccgcttctgggtgctggccgcccaccccaacctgaacctgtttgctgctggccatgatggcggcatgattgtgttcaagctggagcgggagaggcctgcctatgctgtgcacggcaacatgctgcactacgtgaaggaccgcttcctgcggcagctggacttcaacagcagcaaggatgtggccgtgatgcagctgcggagcggcagcaagtttcctgtgttcaacatgagctacaacccagcagaaaatgctgtgctgctgtgcacccgggccagcaacctggagaacagcacctatgacctgtacaccatccccaaggatgctgacagccagaacccagatgcccctgagggcaagaggagcagcggcctgacagctgtgtgggtggccaggaacagatttgctgtgctggacaggatgcacagcctgctgatcaagaacctgaagaatgagatcaccaagaaggtgcaggtgcccaactgtgatgagatcttctacgccggcactggaaacctgctgctgagagatgctgacagcatcaccctgtttgatgtgcagcagaagaggaccctggcctctgtgaagatcagcaaggtgaagtatgtgatctggagcgctgacatgagccacgtggccctgctggccaagcacgccatcgtcatctgcaacaggaagctggatgccctgtgcaacatccacgagaacatccgggtgaagagcggggcctgggatgagagcggggtcttcatctacaccaccagcaaccacatcaagtatgctgtgaccactggagaccacggcatcatccgcaccctggacctgcccatctacgtgaccagggtgaagggcaacaacgtgtactgcctggaccgggagtgccggccccgggtgctgaccatcgaccccacagagttcaagttcaagctggccctgatcaacagaaaatatgatgaggtgctgcacatggtgagaaatgccaagctggtgggccagagcatcatcgcctacctgcagaagaagggctacccagaggtggccctgcactttgtgaaggatgagaagacccgcttcagcctggccctggagtgtggcaacatcgagatcgccctggaggccgccaaggccctggatgacaagaactgctgggagaagctgggggaggtggccctgctgcagggcaaccaccagatcgtggagatgtgctaccagaggaccaagaactttgacaagctgtccttcctgtacctgatcaccggcaacctggagaagctgaggaagatgatgaagattgctgagatcaggaaggacatgagcggccactaccagaatgccctgtacctgggagatgtgtctgagcgggtgcgcatcctgaagaactgtggccagaagagcctggcctacctgacagctgccacccacggcctggatgaggaggccgagagcctgaaggagacctttgatcctgagaaggagaccatcccagacatcgaccccaatgccaagctgctgcagcccccagcccccatcatgcccctggacaccaactggcccctgctgactgtgtccaagggcttctttgagggcaccatcgccagcaaaggaaaaggaggagccctggccgctgacattgatattgacacagtgggcacagagggctggggagaagatgctgagctgcagctggatgaagatggctttgtggaggccacagagggcctgggagatgatgccctgggcaagggccaggaggagggcggcggctgggatgtggaggaggacctggagctgcccccagagctggacatcagccctggagctgctggaggagcagaagatggcttctttgtgccccccaccaagggcaccagccccacccagatctggtgcaacaacagccagctgcctgtggaccacatcctggccggcagctttgaaacagccatgaggctgctgcatgaccaggtgggcgtcatccagtttggcccctacaagcagctgttcctgcagacctacgcccggggccgcaccacctaccaggccctgccctgcctgcccagcatgtatggctaccccaacagaaactggaaggatgctggcctgaagaatggagtgcctgctgtgggcctgaagctgaatgacctgatccagaggctgcagctgtgctaccagctgaccaccgtgggcaagtttgaggaggccgtggagaagttccgcagcatcctgctgtctgtgcccctgctggtggtggacaacaagcaggagattgctgaggcccagcagctgatcaccatctgccgggagtacatcgtgggcctgtctgtggagacagagaggaagaagctgcccaaggagaccctggagcagcagaagaggatctgtgagatggccgcctacttcacccacagcaacctgcagcctgtgcacatgatcctggtgctgaggacagccctgaacctcttcttcaagctgaagaacttcaagacagctgccacctttgcccggcggctgctggagctgggccccaagccagaggtggcccagcagaccaggaagatcctgagcgcctgtgagaagaaccccacagatgcctaccagctgaactatgacatgcacaacccctttgacatctgtgccgccagctaccggcccatctaccggggcaagcctgtggagaagtgccccctgagcggggcctgctacagccctgagttcaagggccagatctgccgggtgaccaccgtgacagaaattggcaaggatgtgattggcctgcgcatcagccccctgcagttcagatag

SEQ ID NO: 147910 - DNA, 3702 bp, synthetic construct
  misc_feature 1..3702: note = Description of Artificial Sequence: Synthetic coding sequence
  source 1..3702: mol_type = other DNA
atgctgaccaagtttgagaccaagagcgcccgggtgaagggcctgtccttccaccccaagaggccctggatcctgaccagcctgcacaacggggtcatccagctgtgggactacaggatgtgcaccctgattgacaagtttgatgaacatgatggccctgtgcggggcatcgacttccacaagcagcagcccctgtttgtgtctggaggagatgactacaagatcaaggtgtggaactacaagctgcggcgctgcctcttcaccctgctgggccacctggactacatccgcaccaccttcttccaccacgagtacccctggatcctgagcgccagtgatgaccagaccatccgggtgtggaactggcagagcaggacctgtgtgtgtgtgctgaccggccacaaccactacgtgatgtgtgcccagttccaccccacagaggacctggtggtgtctgccagcctggaccagacagtgcgggtgtgggacatcagcggcctgaggaagaagaacctgagccctggagctgtggagagtgatgtgcggggcatcactggagtggacctgtttggcaccacagatgctgtggtgaagcacgtgctggagggccatgacagaggagtgaactgggccgccttccaccccaccatgcccctcatcgtgtctggagcagatgaccggcaggtgaagatctggaggatgaatgaaagcaaggcctgggaggtggacacctgccggggccactacaacaacgtgtcctgtgctgtgttccacccccggcaggagctgatcctgagcaacagcgaggacaagagcatccgggtgtgggacatgagcaagaggactggagtgcagaccttccggcgggaccatgaccgcttctgggtgctggccgcccaccccaacctgaacctgtttgctgctggccatgatggcggcatgattgtgttcaagctggagcgggagaggcctgcctatgctgtgcacggcaacatgctgcactacgtgaaggaccgcttcctgcggcagctggacttcaacagcagcaaggatgtggccgtgatgcagctgcggagcggcagcaagtttcctgtgttcaacatgagctacaacccagcagaaaatgctgtgctgctgtgcacccgggccagcaacctggagaacagcacctatgacctgtacaccatccccaaggatgctgacagccagaacccagatgcccctgagggcaagaggagcagcggcctgacagctgtgtgggtggccaggaacagatttgctgtgctggacaggatgcacagcctgctgatcaagaacctgaagaatgagatcaccaagaaggtgcaggtgcccaactgtgatgagatcttctacgccggcactggaaacctgctgctgagagatgctgacagcatcaccctgtttgatgtgcagcagaagaggaccctggcctctgtgaagatcagcaaggtgaagtatgtgatctggagcgctgacatgagccacgtggccctgctggccaagcatgagcacagctgccccctgcccctgacagccatcgtcatctgcaacaggaagctggatgccctgtgcaacatccacgagaacatccgggtgaagagcggggcctgggatgaaagtggagtcttcatctacaccaccagcaaccacatcaagtatgctgtgaccaccggggaccacggcatcatccgcaccctggacctgcccatctacgtgaccagggtgaagggcaacaacgtgtactgcctggacagagaatgtcggccccgggtgctgaccatcgaccccacagagttcaagttcaagctggccctgatcaacagaaaatatgatgaggtgctgcacatggtgagaaatgccaagctggtgggccagagcatcatcgcctacctgcagaagaagggctacccagaggtggccctgcactttgtgaaggatgagaagacccgcttcagcctggccctggagtgtggcaacattgaaattgccctggaggccgccaaggccctggatgacaagaactgctgggagaagctgggggaggtggccctgctgcagggcaaccaccagatcgtggagatgtgctaccagaggaccaagaactttgacaagctgtccttcctgtacctgatcactggaaacctggagaagctgaggaagatgatgaagattgctgagatcaggaaggacatgagcggccactaccagaatgccctgtacctgggagatgtgtctgagcgggtgcgcatcctgaagaactgtggccagaagagcctggcctacctgacagctgccacccacggcctggatgaggaggccgagagcctgaaggagacctttgatcctgagaaggagaccatcccagacatcgaccccaatgccaagctgctgcagcccccagcccccatcatgcccctggacaccaactggcccctgctgactgtgtccaagggcttctttgagggcaccatcgccagcaagggcaagggcggggccctggccgctgacatcgacatcgacacagtgggcacagagggctggggagaagatgctgagctgcagctggatgaagatggctttgtggaggccacagagggcctgggagatgatgccctgggcaagggccaggaggagggcggcggctgggatgtggaggaggacctggagctgcccccagagctggacatcagccctggagctgctgggggcgcagaagatggcttctttgtgccccccaccaagggcaccagccccacccagatctggtgcaacaacagccagctgcctgtggaccacatcctggccggcagctttgaaacagccatgaggctgctgcatgaccaggtgggcgtcatccagtttggcccctacaagcagctgttcctgcagacctacgcccggggccgcaccacctaccaggccctgccctgcctgcccagcatgtatggctaccccaacagaaactggaaggatgctggcctgaagaatggagtgcctgctgtgggcctgaagctgaatgacctgatccagaggctgcagctgtgctaccagctgaccaccgtgggcaagtttgaggaggccgtggagaagttccgcagcatcctgctgtctgtgcccctgctggtggtggacaacaagcaggagattgctgaggcccagcagctgatcaccatctgccgggagtacatcgtgggcctgtctgtggagacagagaggaagaagctgcccaaggagaccctggagcagcagaagaggatctgtgagatggccgcctacttcacccacagcaacctgcagcctgtgcacatgatcctggtgctgaggacagccctgaacctcttcttcaagctgaagaacttcaagacagctgccacctttgcccggcggctgctggagctgggccccaagccagaggtggcccagcagaccaggaagatcctgagcgcctgtgagaagaaccccacagatgcctaccagctgaactatgacatgcacaacccctttgacatctgtgccgccagctaccggcccatctaccggggcaagcctgtggagaagtgccccctgagcggggcctgctacagccctgagttcaagggccagatctgccgggtgaccaccgtgacagagatcggcaaggatgtgattggcctgcgcatcagccccctgcagttcagatag

SEQ ID NO: 147911 - DNA, 2862 bp, synthetic construct
  misc_feature 1..2862: note = Description of Artificial Sequence: Synthetic coding sequence
  source 1..2862: mol_type = other DNA
atgacagctgctgaaaatgtgtgctacaccctcatcaacgtgcccatggacagcgagccccccagcgagatcagcctgaagaatgacctggagaagggagatgtgaagagcaagacagaggccctgaagaaggtgatcatcatgatcctgaatggagagaagctgcccggcctgctgatgaccatcatccgctttgtgctgcccctgcaggaccacaccatcaagaagctgctgctggtgttctgggagatcgtgcccaagaccaccccagatggccgcctgctgcacgagatgatcctggtgtgtgatgcctacaggaaggacctgcagcaccccaatgagttcatccggggcagcaccctgcgcttcctgtgcaagctgaaggaggccgagctgctggagcccctgatgcctgccatccgggcctgcctggagcaccgccacagctatgtgagaagaaatgctgtgctggccatctacaccatctacagaaactttgagcacctgatcccagatgcccctgagctgattcatgacttcctggtgaatgagaaggatgccagctgcaagagaaatgccttcatgatgctgattcatgctgaccaggaccgggccctggactacctgagcacctgcatcgaccaggtgcagacctttggagacatcctgcagctggtgattgtggagctgatctacaaggtgtgccacgccaaccccagcgagcgggcccgcttcatccgctgcatctacaacctgctgcagagcagcagccctgctgtgaagtatgaggccgccggcaccctggtgaccctgagcagcgcccccacagccatcaaggctgctgcccagtgctacatcgacctgatcatcaaggagagtgacaacaacgtgaagctgattgtgctggacaggctcatcgagctgaaggagcacccagcccacgagcgggtgctgcaggacctggtgatggacatcctgcgggtgctgagcaccccagacctggaggtgaggaagaagaccctgcagctggccctggacctggtgagcagcagaaatgtggaggagctggtgattgtgctgaagaaggaggtgatcaagaccaacaacgtgtctgaacatgaggacacagacaagtaccggcagctgctggtgaggaccctgcacagctgcagcgtgcgcttcccagacatggccgccaacgtcatccctgtgctgatggagttcctgagtgacaacaatgaagctgctgctgctgatgtgctggagtttgtgcgggaggccatccagagatttgacaacctgaggatgctgattgtggagaagatgctggaggtgttccacgccatcaagtctgtgaagatctacagaggagccctgtggatcctgggggagtactgcagcaccaaggaggacatccagagcgtgatgacagagatccgccgcagcctgggggagatccccatcgtggagagcgagatcaagaaggaggccggggagctgaagccagaggaggagatcaccgtgggccctgtgcagaagctggtgacagagatgggcacctacgccacccagagcgccctgagcagcagccggcccaccaagaaggaggaggaccggccccccctgcggggcttcctgctggatggagacttctttgtggccgccagcctggccaccaccctgaccaagatcgccctgcgctacgtggccctggtgcaggagaagaagaagcagaacagctttgtggccgaggccatgctgctgatggccaccatcctgcacctgggcaagagcagcctgcccaagaagcccatcacagatgatgatgtggaccgcatcagcctgtgcctgaaggtgctgtctgagtgcagccccctgatgaatgacatcttcaacaaggagtgccggcagagcctgagccacatgctgagcgccaagctggaggaggagaagctgagccagaagaaggagagcgagaagagaaatgtgacagtgcagccagatgaccccatctccttcatgcagctgacagccaagaatgagatgaactgcaaggaggaccagttccagctgagcctgctggccgccatgggcaacacccagaggaaggaggccgctgaccccctggccagcaagctgaacaaggtgacccagctgaccggcttcagtgaccctgtgtatgcagaggcctacgtgcacgtgaaccagtatgacatcgtgctggatgtgctggtggtgaaccagaccagtgacaccctgcagaactgcaccctggagctggccaccctgggggacctgaagctggtggagaagcccagccccctgaccctggcccctcatgactttgccaacatcaaggccaacgtgaaggtggccagcacagaaaatggcatcatcttcggcaacatcgtgtatgatgtgtctggggccgccagtgacaggaactgtgtggtgctgagtgacatccacatcgacatcatggactacatccagcctgccacctgcacagatgctgagttccggcagatgtgggccgagtttgagtgggagaacaaggtgacagtgaacaccaacatggtggacctgaatgactacctgcagcacatcctgaagagcaccaacatgaagtgcctgaccccagagaaggccctgagcggctactgcggcttcatggccgccaacctgtatgcccggagcatctttggagaagatgccctggccaacgtgtccattgagaagcccatccaccagggcccagatgctgctgtgacaggccacatccgcatccgggccaagagccagggcatggccctgagcctgggggacaagatcaacctgagccagaagaagaccagcatctag

SEQ ID NO: 147912 - DNA, 2862 bp, synthetic construct; identical to SEQ ID NO: 147911
  misc_feature 1..2862: note = Description of Artificial Sequence: Synthetic coding sequence
  source 1..2862: mol_type = other DNA

SEQ ID NO: 147913 - DNA, 2721 bp, synthetic construct
  misc_feature 1..2721: note = Description of Artificial Sequence: Synthetic coding sequence
  source 1..2721: mol_type = other DNA
atgcccctgcggctggacatcaagaggaagctgacagcccggagtgacagagtgaagtctgtggacctgcaccccacagagccctggatgctggccagcctgtacaacggctctgtgtgtgtgtggaaccacgagacccagaccctggtgaagacctttgaggtgtgtgacctgcctgtgcgggccgccaagtttgtggccaggaagaactgggtggtgactggagcagatgacatgcagatccgggtcttcaactacaacaccctggagcgggtgcacatgtttgaggcccacagcgactacatccgctgcatcgctgtgcaccccacccagcccttcatcctgaccagcagtgatgacatgctgatcaagctgtgggactgggacaagaagtggagctgcagccaggtgtttgagggccacacccactacgtgatgcagatcgtcatcaaccccaaggacaacaaccagtttgccagcgccagcctggacaggaccatcaaggtgtggcagctgggcagcagcagccccaacttcaccctggagggccacgagaagggcgtgaactgcatcgactactacagcggcggggacaagccctacctgatcagcggggctgatgaccggctggtgaagatctgggactaccagaacaagacctgtgtgcagaccctggagggccacgcccagaatgtgtcctgtgccagcttccaccctgagctgcccatcatcatcaccggctctgaagatggcaccgtgcgcatctggcacagcagcacctaccgcctggagagcaccctgaactacggcatggagcgggtgtggtgtgtggccagcctgcggggcagcaacaacgtggccctgggctatgatgagggcagcatcatcgtgaagctgggccgggaggagcccgccatgtccatggatgccaacgggaagatcatctgggccaagcacagcgaggtgcagcaggccaacctgaaggccatgggagatgctgagatcaaggatggagagcggctgcccctggccgtgaaggacatgggcagctgtgagatctacccccagaccatccagcacaaccccaacggccgctttgtggtggtgtgtggagatggagagtacatcatctacacagccatggccctgaggaacaagagctttggcagcgcccaggagtttgcctgggcccatgacagcagtgaatatgccatccgggagagcaacagcatcgtgaagatcttcaagaacttcaaggagaagaagagcttcaagccagactttggagctgagagcatctacggcggcttcctgctgggcgtgcgctctgtgaatggcctggccttctatgactgggacaacacagagctgatcagaagaattgagatccagcccaagcacatcttctggagcgacagcggggagctggtgtgcatcgccacagaggagagcttcttcatcctgaagtacctgtctgagaaggtgctggccgcccaggagacccatgagggcgtgacagaagatggcattgaagatgcctttgaggtgctgggggagatccaggagatcgtgaagacaggcctgtgggtgggggactgcttcatctacaccagctctgtgaaccggctgaactactacgtgggcggggagatcgtgaccatcgcccacctggacaggaccatgtacctgctgggctacatccccaaggacaacagactctacctgggggacaaggagctgaacatcatctcctacagcctgctggtgtctgtgctggagtaccagacagctgtgatgaggcgggacttctccatggctgacaaggtgctgcccaccatccccaaggagcagaggaccagggtggcccacttcctggagaagcagggcttcaagcagcaggccctgactgtgtccacagatcctgagcacagatttgagctggccctgcagctgggggagctgaagatcgcctaccagctggccgtggaggccgagagcgagcagaagtggaagcagctggccgagctggccatcagcaagtgccagtttggcctggcccaggagtgcctgcaccacgcccaggactatggaggcctgctgctgctggccacagccagcggaaatgccaacatggtgaacaagctggccgagggcgctgagagagatggcaagaacaacgtggccttcatgagctacttcctgcagggcaaggtggatgcctgcctggagctgctgatcagaacaggccgcctgcctgaggccgccttcctggcccggacctacctgcccagccaggtgtcccgggtggtgaagctgtggagggagaacctgagcaaggtgaaccagaaggctgctgagagcctggccgaccccacagaatatgaaaatctcttccctggcctgaaggaggcctttgtggtggaggagtgggtgaaggagacccacgccgacctgtggccagccaagcagtaccccctggtgaccccaaatgaggagagaaatgtgatggaggagggcaaggacttccagcccagccgcagcacagcccagcaggagctggatggcaagccagccagccccacccctgtgattgtggccagccacacagccaacaaggaggagaagagcctgctggagctggaggtggacctggacaacctggagctggaggacatcgacaccacagacatcaacctggatgaggacatcctggatgactag

SEQ ID NO: 147914 - DNA, 2634 bp, synthetic construct
  misc_feature 1..2634: note = Description of Artificial Sequence: Synthetic coding sequence
  source 1..2634: mol_type = other DNA
atgctggccagcctgtacaatggatctgtgtgtgtgtggaaccacgagacccagaccctggtgaagacctttgaggtgtgtgacctgcctgtgcgggccgccaagtttgtggccaggaagaactgggtggtgactggagcagatgacatgcagatccgggtcttcaactacaacaccctggagcgggtgcacatgtttgaggcccacagcgactacatccgctgcatcgctgtgcaccccacccagcccttcatcctgaccagcagtgatgacatgctgatcaagctgtgggactgggacaagaagtggagctgcagccaggtgtttgagggccacacccactacgtgatgcagatcgtcatcaaccccaaggacaacaaccagtttgccagcgccagcctggacaggaccatcaaggtgtggcagctgggcagcagcagccccaacttcaccctggagggccacgagaagggcgtgaactgcatcgactactacagcggcggggacaagccctacctgatctctggagcagatgaccggctggtgaagatctgggactaccagaacaagacctgtgtgcagaccctggagggccacgcccagaatgtgtcctgtgccagcttccaccctgagctgcccatcatcatcactggaagtgaagatggcaccgtgcgcatctggcacagcagcacctaccgcctggagagcaccctgaactacggcatggagcgggtgtggtgtgtggccagcctgcggggcagcaacaacgtggccctgggctatgatgagggcagcatcatcgtgaagctgggccgggaggagcccgccatgtccatggatgccaacgggaagatcatctgggccaagcacagcgaggtgcagcaggccaacctgaaggccatgggagatgctgagatcaaggatggagagcggctgcccctggccgtgaaggacatgggcagctgtgagatctacccccagaccatccagcacaaccccaacggccgctttgtggtggtgtgtggagatggagagtacatcatctacacagccatggccctgaggaacaagagctttggaagtgcccaggagtttgcctgggcccatgacagcagtgaatatgccatccgggagagcaacagcatcgtgaagatcttcaagaacttcaaggagaagaagagcttcaagccagactttggagctgagagcatctatggaggcttcctgctgggcgtgcgctctgtgaatggcctggccttctatgactgggacaacacagagctgatccgccgcatcgagatccagcccaagcacatcttctggagcgacagcggggagctggtgtgcatcgccacagaggagagcttcttcatcctgaagtacctgtctgagaaggtgctggccgcccaggagacccatgaaggagtgacagaagatggcattgaagatgcctttgaggtgctgggggagatccaggagatcgtgaagacaggcctgtgggtgggggactgcttcatctacaccagctctgtgaaccggctgaactactacgtgggcggggagatcgtgaccatcgcccacctggacaggaccatgtacctgctgggctacatccccaaggacaaccggctgtacctgggggacaaggagctgaacatcatctcctacagcctgctggtgtctgtgctggagtaccagacagctgtgatgagaagagacttctccatggctgacaaggtgctgcccaccatccccaaggagcagaggaccagggtggcccacttcctggagaagcagggcttcaagcagcaggccctgactgtgtccacagatcctgagcacagatttgagctggccctgcagctgggggagctgaagatcgcctaccagctggccgtggaggccgagagcgagcagaagtggaagcagctggccgagctggccatcagcaagtgccagtttggcctggcccaggagtgcctgcaccacgcccaggactatggaggcctgctgctgctggccacagccagcggaaatgccaacatggtgaacaagctggccgagggcgctgagagagatggcaagaacaacgtggccttcatgagctacttcctgcagggcaaggtggatgcctgcctggagctgctgatcagaacaggccgcctgcctgaggccgccttcctggcccggacctacctgcccagccaggtgtcccgggtggtgaagctgtggagggagaacctgagcaaggtgaaccagaaggctgctgagagcctggccgaccccacagaatatgagaacctcttccctggcctgaaggaggcctttgtggtggaggagtgggtgaaggagacccatgctgacctgtggccagccaagcagtaccccctggtgaccccaaatgaggagagaaatgtgatggaggagggcaaggacttccagcccagccgcagcacagcccagcaggagctggatggcaagccagccagccccacccctgtgattgtggccagccacacagccaacaaggaggagaagagcctgctggagctggaggtggacctggacaacctggagctggaggacatcgacaccacagacatcaacctggatgaggacatcctggatgactag

SEQ ID NO: 147915 - DNA, 927 bp, synthetic construct
  misc_feature 1..927: note = Description of Artificial Sequence: Synthetic coding sequence
  source 1..927: mol_type = other DNA
atggcccccccagcccctggccctgccagcggcggcagcggggaggtggatgagctgtttgatgtgaagaatgccttctacatcggcagctaccagcagtgcatcaatgaggcccagagggtgaagctgagcagccctgagagagatgtggagagagatgtgttcctgtaccgggcctacctggcccagaggaagtttggagtggtgctggatgagatcaagcccagcagcgcccctgagctgcaggccgtgaggatgtttgctgactacctggcccacgagagccggcgggacagcatcgtggccgagctggaccgggagatgagccgctctgtggatgtgaccaacaccaccttcctgctgatggccgccagcatctacctgcatgaccagaacccagatgctgccctgcgggccctgcaccagggcgacagcctggagtgcacagccatgacagtgcagatcctgctgaagctggaccggctggacctggccaggaaggagctgaagaggatgcaggacctggatgaagatgccaccctgacccagctggccacagcctgggtgtccctggccactggaggagagaagctgcaggatgcctactacatcttccaggagatggctgacaagtgcagccccaccctgctgctgctgaatggccaggccgcctgccacatggcccagggccgctgggaggccgctgagggcctgctgcaggaggccctggacaaggacagcggctacccagagaccctggtgaacctgattgtgctgagccagcacctgggcaagcccccagaggtgaccaaccgctacctgagccagctgaaggatgcccacaggagccaccccttcatcaaggagtaccaggccaaggaaaatgactttgaccggctggtgctgcagtatgcccccagcgcctag

SEQ ID NO: 147916 - DNA, 771 bp, synthetic construct
  misc_feature 1..771: note = Description of Artificial Sequence: Synthetic coding sequence
  source 1..771: mol_type = other DNA
atggcccccccagcccctggccctgccagcggcggcagcggggaggtggatgagctgtttgatgtgaagaatgccttctacatcggcagctaccagcagtgcatcaatgaggcccagagggtgaagctgagcagccctgagagagatgtggagagagatgtgttcctgtaccgggcctacctggcccagaggaagtttggagtggtgctggatgagatcaagcccagcagcgcccctgagctgcaggccgtgaggatgtttgctgactacctggcccacgagagccggcgggacagcatcgtggccgagctggaccgggagatgagccgctctgtggatgtgaccaacaccaccttcctgctgatggccgccagcatctacctgcatgaccagaacccagatgctgccctgcgggccctgcaccagggcgacagcctggagtgcacagccatgacagtgcagatcctgctgaagctggaccggctggacctggccaggaaggagctgaagaggatgcaggacctggatgaagatgccaccctgacccagctggccacagcctgggtgtccctggccacagattctggctacccagagaccctggtgaacctgattgtgctgagccagcacctgggcaagcccccagaggtgaccaaccgctacctgagccagctgaaggatgcccacaggagccaccccttcatcaaggagtaccaggccaaggaaaatgactttgaccggctggtgctgcagtatgcccccagcgcctag

SEQ ID NO: 147917 - DNA, 774 bp, synthetic construct
  misc_feature 1..774: note = Description of Artificial Sequence: Synthetic coding sequence
  source 1..774: mol_type = other DNA
atggcccccccagcccctggccctgccagcggcggcagcggggaggtggatgagctgtttgatgtgaagaatgccttctacatcggcagctaccagcagtgcatcaatgaggcccagagggtgaagctgagcagccctgagagagatgtggagagagatgtgttcctgtaccgggcctacctggcccagaggaagtttggagtggtgctggatgagatcaagcccagcagcgcccctgagctgcaggccgtgaggatgtttgctgactacctggcccacgagagccgcagcacagccatgacagtgcagatcctgctgaagctggaccggctggacctggccaggaaggagctgaagaggatgcaggacctggatgaagatgccaccctgacccagctggccacagcctgggtgtccctggccaccggcggggagaagctgcaggatgcctactacatcttccaggagatggctgacaagtgcagccccaccctgctgctgctgaatggccaggccgcctgccacatggcccagggccgctgggaggccgctgagggcctgctgcaggaggccctggacaaggacagcggctacccagagaccctggtgaacctgattgtgctgagccagcacctgggcaagcccccagaggtgaccaaccgctacctgagccagctgaaggatgcccacaggagccaccccttcatcaaggagtaccaggccaaggaaaatgactttgaccggctggtgctgcagtatgcccccagcgcctag

SEQ ID NO: 147918 - DNA, 924 bp, synthetic construct
  misc_feature 1..924: note = Description of Artificial Sequence: Synthetic coding sequence
  source 1..924: mol_type = other DNA
atggcccccccagccccagctggcctgcggggcagcggggaggtggatgagctgtttgatgtgaagaatgccttctacatcggcagctaccagcagtgcatcaatgaggcccagagggtgaagctgagcagccctgagagagatgtggagagagatgtgttcctgtaccgggcctacctggcccagaggaagtttggagtggtgctggatgagatcaagcccagcagcgcccctgagctgcaggccgtgaggatgtttgctgactacctggcccacgagagcagaagagacagcatcgtggccgagctggaccgggagatgagccgctctgtggatgtgaccaacaccaccttcctgctgatggccgccagcatctacctgcatgaccagaacccagatgctgccctgcgggccctgcaccagggcgacagcctggagtgcacagccatgacagtgcagatcctgctgaagctggaccggctggacctggccaggaaggagctgaagaggatgcaggacctggatgaagatgccaccctgacccagctggccacagcctgggtgtccctggccaccggcggggagaagctgcaggatgcctactacatcttccaggagatggctgacaagtgcagccccaccctgctgctgctgaatggccaggccgcctgccacatggcccagggccgctgggaggccgctgagggcctgctgcaggaggccctggacaaggacagcggctacccagagaccctggtgaacctgattgtgctgagccagcacctgggcaagcccccagaggtgaccaaccgctacctgagccagctgaaggatgcccacaggagccaccccttcatcaaggagtaccaggccaaggaaaatgactttgaccggctggtgctgcagtatgcccccagcgcctag

SEQ ID NO: 147919 - DNA, 741 bp, synthetic construct
  misc_feature 1..741: note = Description of Artificial Sequence: Synthetic coding sequence
  source 1..741: mol_type = other DNA
atgatcaagaagtttgacaagaaggatgaggagagcggcagcggcagcaaccccttccagcacctggagaagtctgctgtgctgcaggaggcccgcatcttcaatgagacccccatcaacccccggcgctgcctgcacatcctgaccaagatcctgtacctgctgaaccagggcgagcacttcggcaccacagaggccacagaggccttctttgccatgaccaggctcttccagagcaatgaccagaccctgcggaggatgtgctacctgaccatcaaggagatggccaccatcagtgaagatgtgatcatcgtgaccagcagcctgaccaaggacatgaccgggaaggaggatgtgtaccggggccctgccatccgggccctgtgccgcatcacagatggcaccatgctgcaggccatcgagcgctacatgaagcaggccatcgtggacaaggtgtcctctgtgagcagcagcgccctggtgagcagcctgcacatgatgaagatctcctatgatgtggtgaagcgctggatcaatgaggcccaggaggccgccagcagtgacaacatcatggtgcagtaccacgccctgggcgtgctgtaccacctgaggaagaatgaccggctggccgtgtccaagatgctgaacaagttcaccaagagcggcctgaagagccagtttgcctactgcatgctgatcagaattgccagccggctgctgaaggagacagaagatggatag

SEQ ID NO: 147920 - DNA, 468 bp, synthetic construct
  misc_feature 1..468: note = Description of Artificial Sequence: Synthetic coding sequence
  source 1..468: mol_type = other DNA
tgagctggcagcttcagctgcaccatgaagttcaccgtgcgggactgtgaccccaacacaggagtgcctgatgaagatggctatgatgatgaatatgtgctggaggacctggaggtgacagtgtctgaccacatccagaaggtgctgaagcccaactttgctgctgcctgggaggaggtgggggacacctttgagaaggaggagacctttgccctgagcagcaccaagaccctggaggaggccgtgaacaacatcatcaccttcctgggcatgcagccctgtgagaggagtgacaaggtgcctgagaacaagaacagccacagcctgtacctggccggcatcttccggggcggctatgacctgctggtgcgcagccggctggccctggctgatggagtgaccatgcaggtgacagtgcgcagcaaggagaggacccctgtggatgtgatcctggcctctgtgggctag

SEQ ID NO: 147921 - DNA, 741 bp, synthetic construct; identical to SEQ ID NO: 147919
  misc_feature 1..741: note = Description of Artificial Sequence: Synthetic coding sequence
  source 1..741: mol_type = other DNA

SEQ ID NO: 147922 - DNA, 1080 bp, synthetic construct
  misc_feature 1..1080: note = Description of Artificial Sequence: Synthetic coding sequence
  source 1..1080: mol_type = other DNA
atgtacttcaagagagctgcccgggccttccctgtgctgctgactggagctgggaagaccaccctgctgaactacatcctgacagagcagcacagcaagagggtggccgtcatcctgaatgaatttggagagggcagcgccctggagaagagcctggccgtgtcccagggcggggagctgtatgaggagtggctggagctgagaaatggctgcctgtgctgcagcgtgaaggacagcggcctgcgggccatcgagaacctgatgcagaagaagggcaagtttgactacatcctgctggagaccaccggcctggccgaccctggagctgtggcctccatgttctgggtggatgctgagctgggcagtgacatctacctggatggcatcatcaccatcgtggacagcaaatatggcctgaagcacctgacagaggagaagccagatggcctcatcaatgaggccacccggcaggtggccctggctgatgccatcctgatcaacaagacagacctggtgcctgaagaagatgtgaagaagctgcggaccaccatccgcagcatcaatggcctgggccagatcctggagacccagaggagccgggtggacctgagcaatgtgctggacctgcacgcctttgacagcctgagcggcatcagcctgcagaagaagctgcagcacgtgcccggcacccagccccacctggaccagagcatcgtgaccatcacctttgaggtgcctggaaatgccaaggaggagcacctgaacatgttcatccagaacctgctgtgggagaagaatgtgaggaacaaggacaaccactgcatggaggtgatccggctgaagggcctggtgtccatcaaggacaagagccagcaggtgattgtgcagggcgtgcatgagctgtatgacctggaggagacccctgtgtcctggaaggatgacacagagaggaccaaccggctggtgctgctgggcaggaacctggacaaggacatcctgaagcagctgttcatcgccaccgtgacagaaacagagaagcagtggaccacccgcttccaggaggaccaggtgtgcacctag

SEQ ID NO: 147923 - DNA, 1188 bp, synthetic construct
  misc_feature 1..1188: note = Description of Artificial Sequence: Synthetic coding sequence
  source 1..1188: mol_type = other DNA
atgctgcctgctgtgggcagcgcagatgaggaggaggaccctgctgaggaggactgcccagagctggtgcccatcgagaccacccagagcgaggaggaggagaagagcggcctgggcgccaagatccctgtgaccatcatcaccggctacctgggcgccggcaagaccaccctgctgaactacatcctgacagagcagcacagcaagagggtggccgtcatcctgaatgaatttggagagggcagcgccctggagaagagcctggccgtgtcccagggcggggagctgtatgaggagtggctggagctgagaaatggctgcctgtgctgcagcgtgaaggacagcggcctgcgggccatcgagaacctgatgcagaagaagggcaagtttgactacatcctgctggagaccaccggcctggccgaccctggagctgtggcctccatgttctgggtggatgctgagctgggcagtgacatctacctggatggcatcatcaccatcgtggacagcaaatatggcctgaagcacctgacagaggagaagccagatggcctcatcaatgaggccacccggcaggtggccctggctgatgccatcctgatcaacaagacagacctggtgcctgaagaagatgtgaagaagctgcggaccaccatccgcagcatcaatggcctgggccagatcctggagacccagaggagccgggtggacctgagcaatgtgctggacctgcacgcctttgacagcctgagcggcatcagcctgcagaagaagctgcagcacgtgcccggcacccagccccacctggaccagagcatcgtgaccatcacctttgaggtgcctggaaatgccaaggaggagcacctgaacatgttcatccagaacctgctgtgggagaagaatgtgaggaacaaggacaaccactgcatggaggtgatccggctgaagggcctggtgtccatcaaggacaagagccagcaggtgattgtgcagggcgtgcatgagctgtatgacctggaggagacccctgtgtcctggaaggatgacacagagaggaccaaccggctggtgctgctgggcaggaacctggacaaggacatcctgaagcagctgttcatcgccaccgtgacagaaacagagaagcagtggaccacccgcttccaggaggaccaggtgtgcacctag

SEQ ID NO: 147924 - DNA, 543 bp, synthetic construct
  misc_feature 1..543: note = Description of Artificial Sequence: Synthetic coding sequence
  source 1..543: mol_type = other DNA
atgctgcctgctgtgggcagcgcagatgaggaggaggaccctgctgaggaggactgcccagagctggtgcccatcgagaccacccagagcgaggaggaggagaagagcggcctgggcgccaagatccctgtgaccatcatcaccggctacctgggcgccggcaagaccaccctgctgaactacatcctgacagagcagcacagcaagagggtggccgtcatcctgaatgaatttggagagggcagcgccctggagaagagcctggccgtgtcccagggcggggagctgtatgaggagtggctggagctgagaaatggctgcctgtgctgcagcgtgaaggacagcggcctgcgggccatcgagaacctgatgcagaagaagggcaagtttgactacatcctgctggagaccaccggcctggccgaccctggagctgtggcctccatgttctgggtggatgctgagctgggcagtgacatctacctggatggcatcatcaccatcgtggacagcaaatatggcctgaaggtgaagtaccactag

SEQ ID NO: 147925 - DNA, 1044 bp, synthetic construct
  misc_feature 1..1044: note = Description of Artificial Sequence: Synthetic coding sequence
  source 1..1044: mol_type = other DNA
atgctgcctgctgtgggcagcgcagatgaggaggaggaccctgctgaggaggactgcccagagctggtgcccatcgagaccacccagagcgaggaggaggagaagagcggcctgggcgccaagatccctgtgaccatcatcaccggctacctgggcgccggcaagaccaccctgctgaactacatcctgacagagcagcacagcaagagggtggccgtcatcctgaatgaatttggagagggcagcgccctggagaagagcctggccgtgtcccagggcggggagctgtatgaggagtggctggagctgagaaatggctgcctgtgctgcagcgtgaaggacagcggcctgcgggccatcgagaacctgatgcagaagaagggcaagtttgactacatcctgctggagaccaccggcctggccgaccctggagctgtggcctccatgttctgggtggatgctgagctgggcagtgacatctacctggatggcatcatcaccatcgtggacagcaaatatggcctgaagcacctgacagaggagaagccagatggcctcatcaatgaggccaccaggagcatcaatggcctgggccagatcctggagacccagaggagcagcctgcagaagaagctgcagcacgtgcccggcacccagccccacctggaccagagcatcgtgaccatcacctttgaggtgcctggaaatgccaaggaggagcacctgaacatgttcatccagaacctgctgtgggagaagaatgtgaggaacaaggacaaccactgcatggaggtgatccggctgaagggcctggtgtccatcaaggacaagagccagcaggtgattgtgcagggcgtgcatgagctgtatgacctggaggagacccctgtgtcctggaaggatgacacagagaggaccaaccggctggtgctgctgggcaggaacctggacaaggacatcctgaagcagctgttcatcgccaccgtgacagaaacagagaagcagtggaccacccgcttccaggaggaccaggtgtgcacctag

SEQ ID NO: 147926 - DNA, 753 bp, synthetic construct
  misc_feature 1..753: note = Description of Artificial Sequence: Synthetic coding sequence
  source 1..753: mol_type = other DNA
atgctgcctgctgtgggcagcgcagatgaggaggaggaccctgctgaggaggactgcccagagctggtgcccatcgagaccacccagagcgaggaggaggagaagagcggcctgggcgccaagatccctgtgaccatcatcaccggctacctgggcgccggcaagaccaccctgctgaactacatcctgacagagcagcacagcaagagggtggccgtcatcctgaatgaatttggagagggcagcgccctggagaagagcctggccgtgtcccagggcggggagctgtatgaggagtggctggagctgagaaatggctgcctgtgctgcagcgtgaaggacagcggcctgcgggccatcgagaacctgatgcagaagaagggcaagtttgactacatcctgctggagaccaccggcctggccgaccctggagctgtggcctccatgttctgggtggatgctgagctgggcagtgacatctacctggatggcatcatcaccatcgtggacagcaaatatggcctgaagcacctgacagaggagaagccagatggcctcatcaatgaggccacccggcaggtggccctggctgatgccatcctgatcaacaagacagacctggtgcctgaagaagatgtgaagaagctgcggaccaccatccgctatgagatgatctctgtgctgagcgcctaccgctccatgctgtacacccagaacatcttctacagcgactgctgccctgtggagacctag

SEQ ID NO: 147927 - DNA, 234 bp, synthetic construct
  misc_feature 1..234: note = Description of Artificial Sequence: Synthetic coding sequence
  source 1..234: mol_type = other DNA
atgtacttcaagagagctgcccgggccttccctgtgctgctgactggagctgggaagaccaccctgctgaactacatcctgacagagcagcacagcaagagggtggccgtcatcctgaatgaatttggagagggcagcgccctggagaagagcctggccgtgtcccagggcggggagctgtatgaggagtggctggagctgagaaatggctgcctgtgctgcagcgtgaagtag

SEQ ID NO: 147928 - DNA, 342 bp, synthetic construct
  misc_feature 1..342: note = Description of Artificial Sequence: Synthetic coding sequence
  source 1..342: mol_type = other DNA
atgctgcctgctgtgggcagcgcagatgaggaggaggaccctgctgaggaggactgcccagagctggtgcccatcgagaccacccagagcgaggaggaggagaagagcggcctgggcgccaagatccctgtgaccatcatcaccggctacctgggcgccggcaagaccaccctgctgaactacatcctgacagagcagcacagcaagagggtggccgtcatcctgaatgaatttggagagggcagcgccctggagaagagcctggccgtgtcccagggcggggagctgtatgaggagtggctggagctgagaaatggctgcctgtgctgcagcgtgaagtag

SEQ ID NO: 147929 - DNA, 1131 bp, synthetic construct
  misc_feature 1..1131: note = Description of Artificial Sequence: Synthetic coding sequence
  source 1..1131: mol_type = other DNA
atgctgcctgctgtgggcagcgcagatgaggaggaggaccctgctgaggaggactgcccagagctggtgcccatcgagaccacccagagcgaggaggaggagaagagcggcctgggcgccaagatccctgtgaccatcatcaccggctacctgggcgccggcaagaccaccctgctgaactacatcctgacagagcagcacagcaagagggtggccgtcatcctgaatgaatttggagagggcagcgccctggagaagagcctggccgtgtcccagggcggggagctgtatgaggagtggctggagctgagaaatggctgcctgtgctgcagcgtgaaggacagcggcctgcgggccatcgagaacctgatgcagaagaagggcaagtttgactacatcctgctggagaccaccggcctggccgaccctggagctgtggcctccatgttctgggtggatgctgagctgggcagtgacatctacctggatggcatcatcaccatcgtggacagcaaatatggcctgaagcacctgacagaggagaagccagatggcctcatcaatgaggccacccggcaggtggccctggctgatgccatcctgatcaacaagacagacctggtgcctgaagaagatgtgaagaagctgcggaccaccatccgcagcatcaatggcctgggccagatcctggagacccagaggagcagcctgcagaagaagctgcagcacgtgcccggcacccagccccacctggaccagagcatcgtgaccatcacctttgaggtgcctggaaatgccaaggaggagcacctgaacatgttcatccagaacctgctgtgggagaagaatgtgaggaacaaggacaaccactgcatggaggtgatccggctgaagggcctggtgtccatcaaggacaagagccagcaggtgattgtgcagggcgtgcatgagctgtatgacctggaggagacccctgtgtcctggaaggatgacacagagaggaccaaccggctggtgctgctgggcaggaacctggacaaggacatcctgaagcagctgttcatcgccaccgtgacagaaacagagaagcagtggaccacccgcttccaggaggaccaggtgtgcacctag

SEQ ID NO: 147930 - DNA, 483 bp, synthetic construct
  misc_feature 1..483: note = Description of Artificial Sequence: Synthetic coding sequence
  source 1..483: mol_type = other DNA
atgctgcctgctgtgggcagcgcagatgaggaggaggaccctgctgaggaggactgcccagagctggtgcccatcgagaccacccagagcgaggaggaggagaagagcggcctgggcgccaagatccctgtgaccatcatcaccggctacctgggcgccggcaagaccaccctgctgaactacatcctgacagagcagcacagcaagagggtggccgtcatcctgaatgaatttggagagggcagcgccctggagaagagcctggccgtgtcccagggcggggagctgtatgaggagtggctggagctgagaaatggctgcctgtgctgcagcgtgaaggacagcggcctgcgggccatcgagaacctgatgcagaagaagggcaagtttgactacatcctgctggagaccaccggcctggccgaccccggcatcatcaccatcgtggacagcaaatatggcctgaaggtgaagtaccactag

SEQ ID NO: 147931 - DNA, 441 bp, synthetic construct
  misc_feature 1..441: note = Description of Artificial Sequence: Synthetic coding sequence
  source 1..441: mol_type = other DNA
atgtacttcaagagagctgcccgggccttccctgtgctgctgactggagctgggaagaccaccctgctgaactacatcctgacagagcagcacagcaagagggtggccgtcatcctgaatgaatttggagagggcagcgccctggagaagagcctggccgtgtcccagggcggggagctgtatgaggagtggctggagctgagaaatggctgcctgtgctgcagcgtgaaggacagcggcctgcgggccatcgagaacctgatgcagaagaagggcaagtttgactacatcctgctggagaccaccggcctggccgaccctggagctgtggcctccatgttctgggtggatgctgagctgggcagtgacatctacctggatggcatcatcaccatcgtggacagcaaatatggcctgaaggccaagaactggaccacctag

SEQ ID NO: 147932 - DNA, 1188 bp, synthetic construct
  misc_feature 1..1188: note = Description of Artificial Sequence: Synthetic coding sequence
  source 1..1188: mol_type = other DNA
atgctgcctgctgtgggcagcgcagatgaggaggaggaccctgctgaggaggactgcccagagctggtgcccatggagaccacccagagcgaggaggaggagaagagcggcctgggcgccaagatccctgtgaccatcatcaccggctacctgggcgccggcaagaccaccctgctgaactacatcctgacagagcagcacagcaagagggtggccgtcatcctgaatgaatttggagagggcagcgccctggagaagagcctggccgtgtcccagggcggggagctgtatgaggagtggctggagctgagaaatggctgcctgtgctgcagcgtgaaggacaatggcctgcgggccatcgagaacctgatgcagaagaagggcaagtttgactacatcctgctggagaccaccggcctggccgaccctggagctgtggcctccatgttctgggtggatgctgagctgggcagtgacatctacctggatggcatcatcaccatcgtggacagcaaatatggcctgaagcacctggccgaggagaagccagatggcctcatcaatgaggccacccggcaggtggccctggctgatgccatcctgatcaacaagacagacctggtgcctgaagaagatgtgaagaagctgcgggccaccatccgcagcatcaatggcctgggccagatcctggagacccagaggagccgggtggacctgagcaatgtgctggacctgcacgcctttgacagcctgagcggcatcagcctgcagaagaagctgcagcacgtgcccggcacccagccccacctggaccagagcatcgtgaccatcacctttgaggtgcctggaaatgccaaggaggagcacctgaacatgttcatccagaacctgctgtgggagaagaatgtgaggaacaaggacaaccactgcatggaggtgatccggctgaagggcctggtgtccatcaaggacaagagccagcaggtgattgtgcagggcgtgcatgagctgtatgacctggaggagacccctgtgtcctggaaggatgacacagagaggaccaaccggctggtgctgctgggcaggaacctggacaaggacatcctgaagcagctgttcatcgccaccgtgacagaaacagagaagcagtggaccacccacttcaaggaggaccaggtgtgcacctag

SEQ ID NO: 147933 - DNA, 543 bp, synthetic construct
  misc_feature 1..543: note = Description of Artificial Sequence: Synthetic coding sequence
  source 1..543: mol_type = other DNA
atgctgcctgctgtgggcagcgcagatgaggaggaggaccctgctgaggaggactgcccagagctggtgcccatggagaccacccagagcgaggaggaggagaagagcggcctgggcgccaagatccctgtgaccatcatcaccggctacctgggcgccggcaagaccaccctgctgaactacatcctgacagagcagcacagcaagagggtggccgtcatcctgaatgaatttggagagggcagcgccctggagaagagcctggccgtgtcccagggcggggagctgtatgaggagtggctggagctgagaaatggctgcctgtgctgcagcgtgaaggacaatggcctgcgggccatcgagaacctgatgcagaagaagggcaagtttgactacatcctgctggagaccaccggcctggccgaccctggagctgtggcctccatgttctgggtggatgctgagctgggcagtgacatctacctggatggcatcatcaccatcgtggacagcaaatatggcctgaaggtgaagtaccactag

SEQ ID NO: 147934 - DNA, 1131 bp, synthetic construct
  misc_feature 1..1131: note = Description of Artificial Sequence: Synthetic coding sequence
  source 1..1131: mol_type = other DNA
atgctgcctgctgtgggcagcgcagatgaggaggaggaccctgctgaggaggactgcccagagctggtgcccatggagaccacccagagcgaggaggaggagaagagcggcctgggcgccaagatccctgtgaccatcatcaccggctacctgggcgccggcaagaccaccctgctgaactacatcctgacagagcagcacagcaagagggtggccgtcatcctgaatgaatttggagagggcagcgccctggagaagagcctggccgtgtcccagggcggggagctgtatgaggagtggctggagctgagaaatggctgcctgtgctgcagcgtgaaggacaatggcctgcgggccatcgagaacctgatgcagaagaagggcaagtttgactacatcctgctggagaccaccggcctggccgaccctggagctgtggcctccatgttctgggtggatgctgagctgggcagtgacatctacctggatggcatcatcaccatcgtggacagcaaatatggcctgaagcacctggccgaggagaagccagatggcctcatcaatgaggccacccggcaggtggccctggctgatgccatcctgatcaacaagacagacctggtgcctgaagaagatgtgaagaagctgcgggccaccatccgcagcatcaatggcctgggccagatcctggagacccagaggagcagcctgcagaagaagctgcagcacgtgcccggcacccagccccacctggaccagagcatcgtgaccatcacctttgaggtgcctggaaatgccaaggaggagcacctgaacatgttcatccagaacctgctgtgggagaagaatgtgaggaacaaggacaaccactgcatggaggtgatccggctgaagggcctggtgtccatcaaggacaagagccagcaggtgattgtgcagggcgtgcatgagctgtatgacctggaggagacccctgtgtcctggaaggatgacacagagaggaccaaccggctggtgctgctgggcaggaacctggacaaggacatcctgaagcagctgttcatcgccaccgtgacagaaacagagaagcagtggaccacccacttcaaggaggaccaggtgtgcacctag

SEQ ID NO: 147935 - DNA, 1080 bp, synthetic construct
  misc_feature 1..1080: note = Description of Artificial Sequence: Synthetic coding sequence
  source 1..1080: mol_type = other DNA
atgtacttcaagagagctgcccgggccttccctgtgctgctgactggagctgggaagaccaccctgctgaactacatcctgacagagcagcacagcaagagggtggccgtcatcctgaatgaatttggagagggcagcgccctggagaagagcctggccgtgtcccagggcggggagctgtatgaggagtggctggagctgagaaatggctgcctgtgctgcagcgtgaaggacaatggcctgcgggccatcgagaacctgatgcagaagaagggcaagtttgactacatcctgctggagaccaccggcctggccgaccctggagctgtggcctccatgttctgggtggatgctgagctgggcagtgacatctacctggatggcatcatcaccatcgtggacagcaaatatggcctgaagcacctggccgaggagaagccagatggcctcatcaatgaggccacccggcaggtggccctggctgatgccatcctgatcaacaagacagacctggtgcctgaagaagatgtgaagaagctgcgggccaccatccgcagcatcaatggcctgggccagatcctggagacccagaggagccgggtggacctgagcaatgtgctggacctgcacgcctttgacagcctgagcggcatcagcctgcagaagaagctgcagcacgtgcccggcacccagccccacctggaccagagcatcgtgaccatcacctttgaggtgcctggaaatgccaaggaggagcacctgaacatgttcatccagaacctgctgtgggagaagaatgtgaggaacaaggacaaccactgcatggaggtgatccggctgaagggcctggtgtccatcaaggacaagagccagcaggtgattgtgcagggcgtgcatgagctgtatgacctggaggagacccctgtgtcctggaaggatgacacagagaggaccaaccggctggtgctgctgggcaggaacctggacaaggacatcctgaagcagctgttcatcgccaccgtgacagaaacagagaagcagtggaccacccacttcaaggaggaccaggtgtgcacctag

SEQ ID NO: 147936 - DNA, 483 bp, synthetic construct
  misc_feature 1..483: note = Description of Artificial Sequence: Synthetic coding sequence
  source 1..483: mol_type = other DNA
atgctgcctgctgtgggcagcgcagatgaggaggaggaccctgctgaggaggactgcccagagctggtgcccatggagaccacccagagcgaggaggaggagaagagcggcctgggcgccaagatccctgtgaccatcatcaccggctacctgggcgccggcaagaccaccctgctgaactacatcctgacagagcagcacagcaagagggtggccgtcatcctgaatgaatttggagagggcagcgccctggagaagagcctggccgtgtcccagggcggggagctgtatgaggagtggctggagctgagaaatggctgcctgtgctgcagcgtgaaggacaatggcctgcgggccatcgagaacctgatgcagaagaagggcaagtttgactacatcctgctggagaccaccggcctggccgaccccggcatcatcaccatcgtggacagcaaatatggcctgaaggtgaagtaccactag

SEQ ID NO: 147937 - DNA, 1188 bp, synthetic construct
  misc_feature 1..1188: note = Description of Artificial Sequence: Synthetic coding sequence
  source 1..1188: mol_type = other DNA
atgctgcctgctgtgggctctgtggatgaggaggaggaccctgctgaggaggactgcccagagctggtgcccatcgagaccacccagagcgaggaggaggagaagagcggcctgggcgccaagatccctgtgaccatcatcaccggctacctgggcgccggcaagaccaccctgctgaactacatcctgacagagcagcacagcaagagggtggccgtcatcctgaatgaaagtggagagggcagcgccctggagaagagcctggccgtgtcccagggcggggagctgtatgaggagtggctggagctgagaaatggctgcctgtgctgcagcgtgaaggacaatggcctgcgggccatcgagaacctgatgcagaagaagggcaagtttgatgacatcctgctggagaccaccggcctggccgaccctggagctgtggcctccatgttctgggtggatgctgagctgggcagtgacatctacctggatggcatcatcaccatcgtggacagcaaatatggcctgaagcacctgacagaggagaagccagatggcctcatcaatgaggccacccggcaggtggccctggccgacatcatcctgatcaacaagacagacctggtgcctgaagaagatgtgaagaagctgcggaccaccatccgcagcatcaatggcctgggccagatcctggagacccagaggagccgggtggacctgagcaatgtgctggacctgcacgcctttgacagcctgagcggcatcagcctgcagaagaagctgcagcacgtgcccggcacccagccccacctggaccagagcatcgtgaccatcacctttgaggtgcctggaaatgccaaggaggagcacctgaacatgttcatccagaacctgctgtgggagaagaatgtgaggaacaaggacaaccactgcatggaggtgatccggctgaagggcctggtgtccatcaaggacaagagccagcaggtgattgtgcagggcgtgcatgagctgtatgacctggaggagacccctgtgtcctggaaggatgacacagagaggaccaaccggctggtgctgattggaagaaacctggacaaggacatcctgaagcagctgttcatcgccaccgtgacagaaacagagaagcagtggaccacccacttcaaggaggaccaggtgtgcacctag

SEQ ID NO: 147938 - DNA, 258 bp, synthetic construct
  misc_feature 1..258: note = Description of Artificial Sequence: Synthetic coding sequence
  source 1..258: mol_type = other DNA
atggaggtgatccggctgaagggcctggtgtccatcaaggacaagagccagcaggtgattgtgcagggcgtgcatgagctgtatgacctggaggagacccctgtgtcctggaaggatgacacagagaggaccaaccggctggtgctgattggaagaaacctggacaaggacatcctgaagcagctgttcatcgccaccgtgacagaaacagagaagcagtggaccacccacttcaaggaggaccaggtgtgcacctag

SEQ ID NO: 147939 - DNA, 258 bp, synthetic construct; identical to SEQ ID NO: 147938
  misc_feature 1..258: note = Description of Artificial Sequence: Synthetic coding sequence
  source 1..258: mol_type = other DNA

SEQ ID NO: 147940 - DNA, 132 bp, synthetic construct
  misc_feature 1..132: note = Description of Artificial Sequence: Synthetic coding sequence
  source 1..132: mol_type = other DNA
atgttcatccagaacctgctgtgggagaagaatgtgaggaacaaggacaaccactgcatggaggtgatccggctgaaggtgcagttcaccgtggccgacttctggaccaagagcttctcctggctgctgtag

SEQ ID NO: 147941 - DNA, 1128 bp, synthetic construct
  misc_feature 1..1128: note = Description of Artificial Sequence: Synthetic coding sequence
  source 1..1128: mol_type = other DNA
atgctgcctgctgtgggctctgtggatgaggaggaggaccctgctgaggaggactgcccagagctggtgcccatcgagaccacccagagcgaggaggaggagaagagcggcctgggcgccaagatccctgtgaccatcatcaccggctacctgggcgccggcaagaccaccctgctgaactacatcctgacagagcagcacagcaagagggtggccgtcatcctgaatgaaagtggagagggcagcgccctggagaagagcctggccgtgtcccagggcggggagctgtatgaggagtggctggagctgagaaatggctgcctgtgctgcagcgtgaaggacaatggcctgcgggccatcgagaacctgatgcagaagaagggcaagtttgatgacatcctgctggagaccaccggcctggccgaccccggcatcatcaccatcgtggacagcaaatatggcctgaagcacctgacagaggagaagccagatggcctcatcaatgaggccacccggcaggtggccctggccgacatcatcctgatcaacaagacagacctggtgcctgaagaagatgtgaagaagctgcggaccaccatccgcagcatcaatggcctgggccagatcctggagacccagaggagccgggtggacctgagcaatgtgctggacctgcacgcctttgacagcctgagcggcatcagcctgcagaagaagctgcagcacgtgcccggcacccagccccacctggaccagagcatcgtgaccatcacctttgaggtgcctggaaatgccaaggaggagcacctgaacatgttcatccagaacctgctgtgggagaagaatgtgaggaacaaggacaaccactgcatggaggtgatccggctgaagggcctggtgtccatcaaggacaagagccagcaggtgattgtgcagggcgtgcatgagctgtatgacctggaggagacccctgtgtcctggaaggatgacacagagaggaccaaccggctggtgctgattggaagaaacctggacaaggacatcctgaagcagctgttcatcgccaccgtgacagaaacagagaagcagtggaccacccacttcaaggaggaccaggtgtgcacctag

SEQ ID NO: 147942 - DNA, 1080 bp, synthetic construct
  misc_feature 1..1080: note = Description of Artificial Sequence: Synthetic coding sequence
  source 1..1080: mol_type = other DNA
atgtacttcaagagggccccccgggccttccctgtgctgctgactggagctgggaagaccaccctgctgaactacatcctgacagagcagcacagcaagagggtggccgtcatcctgaatgaaagtggagagggcagcgccctggagaagagcctggccgtgtcccagggcggggagctgtatgaggagtggctggagctgagaaatggctgcctgtgctgcagcgtgaaggacaatggcctgcgggccatcgagaacctgatgcagaagaagggcaagtttgatgacatcctgctggagaccaccggcctggccgaccctggagctgtggcctccatgttctgggtggatgctgagctgggcagtgacatctacctggatggcatcatcaccatcgtggacagcaaatatggcctgaagcacctgacagaggagaagccagatggcctcatcaatgaggccacccggcaggtggccctggccgacatcatcctgatcaacaagacagacctggtgcctgaagaagatgtgaagaagctgcggaccaccatccgcagcatcaatggcctgggccagatcctggagacccagaggagccgggtggacctgagcaatgtgctggacctgcacgcctttgacagcctgagcggcatcagcctgcagaagaagctgcagcacgtgcccggcacccagccccacctggaccagagcatcgtgaccatcacctttgaggtgcctggaaatgccaaggaggagcacctgaacatgttcatccagaacctgctgtgggagaagaatgtgaggaacaaggacaaccactgcatggaggtgatccggctgaagggcctggtgtccatcaaggacaagagccagcaggtgattgtgcagggcgtgcatgagctgtatgacctggaggagacccctgtgtcctggaaggatgacacagagaggaccaaccggctggtgctgattggaagaaacctggacaaggacatcctgaagcagctgttcatcgccaccgtgacagaaacagagaagcagtggaccacccacttcaaggaggaccaggtgtgcacctag

SEQ ID NO: 147943 - DNA, 234 bp, synthetic construct
  misc_feature 1..234: note = Description of Artificial Sequence: Synthetic coding sequence
  source 1..234: mol_type = other DNA
atgtacttcaagagggccccccgggccttccctgtgctgctgactggagctgggaagaccaccctgctgaactacatcctgacagagcagcacagcaagagggtggccgtcatcctgaatgaaagtggagagggcagcgccctggagaagagcctggccgtgtcccagggcggggagctgtatgaggagtggctggagctgagaaatggctgcctgtgctgcagcgtgaagtag

SEQ ID NO: 147944 - DNA, 1131 bp, synthetic construct
  misc_feature 1..1131: note = Description of Artificial Sequence: Synthetic coding sequence
  source 1..1131: mol_type = other DNA
atgctgcctgctgtgggctctgtggatgaggaggaggaccctgctgaggaggactgcccagagctggtgcccatcgagaccacccagagcgaggaggaggagaagagcggcctgggcgccaagatccctgtgaccatcatcaccggctacctgggcgccggcaagaccaccctgctgaactacatcctgacagagcagcacagcaagagggtggccgtcatcctgaatgaaagtggagagggcagcgccctggagaagagcctggccgtgtcccagggcggggagctgtatgaggagtggctggagctgagaaatggctgcctgtgctgcagcgtgaaggacaatggcctgcgggccatcgagaacctgatgcagaagaagggcaagtttgatgacatcctgctggagaccaccggcctggccgaccctggagctgtggcctccatgttctgggtggatgctgagctgggcagtgacatctacctggatggcatcatcaccatcgtggacagcaaatatggcctgaagcacctgacagaggagaagccagatggcctcatcaatgaggccacccggcaggtggccctggccgacatcatcctgatcaacaagacagacctggtgcctgaagaagatgtgaagaagctgcggaccaccatccgcagcatcaatggcctgggccagatcctggagacccagaggagcagcctgcagaagaagctgcagcacgtgcccggcacccagccccacctggaccagagcatcgtgaccatcacctttgaggtgcctggaaatgccaaggaggagcacctgaacatgttcatccagaacctgctgtgggagaagaatgtgaggaacaaggacaaccactgcatggaggtgatccggctgaagggcctggtgtccatcaaggacaagagccagcaggtgattgtgcagggcgtgcatgagctgtatgacctggaggagacccctgtgtcctggaaggatgacacagagaggaccaaccggctggtgctgattggaagaaacctggacaaggacatcctgaagcagctgttcatcgccaccgtgacagaaacagagaagcagtggaccacccacttcaaggaggaccaggtgtgcacctag

SEQ ID NO: 147945 - DNA, 225 bp, synthetic construct
  misc_feature 1..225: note = Description of Artificial Sequence: Synthetic coding sequence
  source 1..225: mol_type = other DNA
atgtacttcaagagggccccccgggccttccctgtgctgctgactggagctgggaagaccaccctgctgaactacatcctgacagagcagcacagcaagagggtggccgtcatcctgaatgaaagtggagagggcagcgccctggagaagagcctggccgtgtcccagggcggggagctgtatgaggagtggctggagctgagaaatggctgcctgtgctgctag

SEQ ID NO: 147946 - DNA, 543 bp, synthetic construct
  misc_feature 1..543: note = Description of Artificial Sequence: Synthetic coding sequence
  source 1..543: mol_type = other DNA
atgctgcctgctgtgggctctgtggatgaggaggaggaccctgctgaggaggactgcccagagctggtgcccatcgagaccacccagagcgaggaggaggagaagagcggcctgggcgccaagatccctgtgaccatcatcaccggctacctgggcgccggcaagaccaccctgctgaactacatcctgacagagcagcacagcaagagggtggccgtcatcctgaatgaaagtggagagggcagcgccctggagaagagcctggccgtgtcccagggcggggagctgtatgaggagtggctggagctgagaaatggctgcctgtgctgcagcgtgaaggacaatggcctgcgggccatcgagaacctgatgcagaagaagggcaagtttgatgacatcctgctggagaccaccggcctggccgaccctggagctgtggcctccatgttctgggtggatgctgagctgggcagtgacatctacctggatggcatcatcaccatcgtggacagcaaatatggcctgaaggtgaagtaccactag

SEQ ID NO: 147947 - DNA, 1044 bp, synthetic construct
  misc_feature 1..1044: note = Description of Artificial Sequence: Synthetic coding sequence
  source 1..1044: mol_type = other DNA
atgctgcctgctgtgggctctgtggatgaggaggaggaccctgctgaggaggactgcccagagctggtgcccatcgagaccacccagagcgaggaggaggagaagagcggcctgggcgccaagatccctgtgaccatcatcaccggctacctgggcgccggcaagaccaccctgctgaactacatcctgacagagcagcacagcaagagggtggccgtcatcctgaatgaaagtggagagggcagcgccctggagaagagcctggccgtgtcccagggcggggagctgtatgaggagtggctggagctgagaaatggctgcctgtgctgcagcgtgaaggacaatggcctgcgggccatcgagaacctgatgcagaagaagggcaagtttgatgacatcctgctggagaccaccggcctggccgaccctggagctgtggcctccatgttctgggtggatgctgagctgggcagtgacatctacctggatggcatcatcaccatcgtggacagcaaatatggcctgaagcacctgacagaggagaagccagatggcctcatcaatgaggccaccaggagcatcaatggcctgggccagatcctggagacccagaggagcagcctgcagaagaagctgcagcacgtgcccggcacccagccccacctggaccagagcatcgtgaccatcacctttgaggtgcctggaaatgccaaggaggagcacctgaacatgttcatccagaacctgctgtgggagaagaatgtgaggaacaaggacaaccactgcatggaggtgatccggctgaagggcctggtgtccatcaaggacaagagccagcaggtgattgtgcagggcgtgcatgagctgtatgacctggaggagacccctgtgtcctggaaggatgacacagagaggaccaaccggctggtgctgattggaagaaacctggacaaggacatcctgaagcagctgttcatcgccaccgtgacagaaacagagaagcagtggaccacccacttcaaggaggaccaggtgtgcacctag

SEQ ID NO: 147948 - DNA, 987 bp, synthetic construct
  misc_feature 1..987: note = Description of Artificial Sequence: Synthetic coding sequence
  source 1..987: mol_type = other DNA
atgctgggcagcagagctgctggctttgcccggggcctgcgggctgtggccctggcctggctgcccggctggaggggccgcagctttgccctggcccgggctgctggggcccctcatggaggagacctgcagcccccagcctgcccagagccccggggccggcagctgagcctgtctgctgctgctgtggtggacagcgccccccggcccctgcagccctacctgcggctgatgaggctggacaagcccatcggcacctggctgctgtacctgccctgcacctggagcatcggcctggccgctgagcccggctgcttcccagactggtacatgctgagcctgtttggaactggagccatcctgatgagaggagctggctgcaccatcaatgacatgtgggaccaggactatgacaagaaggtgaccaggacagccaaccggcccatcgctgctggggacatcagcaccttccagagctttgtgttcctgggcggccagctgaccctggccctgggcgtgctgctgtgcctgaactactacagcatcgccctgggcgccggcagcctgctgctggtgatcacctaccccctgatgaagaggatctcctactggccccagctggccctgggcctgaccttcaactggggcgccctgctgggctggagcgccatcaagggcagctgtgaccccagcgtgtgcctgcccctgtacttctctggagtgatgtggaccctcatctatgacaccatctatgcccaccaggacaagagagatgatgtgctgattggcctgaagagcacagccctgcgctttggagagaacaccaagccctggctgagcggcttctctgtggccatgctgggcgccctgagcctggtgggcgtgaacagcggccagacagccccctactatgctgccctgggcgctgtgggcgcccacctgacccaccagaagtggggcctggagatcctgccccggctggtgtag

SEQ ID NO: 147949 - DNA, 1266 bp, synthetic construct
  misc_feature 1..1266: note = Description of Artificial Sequence: Synthetic coding sequence
  source 1..1266: mol_type = other DNA
atgacccccatcagccaggtgaggatgaggaaaggaagtgcccacacagctgcccagcccggccgcctgggcctgcaccctgctggggccacagcccacgcctgccggggcatgaccagcatccgggcccggcccggcctgaccagcgccatgctgggcagcagagctgctggctttgcccggggcctgcgggctgtggccctggcctggctgcccggctggaggggccgcagctttgccctggcccgggctgctggggcccctcatggaggagacctgcagcccccagcctgcccagagccccggggccggcagctgagcctgtctgctgctgctgtggtggacagcgccccccggcccctgcagccctacctgcggctgatgaggctggacaagcccatcggcacctggctgctgtacctgccctgcacctggagcatcggcctggccgctgagcccggctgcttcccagactggtacatgctgagcctgtttggaactggagccatcctgatgagaggagctggctgcaccatcaatgacatgtgggaccaggactatgacaagaaggtgaccaggacagccaaccggcccatcgctgctggggacatcagcaccttccagagctttgtgttcctgggcggccagctgaccctggccctgggcgtgctgctgtgcctgaactactacagcatcgccctgggcgccggcagcctgctgctggtgatcacctaccccctgatgaagaggatctcctactggccccagctggccctgggcctgaccttcaactggggcgccctgctgggctggagcgccatcaagggcagctgtgaccccagcgtgtgcctgcccctgtacttctctggagtgatgtggaccctcatctatgacaccatctatgcccaccaggacaagagagatgatgtgctgattggcctgaagagcacagccctgcgctttggagagaacaccaagccctggctgagcggcttctctgtggccatgctgggcgccctgagcctggtgggcgtgaacagcggccagacagccccctactatgctgccctgggcgctgtgggcgcccacctgacccaccagatctacaccctggacatccacaggcctgaggactgctggaacaagttcatcagcaacagaaccctgggcctcatcgtgttcctgggcatcgtgctgggcaacctgtggaaggagaagaagacagacaagaccaagaagggcatcgagaacaagattgagaactag

SEQ ID NO: 147950 - DNA, 1155 bp, synthetic construct
  misc_feature 1..1155: note = Description of Artificial Sequence: Synthetic coding sequence
  source 1..1155: mol_type = other DNA
atgaccagcatccgggcccggcccggcctgaccagcgccatgctgggcagcagagctgctggctttgcccggggcctgcgggctgtggccctggcctggctgcccggctggaggggccgcagctttgccctggcccgggccgccggggccccccacggcggggacctgcagcccccagcctgcccagagccccggggccggcagctgagcctgtctgctgctgctgtggtggacagcgccccccggcccctgcagccctacctgcggctgatgaggctggacaagcccatcggcacctggctgctgtacctgccctgcacctggagcatcggcctggccgctgagcccggctgcttcccagactggtacatgctgagcctgtttggcaccggggccatcctgatgagaggagctggctgcaccatcaatgacatgtgggaccaggactatgacaagaaggtgaccaggacagccaaccggcccatcgccgccggggacatcagcaccttccagagctttgtgttcctgggcggccagctgaccctggccctgggcgtgctgctgtgcctgaactactacagcatcgccctgggcgccggcagcctgctgctggtgatcacctaccccctgatgaagaggatctcctactggccccagctggccctgggcctgaccttcaactggggcgccctgctgggctggagcgccatcaagggcagctgtgaccccagcgtgtgcctgcccctgtacttcagcggcgtgatgtggaccctcatctatgacaccatctatgcccaccaggacaagagagatgatgtgctgattggcctgaagagcacagccctgcgctttggagagaacaccaagccctggctgagcggcttctctgtggccatgctgggcgccctgagcctggtgggcgtgaacagcggccagacagccccctactatgctgccctgggcgctgtgggcgcccacctgacccaccagatctacaccctggacatccacaggcctgaggactgctggaacaagttcatcagcaacagaaccctgggcctgattgtgttcctgggcatcgtgctgggcaacctgtggaaggagaagaagacagacaagaccaagaagggcatcgagaacaagattgaaaattag

SEQ ID NO: 147951 - DNA, 798 bp, synthetic construct
  misc_feature 1..798: note = Description of Artificial Sequence: Synthetic coding sequence
  source 1..798: mol_type = other DNA
atggccaccctgctgcggcctgtgctgcggcggctgtgtggcctgcccggcctgcagaggcctgctgctgagatgcccctgcgggcccggagtgatggagctggccccctgtacagccaccacctgcccaccagccccctgcagaagggcctgctggccgccggcagcgctgccatggccctgtacaacccctacagacatgacatggtggccgtgctgggggagaccaccggccacaggaccctgaaggtgctgcgggaccagatgaggcgggaccctgagggcgcccagatcctgcaggagcggccccgcatcagcaccagcaccctggacctgggcaagctgcagagcctgcctgagggcagcctgggccgggagtacctgcgcttcctggatgtgaacagagtgtccccagacacccgggcccccaccaggtttgtggatgatgaggagctggcctacgtgatccagcgctaccgggaggtgcatgacatgctgcacaccctgctgggcatgcccaccaacatcctgggggagatcgtggtgaagtggtttgaagctgtgcagacaggcctgcccatgtgcatcctgggcgccttcttcggccccatccggctgggcgcccagagcctgcaggtgctggtgtctgagctgatcccctgggccgtgcagaatggaagaagagccccctgtgtgctgaacctgtactatgaaagacgctgggagcagagcctgcgggccctgcgggaggagctgggcatcacagccccacccatgcacgtgcagggcctggcctag

SEQ ID NO: 147952 - DNA, 456 bp, synthetic construct
  misc_feature 1..456: note = Description of Artificial Sequence: Synthetic coding sequence
  source 1..456: mol_type = other DNA
atggccaccctgctgcggcctgtgctgcggcggctgtgtggcctgcccggcctgcagaggcctgctgctgagatgcccctgcgggcccggagtgatggagctggccccctgtacagccaccacctgcccaccagccccctgcagaagggcctgctggccgccggcagcgctgccatggccctgtacaacccctacagacatgacatggtggccgtgctgggggagaccaccggccacaggaccctgaaggtgctgcgggaccagatgaggcgggaccctgagggcgcccagatcctgcaggagcggccccgcatcagcaccagcaccctggacctgggcaagctgcagagcctgcctgagggcagcctgggccgggagtacctgcgcttcctggatgtgaatgtgtccttccagctgctgtgcatctggcagagcccagacagaacagaggagtag

SEQ ID NO: 147953 - DNA, 654 bp, synthetic construct
  misc_feature 1..654: note = Description of Artificial Sequence: Synthetic coding sequence
  source 1..654: mol_type = other DNA
atgagctgtgccggggctgctgctgccccccggctgtggaggctgcggcctggggcccggcgcagcctgagcgcctacggccgccgcacctctgtgcgcttccgcagcagcggcatgaccctggacaacatcagcagagctgctgtggaccgcatcatccgggtggaccacgccggggagtatggagccaaccgcatctatgccggccagatggctgtgctgggccgcacctctgtgggccctgtgatccagaagatgtgggaccaggagaaggaccacctgaagaagttcaatgagctgatggtgaccttccgggtgcggcccaccgtgctgatgcccctgtggaatgtgctgggctttgccctgggcgccggcacagccctgctgggcaaggagggcgccatggcctgcaccgtggccgtggaggagagcatcgcccaccactacaacaaccagatccgcaccctgatggaggaggaccctgagaagtatgaggagctgctgcagctgatcaagaagttcagagatgaggagctggagcaccacgacatcggcctggaccatgatgctgagctggccccagcctatgctgtgctgaagagcatcatccaggccggctgccgggtggccatctacctgtctgagcggctgtag

SEQ ID NO: 147954 - DNA, 540 bp, synthetic construct
  misc_feature 1..540: note = Description of Artificial Sequence: Synthetic coding sequence
  source 1..540: mol_type = other DNA
atgaccctggacaacatcagcagagctgctgtggaccgcatcatccgggtggaccacgccggggagtatggagccaaccgcatctatgccggccagatggctgtgctgggccgcacctctgtgggccctgtgatccagaagatgtgggaccaggagaaggaccacctgaagaagttcaatgagctgatggtgaccttccgggtgcggcccaccgtgctgatgcccctgtggaatgtgctgggctttgccctgggcgccggcacagccctgctgggcaaggagggcgccatggcctgcaccgtggccgtggaggagagcatcgcccaccactacaacaaccagatccgcaccctgatggaggaggaccctgagaagtatgaggagctgctgcagctgatcaagaagttcagagatgaggagctggagcaccacgacatcggcctggaccatgatgctgagctggccccagcctatgctgtgctgaagagcatcatccaggccggctgccgggtggccatctacctgtctgagcggctgtag

SEQ ID NO: 147955 - DNA, 957 bp, synthetic construct
  misc_feature 1..957: note = Description of Artificial Sequence: Synthetic coding sequence
  source 1..957: mol_type = other DNA
atggctgctgctgctgtgtctggggccctgggccgggccggctggaggctgctgcagctgcgctgcctgcctgtggcccgctgccggcaggccctggtgccccgggccttccacgccagcgctgtgggcctgcggagcagtgatgagcagaagcagcagccccccaacagcttcagccagcagcacagcgagacccagggcgctgagaagccagaccctgagagcagccacagccccccacgctacacagaccagggcggggaggaggaggaggactatgaaagtgaggagcagctgcagcaccgcatcctgacagctgccctggagtttgtgcctgcccacggctggacagctgaggccatcgccgagggcgcccagagcctgggcctgagcagcgctgctgcctccatgtttgggaaggatggcagcgagctgatcctgcactttgtgacccagtgcaacacccggctgaccagggtgctggaggaggagcagaagctggtgcagctgggccaggccgagaagaggaagacagaccagttcctgagagatgctgtggagacccggctgaggatgctgatcccctacatcgagcactggccccgggccctgagcatcctgatgctgccccacaacatccccagcagcctgagcctgctgacctccatggtggatgacatgtggcactacgccggggaccagagcacagacttcaactggtacacccggcgggccatgctggccgccatctacaacaccacagagctggtgatgatgcaggacagcagcccagactttgaggacacctggaggttcctggagaacagagtgaatgatgccatgaacatgggccacacagccaagcaggtgaagagcactggagaggccctggtgcagggcctgatgggcgctgctgtgaccctgaagaacctgaccggcctgaaccagaggaggtag

SEQ ID NO: 147956 - DNA, 1743 bp, synthetic construct
  misc_feature 1..1743: note = Description of Artificial Sequence: Synthetic coding sequence
  source 1..1743: mol_type = other DNA
atgtttgctggcctgcaggacctgggcgtggccaacggggaggacctgaaggagaccctgaccaactgcacagagcccctgaaggccatcgagcagttccagacagaaaatggagtgctgctgcccagcctgcagagcgccctgcccttcctggacctgcacggcaccccccggctggagttccaccagagcgtgtttgatgagctgcgggacaagctgctggagcgggtgtctgccatcgccagcgagggcaaggccgaggagcgctacaagaagctggaggacctgctggagaagagcttcagcctggtgaagatgcccagcctgcagcctgtggtgatgtgtgtgatgaagcacctgcccaaggtgcctgagaagaagctgaagctggtgatggctgacaaggagctgtaccgggcctgtgctgtggaggtgaagaggcagatctggcaggacaaccaggccctgtttggagatgaggtgagccccctgctgaagcagtacatcctggagaaggagagcgccctcttcagcacagagctgtctgtgctgcacaacttcttcagccccagccccaagacccggcggcagggcgaggtggtgcagaggctgaccaggatggtgggcaagaatgtgaagctgtatgacatggtgctgcagttcctgcggaccctcttcctgcggaccagaaatgtgcactactgcaccctgcgggcagagctgctgatgagcctgcatgacctggatgtgggggagatctgcaccgtggacccctgccacaagttcacctggtgcctggatgcctgcatccgggagagatttgtggacagcaagagggcccgggagctgcagggcttcctggatggagtgaagaagggccaggagcaggtgctgggggacctgtccatgatcctgtgtgacccctttgccatcaacaccctggccctgagcacagtgcgccacctgcaggagctggtgggccaggagaccctgccccgggacagcccagacctgctgctgctgctgcggctgctggccctgggccagggcgcctgggacatgattgacagccaggtgttcaaggagcccaagatggaggtggagctgatcacccgcttcctgcccatgctgatgtccttcctggtggatgactacaccttcaacgtggaccagaagctgcctgctgaggagaaggcccctgtgtcctaccccaacaccctgcctgagagcttcaccaagttcctgcaggagcagaggatggcctgtgaggtgggcctgtactacgtgctgcacatcaccaagcagaggaacaagaatgccctgctgcggctgctgcccggcctggtggagaccttcggggacctggcctttggagacatcttcctgcacctgctgaccggcaacctggccctgctggctgatgaatttgccctggaggacttctgcagcagcctgtttgatggcttcttcctgacagccagccccaggaaagaaaatgtgcacagacatgccctgcggctgctgatccacctgcacccccgggtggcccccagcaagctggaggccctgcagaaggccctggagcccaccggccagagcggggaggccgtgaaggagctgtacagccagctgggggagaagctggagcagctggaccacaggaagcccagccctgcccaggccgctgagaccccagccctggagctgcccctgcccagcgtgcctgccccagcccccctgtag

SEQ ID NO: 147957 - DNA, 501 bp, synthetic construct
  misc_feature 1..501: note = Description of Artificial Sequence: Synthetic coding sequence
  source 1..501: mol_type = other DNA
atggccagcggcgtgacagtgaatgatgaagtcatcaaggtgttcaatgacatgaaggtgaggaagagcagcacccaggaggagatcaagaagaggaagaaggctgtgctcttctgcctgagtgatgacaagaggcagatcatcgtggaggaggccaagcagatcctggtgggggacatcggggacacagtggaggacccctacaccagctttgtgaagctgctgcccctgaatgactgccgctatgccctgtatgatgccacctatgagaccaaggagagcaagaaggaggacctggtgttcatcttctgggcccctgagagcgcccccctgaagagcaagatgatctatgccagcagcaaggatgccatcaagaagaagttcaccggcatcaagcatgagtggcaggtgaatggcctggatgacatcaaggacaggagcaccctgggggagaagctgggcggcaatgtggtggtgtccctggagggcaagcccctgtag

SEQ ID NO: 147958 - DNA, 501 bp, synthetic construct; identical to SEQ ID NO: 147957
  misc_feature 1..501: note = Description of Artificial Sequence: Synthetic coding sequence
  source 1..501: mol_type = other DNA

SEQ ID NO: 147959 - DNA, 1722 bp, synthetic construct
  misc_feature 1..1722: note = Description of Artificial Sequence: Synthetic coding sequence
  source 1..1722: mol_type = other DNA
atgagaagatatgaccggggcctgaagaccctggagaacctgctggccagcatcagaaaaggaaatgccattgatgaagctgacatccccccacctgtggccatcggcaaaggacctgccagcacccccacctacagccctgcccccacccagcctgccccccgcatcgccagcgcccctgagccccgggtgaccctggagggccccagcgccacagccccagccagcagccctggcctggccaagccccagatgcctcctggcccctgcagccctggccccctggcccagctgcagagccggcagagggactacaagctggccgccctgcacgccaagcagcagcagctggccttcctggagggcaggaagaagcagctgctgcaggccgccctgcgggccaagcagaagaatgatgtggagggcgccaagatgcacctgcggcaggccaagggcctggagcccatgctggaggccagcagaaatggcctgcctgtggacatcaccaaggtgcccccagcccctgtgaacaaggatgactttgccctggtgcagaggcctggccctggcctgagccaggaggccgccaggagatatggagagctgaccaagctgatccggcagcagcacgagatgtgcctgaaccacagcaaccagttcacccagctgggcaacatcacagagaccaccaagtttgagaagctggccgaggactgcaagaggtccatggacatcctgaagcaggcctttgtgcggggcctgcccacccccacagccaggtttgagcagaggaccttcagcgtcatcaagatcttcccagacctgagcagcaatgacatgctgctcttcatcgtgaagggcatcaacctgcccaccccacctggcctgagccctggggacctggatgtgtttgtgcgctttgacttcccctacccaaatgtggaggaggcccagaaggacaagaccagcgtcatcaagaacacagacagccctgagttcaaggagcagttcaagctgtgcatcaacagaagccaccggggcttcagaagagccatccagaccaagggcatcaagtttgaggtggtgcacaagggcggcctcttcaagacagacagagtgctgggcacagcccagctgaagctggatgccctggagatcgcctgtgaggtgcgggagatcctggaggtgctggatggccggcggcccactggaggccgcctggaggtgatggtgcgcatccgggagcccctgacagcccagcagctggagaccaccacagagcgctggctggtgattgatcctgtgcctgctgctgtgcccaccgtggccggccccaagggcaaggcccctcctgtgcctgccccagcccgggagagcggcaacagaagtgcccggcccctgcacagcctgtctgtgctggcctttgaccaggagcggctggagaggaagatcctggccctgcggcaggcccggcggcctgtgcccccagaggtggcccagcagtaccaggacatcatgcagaggagccagtggcagagggcccagctggagcagggcggcgtgggcatccggcgggagtatgctgcccagctggagcggcagctgcagttctacacagaagctgcccggcggctgggcaatgatggcagcagagatgctgccaaggaggccctgtacagaagaaacctggtggagagcgagctgcagaggctgcggaggtag

SEQ ID NO: 147960 - DNA, 2856 bp, synthetic construct
  misc_feature 1..2856: note = Description of Artificial Sequence: Synthetic coding sequence
  source 1..2856: mol_type = other DNA
atgcacaagaggaaaggacctcctggccccccaggaagaggagctgctgctgcccggcagctgggcctgctggtggacctgagcccagatggcctgatgatcccagaagatggagccaatgatgaggagctggaggccgagttcctggccctggtgggcggccagcccccagccctggagaagctgaagggcaagggccccctgcccatggaggccatcgagaagatggccagcctgtgcatgagggaccctgatgaagatgaggaggagggcacagatgaagatgacctggaggctgatgatgacctgctggccgagctgaatgaggtgctgggggaggagcagaaggccagcgagaccccacctcctgtggcccagcccaagccagaggccccccaccctggcctggagaccaccctgcaggagcggctggccctgtaccagacagccattgaaagtgcccggcaggccggggacagcgccaagatgagaagatatgaccggggcctgaagaccctggagaacctgctggccagcatcagaaaaggaaatgccattgatgaagctgacatccccccacctgtggccatcggcaaaggacctgccagcacccccacctacagccctgcccccacccagcctgccccccgcatcgccagcgcccctgagccccgggtgaccctggagggccccagcgccacagccccagccagcagccctggcctggccaagccccagatgcctcctggcccctgcagccctggccccctggcccagctgcagagccggcagagggactacaagctggccgccctgcacgccaagcagcagggcgacaccacagctgctgcccggcacttccgggtggccaagagctttgatgctgtgctggaggccctgagcagaggagagcctgtggacctgagctgcctgcccccacctccagaccagctgcccccagacccccccagcccccccagccagccccccaccccagccacagcccccagcaccacagaggtgcccccaccacccaggaccctgctggaggccctggagcagaggatggagcgctaccaggtggccgccgcccaggccaagagcaaaggagaccagaggaaggccaggatgcatgaaagaattgtgaagcagtaccaggatgccatccgggcccacaaggccggccgggctgtggatgtggccgagctgcctgtgcccccaggcttcccccccatccagggcctggaggccaccaagcccacccagcagagcctggtgggcgtgctggagacagccatgaagctggccaaccaggatgagggcccagaagatgaggaggatgaggtgcccaagaagcagaacagccctgtggcccccacagcccagcccaaggccccacccagcaggaccccccagagcggcagcgcccccacagccaaggccccacccaaggccaccagcacccgggcccagcagcagctggccttcctggagggcaggaagaagcagctgctgcaggccgccctgcgggccaagcagaagaatgatgtggagggcgccaagatgcacctgcggcaggccaagggcctggagcccatgctggaggccagcagaaatggcctgcctgtggacatcaccaaggtgcccccagcccctgtgaacaaggatgactttgccctggtgcagaggcctggccctggcctgagccaggaggccgcccggcgctacggggagctgaccaagctgatccggcagcagcacgagatgtgcctgaaccacagcaaccagttcacccagctgggcaacatcacagagaccaccaagtttgagaagctggccgaggactgcaagaggtccatggacatcctgaagcaggcctttgtgcggggcctgcccacccccacagccaggtttgagcagaggaccttcagcgtcatcaagatcttcccagacctgagcagcaatgacatgctgctcttcatcgtgaagggcatcaacctgcccaccccacctggcctgagccctggggacctggatgtgtttgtgcgctttgacttcccctaccccaacgtggaggaggcccagaaggacaagaccagcgtcatcaagaacacagacagccctgagttcaaggagcagttcaagctgtgcatcaacagaagccaccggggcttccggcgggccatccagaccaagggcatcaagtttgaggtggtgcacaagggcggcctcttcaagacagacagagtgctgggcacagcccagctgaagctggatgccctggagatcgcctgtgaggtgcgggagatcctggaggtgctggatggaagaagacccaccggcggccgcctggaggtgatggtgcgcatccgggagcccctgacagcccagcagctggagaccaccacagagcgctggctggtgattgatcctgtgcctgctgctgtgcccacccaggtggccggccccaagggcaaggcccctcctgtgcctgccccagcccgggagagcggcaacagaagtgcccggcccctgcacagcctgtctgtgctggcctttgaccaggagcggctggagaggaagatcctggccctgcggcaggcccggcggcctgtgcccccagaggtggcccagcagtaccaggacatcatgcagaggagccagtggcagagggcccagctggagcagggcggcgtgggcatccggcgggagtatgctgcccagctggagcggcagctgcagttctacacagaagctgcccggcggctgggcaatgatggcagcagagatgctgccaaggaggccctgtacagaagaaacctggtggagagcgagctgcagaggctgcggaggtag

SEQ ID NO: 147961 - DNA, 711 bp, synthetic construct
  misc_feature 1..711: note = Description of Artificial Sequence: Synthetic coding sequence
  source 1..711: mol_type = other DNA
tggcacagcccagatggcctgatgatcccagaagatggagccaatgatgaggagctggaggccgagttcctggccctggtgggcggccagcccccagccctggagaagctgaagggcaagggccccctgcccatggaggccatcgagaagatggccagcctgtgcatgagggaccctgatgaagatgaggaggagggcacagatgaagatgacctggaggctgatgatgacctgctggccgagctgaatgaggtgctgggggaggagcagaaggccagcgagaccccacctcctgtggcccagcccaagccagaggccccccaccctggcctggagaccaccctgcaggagcggctggccctgtaccagacagccatcgagagcgcccggcaggccggggacagcgccaagatgagaagatatgaccggggcctgaagaccctggagaacctgctggccagcatcagaaaaggaaatgccattgatgaggccgacatccccccacctgtggccatcggcaagggccctgccagcacccccacctacagccctgcccccacccagcctgcccccagaattgccagcgcccctgagccccgggtgaccctggagggccccagcgccacagccccagccagcagccctggcctggccaagccccagatgcctcctggcccctgcagccctggccccctggcccagctgcagtag

SEQ ID NO: 147962 - DNA, 1116 bp, synthetic construct
  misc_feature 1..1116: note = Description of Artificial Sequence: Synthetic coding sequence
  source 1..1116: mol_type = other DNA
atgcctcctggcccctgcagccctggccccctggcccagctgcagagccggcagagggactacaagctggccgccctgcacgccaagcagcagggcgacaccacagctgctgcccggcacttccgggtggccaagagctttgatgctgtgctggaggccctgagcagaggagagcctgtggacctgagctgcctgcccccacctccagaccagctgcccccagacccccccagcccccccagccagccccccaccccagccacagcccccagcaccacagaggtgcccccaccacccaggaccctgctggaggccctggagcagaggatggagcgctaccaggtggccgccgcccaggccaagagcaaaggagaccagaggaaggccaggatgcatgaaagaattgtgaagcagtaccaggatgccatccgggcccacaaggccggccgggctgtggatgtggccgagctgcctgtgcccccaggcttcccccccatccagggcctggaggccaccaagcccacccagcagagcctggtgggcgtgctggagacagccatgaagctggccaaccaggatgagggcccagaagatgaggaggatgaggtgcccaagaagcagaacagccctgtggcccccacagcccagcccaaggccccacccagcaggaccccccagagcggcagcgcccccacagccaaggccccacccaaggccaccagcacccgggcccagcagcagctggccttcctggagggcaggaagaagcagctgctgcaggccgccctgcgggccaagcagaagaatgatgtggagggcgccaagatgcacctgcggcaggccaagggcctggagcccatgctggaggccagcagaaatggcctgcctgtggacatcaccaaggtgcccccagcccctgtgaacaaggatgactttgccctggtgcagaggcctggccctggcctgagccaggaggccgcccggcgctacggggagctgaccaagctgatccggcagcagcacgagatgtgcctgaaccacagcaaccagttcacccagctgggcaacatcacagagaccaccaaggccaacatggtgaagccctgcttctactag

SEQ ID NO: 147963 - DNA, 4539 bp, synthetic construct
  misc_feature 1..4539: note = Description of Artificial Sequence: Synthetic coding sequence
  source 1..4539: mol_type = other DNA
atggtgtctgagaagagccacctgggcaacccccaggagcctgtgcaggaggagcccaagacccggctgctgtccatgacagtgagaagaggccccaggagcctgccccccatccccagcaccagcaggacaggctttgctgagttctccatgaggggccgcatgagggagaagctgcaggccgcccggagcaaggccgagagcgccctgctgcaggagatccccaccccccggccccggcggctgcggagccccagcaagaaggagctggagacagaatttggaacagagcccgggaaggaggtggagaggacccagcaggaggtggacagccagagctacagccgggtgaagttccatgacagcgccaggaagatcaagcccaagccccaggtgcccccaggcttccccagcgctgaggaggcctacaacttcttcaccttcaactttgatcctgagcctgagggcagcgaggagaagcccaaggcccggcacagagctggcaccaaccaggaggaggaggagggggaggaggaggagcccccagcccagggcggcggcaaggagatggatgaggaggagctgctgaatggagatgatgctgaggacttcctgctgggcctggaccacgtggctgatgactttgtggccgtgcggcctgctgactatgagagcatccatgaccggctgcagatggagcgggagatgctgttcatccccagccggcagacagtgcccacctacaagaagctgcctgaaaatgtgcagccccgcttcctggaggatgagggcctgtacacaggagtgcggcctgaggtggcccggaccaaccagaacatcatggagaaccggctgctgatgcaggaccctgagcggcgctggtttggagatgatggccgcatcctggccctgcccaaccccatcaagcccttccccagcaggcctcctgtgctgacccaggagcagagcatcaaggccgagctggagaccctgtacaagaaggctgtgaagtatgtgcacagcagccagcacgtgatccgcagcggggaccccccaggcaacttccagctggacatcgacatcagcggcctcatcttcacccaccacccctgcttcagccgggagcacgtgctggccgccaagctggcccagctgtatgaccagtacctggcccggcaccagaggaacaaggccaagttcctgacagacaagctgcaggccctgagaaatgctgtgcagacaggcctggaccctgagaagccccaccagagcctggacaccatccagaagaccatcaatgagtacaagtctgagatccggcagaccaggaagttcagagatgctgagcaggagaaggacaggaccctgctgaagaccatcatcaaggtgtggaaggagatgaagagcctgcgggagttccagcgcttcaccaacacccccctgaagctggtgctgaggaaggagaaggctgaccagaaggcagatgaggaggcctatgaagctgagatccaggccgagatcagcgagctgctggaggagcacacagaggagtatgcccagaagatggaggagtaccgcaccagcctgcagcagtggaaggcctggaggaaggtgcagagggccaagaagaagaagaggaagcaggccgctgaggagcaccctggagatgaaattgctgagccctacccagaggaggacctggtgaagcccagccccccagagcccacagacagagctgtgattgagcaggaggtgcgggagagagctgcccagagcagaagaagaccctgggagcccaccctggtgcctgagctgagcctggccggctctgtgaccccaaatgaccagtgccccagggctgaggtgtcccggcgggaggatgtgaagaagaggtctgtgtacctgaaggtgctcttcaacaacaaggaggtgtccaggacagtgtcccggcccctgggcgctgacttccgggtgcacttcggccagatcttcaacctgcagatcgtgaactggccagagagcctgaccctgcaggtgtatgagaccgtgggccacagcagccccaccctgctggccgaggtgttcctgcccatccctgagaccaccgtggtgacaggccgggcccccacagaggaggtggagttcagcagcaaccagcacgtgaccctggaccatgaaggagtgggcagcggcgtgcccttctcctttgaagcagatggcagcaaccagctgaccctgatgaccagcggcaaggtgagccacagcgtggcctgggccatcggggagaatggcatccccctcatcccccccctgagccagcagaacatcggcttccgcagcgccctgaagaaggcagatgccatcagcagcatcggcaccagcggcctgacagacatgaagaagctggccaagtgggccgctgagagcaagctggaccccaatgaccccaacaatgcccccctgatgcagctgatctctgtggccaccagcggggagagctatgtgcctgacttcttccggctggagcagctgcagcaggagttcaactttgtgtctgaccaggagctgaacagaagcaagcgcttccggctgctgcacctgcggagccaggaggtgcctgagttcaggaactacaagcaggtgcctgtgtatgaccgggagatcatggagaaggtgttccaggactatgagaagaggctgcgggacagaaatgtcatcgagaccaaggagcacatcgacacccaccgggccatcgtggccaagtacctgcagcaggtgcgggagagcgtcatcaaccgcttcctgattgccaagcagtacttcctgctggccgacatgattgtggaggaggaggtgcccaacatcagcatcctgggcctgagcctcttcaagctggccgagcagaagaggcccctgcggcccaggaggaaaggaaggaagaaggtgacagcccagaacctgagtgatggagacatcaagctgctggtgaacatcgtgcgggcctatgacatccctgtgaggaagccagctgtgtccaagttccagcagcccagccgcagcagcaggatgttttctgagaagcatgctgccagccccagcacctacagccccacccacaatgctgactaccccctgggccaggtgctggtgcggccctttgtggaggtgtccttccagaggacagtgtgccacaccaccacagctgagggccccaaccccagctggaatgaggagctggagctgcccttccgggccccaaatggagactacagcacagccagcctgcagagcgtgaaggatgtggtgttcatcaacatctttgatgaggtgctgcatgatgtgctggaggatgaccgggagcggggcagcggcatccacaccagaattgagcggcactggctgggctgtgtgaagatgcccttcagcaccatctacttccaggccaggtttgagagccaggaggatgagaagctgctgcaggccacagagaagttccaggccgagtgtgccctgaagttccccaaccggcagtgcctgaccaccgtgattgacatcagcggcaagacagtgttcatcacccgctacctgaagcccctgaaccccccccaggagctgctgaatgtgtaccccaacaacctgcaggccacagctgagctggtggcccgctacgtgtccctcatccccttcctgcctgacacagtgtcctttggaggcatctgtgacctgtggagcaccagtgaccagttcctggacctgctggccggagatgaggaggagcacgctgtgctgctgtgcaactacttcctgagcctgggcaagaaggcctggctgctgatgggaaatgccatccctgagggccccacagcctacgtgctgacctgggagcagggccgctacctgatctggaacccctgcagcggccacttctacggccagtttgacaccttctgccccctgaagaatgtgggctgcctgattggccctgacaacatctggttcaacatccagagatatgagagccccctgcgcatcaactttgatgtgacccggcccaagctgtggaagagcttcttcagccgcagcctgccctacccaggcctgagctctgtgcagcctgaggagctgatctaccagaggagtgacaaggctgctgctgctgagctgcaggaccgcatcgagaagatcctgaaggagaagatcatggactggaggcccaggcacctgacccgctggaaccgctactgcaccagcaccctgcggcacttcctgcccctgctggagaagagccagggagaagatgtggaggatgaccacagagctgagctgctgaagcagctgggggactaccgcttcagcggcttccccctgcacatgccctacagcgaggtgaagcccctgattgatgctgtgtacagcactggagtgcacaacattgatgtgcccaacgtggagtttgccctggccgtgtacatccacccctaccccaagaatgtgctgtctgtgtggatctacgtggccagcctcatccggaacagatag

SEQ ID NO: 147964 - DNA, 4863 bp, synthetic construct
  misc_feature 1..4863: note = Description of Artificial Sequence: Synthetic coding sequence
  source 1..4863: mol_type = other DNA
atgaacccccgggaggagaaggtgaagatcatcacagaggagttcattgaaaatgatgaagatgctgacatgggccggcagaacaagaacagcaaggtgcggcggcagcccaggaagaagcagcccccaacagctgtgcccaaggagatggtgtctgagaagagccacctgggcaacccccaggagcctgtgcaggaggagcccaagacccggctgctgtccatgacagtgcggcggggccccaggagcctgccccccatccccagcaccagcaggactggatttgctgagttctccatgaggggccgcatgagggagaagctgcaggccgcccggagcaaggccgagagcgccctgctgcaggagatccccaccccccggccccggcggctgcggagccccagcaagaaggagctggagacagaatttggaacagagcccgggaaggaggtggagaggacccagcaggaggtggacagccagagctacagccgggtgaagttccatgattctgccaggaagatcaagcccaagccccaggtgcccccaggcttccccagcgctgaggaggcctacaacttcttcaccttcaactttgatcctgagcctgagggcagcgaggagaagcccaaggcccggcaccgggccggcaccaaccaggaggaggaggagggggaggaggaggagcccccagcccagggcggcggcaaggagatggatgaggaggagctgctgaatggagatgatgctgaggacttcctgctgggcctggaccacgtggctgatgactttgtggccgtgcggcctgctgactatgagagcatccatgaccggctgcagatggagcgggagatgctgttcatccccagccggcagacagtgcccacctacaagaagctgcctgaaaatgtgcagccccgcttcctggaggatgagggcctgtacacaggagtgcggcctgaggtggcccggaccaaccagaacatcatggagaaccggctgctgatgcaggaccctgagcggcgctggtttggagatgatggccgcatcctggccctgcccaaccccatcaagcccttccccagccggccccctgtgctgacccaggagcagagcatcaaggccgagctggagaccctgtacaagaaggctgtgaagtatgtgcacagcagccagcacgtgatccgcagcggggaccccccaggcaacttccagctggacatcgacatcagcggcctcatcttcacccaccacccctgcttcagccgggagcacgtgctggccgccaagctggcccagctgtatgaccagtacctggcccggcaccagaggaacaaggccaagttcctgacagacaagctgcaggccctgagaaatgctgtgcagacaggcctggaccctgagaagccccaccagagcctggacaccatccagaagaccatcaatgagtacaagtctgagatccggcagaccaggaagttcagagatgctgagcaggagaaggacaggaccctgctgaagaccatcatcaaggtgtggaaggagatgaagagcctgcgggagttccagcgcttcaccaacacccccctgaagctggtgctgaggaaggagaaggctgaccagaaggcagatgaggaggcctatgaggccgagatccaggccgagatcagcgagctgctggaggagcacacagaggagtatgcccagaagatggaggagtaccgcaccagcctgcagcagtggaaggcctggaggaaggtgcagagggccaagaagaagaagaggaagcaggccgctgaggagcaccctggagatgaaattgctgagccctacccagaggaggacctggtgaagcccagccccccagagcccacagaccgggccgtcatcgagcaggaggtgcgggagcgggccgcccagagcagaagaagaccctgggagcccaccctggtgcctgagctgagcctggccggctctgtgaccccaaatgaccagtgccccagggctgaggtgtccagaagagaagatgtgaagaagaggtctgtgtacctgaaggtgctcttcaacaacaaggaggtgtccaggacagtgtcccggcccctgggcgctgacttccgggtgcacttcggccagatcttcaacctgcagatcgtgaactggccagagagcctgaccctgcaggtgtatgaaacagtgggccacagcagccccaccctgctggccgaggtgttcctgcccatccctgagaccaccgtggtgacaggccgggcccccacagaggaggtggagttcagcagcaaccagcacgtgaccctggaccacgagggcgtgggcagcggcgtgcccttctcctttgaagcagatggcagcaaccagctgaccctgatgaccagcggcaaggtgagccacagcgtggcctgggccatcggagaaaatggcatccccctcatcccccccctgagccagcagaacatcggcttccgcagcgccctgaagaaggcagatgccatcagcagcatcggcaccagcggcctgacagacatgaagaagctggccaagtgggccgctgagagcaagctggaccccaatgaccccaacaatgcccccctgatgcagctgatctctgtggccaccagcggggagagctatgtgcctgacttcttccggctggagcagctgcagcaggagttcaactttgtgtctgaccaggagctgaacagaagcaagcgcttccggctgctgcacctgcggagccaggaggtgcctgagttcaggaactacaagcaggtgcctgtgtatgaccgggagatcatggagaaggtgttccaggactatgagaagaggctgcgggacagaaatgtgattgagaccaaggagcacatcgacacccaccgggccatcgtggccaagtacctgcagcaggtgcgggagagcgtcatcaaccgcttcctgattgccaagcagtacttcctgctggccgacatgattgtggaggaggaggtgcccaacatcagcatcctgggcctgagcctcttcaagctggccgagcagaagaggcccctgcggcccaggaggaagggcaggaagaaggtgacagcccagaacctgagtgatggagacatcaagctgctggtgaacatcgtgcgggcctatgacatccctgtgaggaagccagctgtgtccaagttccagcagcccagccgcagcagcaggatgttcagcgagaagcacgccgccagccccagcacctacagccccacccacaatgctgactaccccctgggccaggtgctggtgcggccctttgtggaggtgtccttccagaggacagtgtgccacaccaccacagctgagggccccaaccccagctggaatgaggagctggagctgcccttccgggcccccaacggggactacagcacagccagcctgcagagcgtgaaggatgtggtgttcatcaacatctttgatgaggtgctgcatgatgtgctggaggatgaccgggagcggggcagcggcatccacacccgcatcgagcggcactggctgggctgtgtgaagatgcccttcagcaccatctacttccaggccagaattgatggcaccttcaagattgacatcccccctgtgctgctgggctacagcaaggagaggaacatgatcctggagcggggctttgacagcgtgcgcagcctgtctgagggcagctacatcaccctcttcatcaccatcgagccccagctggtgcctggagagagcatccgggagaagtttgagagccaggaggatgagaagctgctgcaggccacagagaagttccaggccgagtgtgccctgaagttccccaaccggcagtgcctgaccaccgtgattgacatcagcggcaagacagtgttcatcacccgctacctgaagcccctgaaccccccccaggagctgctgaatgtgtaccccaacaacctgcaggccacagctgagctggtggcccgctacgtgtccctcatccccttcctgcctgacacagtgtcctttggaggcatctgtgacctgtggagcaccagtgaccagttcctggacctgctggccggagatgaggaggagcacgctgtgctgctgtgcaactacttcctgagcctgggcaagaaggcctggctgctgatgggaaatgccatccctgagggccccacagcctacgtgctgacctgggagcagggccgctacctgatctggaacccctgcagcggccacttctacggccagtttgacaccttctgccccctgaagaatgtgggctgcctgattggccctgacaacatctggttcaacatccagagatatgagagccccctgcgcatcaactttgatgtgacccggcccaagctgtggaagagcttcttcagccgcagcctgccctacccaggcctgagctctgtgcagcctgaggagctgatctaccagaggagtgacaaggctgctgctgctgagctgcaggaccgcatcgagaagatcctgaaggagaagatcatggactggaggcccaggcacctgacccgctggaaccgctactgcaccagcaccctgcggcacttcctgcccctgctggagaagagccagggagaagatgtggaggatgaccacagagctgagctgctgaagcagctgggggactaccgcttcagcggcttccccctgcacatgccctacagcgaggtgaagcccctgattgatgctgtgtacagcactggagtgcacaacattgatgtgcccaacgtggagtttgccctggccgtgtacatccacccctaccccaagaatgtgctgtctgtgtggatctacgtggccagcctcatccggaacagatag

SEQ ID NO: 147965 - DNA, 4863 bp, synthetic construct; identical to SEQ ID NO: 147964
  misc_feature 1..4863: note = Description of Artificial Sequence: Synthetic coding sequence
  source 1..4863: mol_type = other DNA

SEQ ID NO: 147966 - DNA, 4539 bp, synthetic construct; identical to SEQ ID NO: 147963
  misc_feature 1..4539: note = Description of Artificial Sequence: Synthetic coding sequence
  source 1..4539: mol_type = other DNA

SEQ ID NO: 147967 - DNA, 369 bp, synthetic construct
  misc_feature 1..369: note = Description of Artificial Sequence: Synthetic coding sequence
  source 1..369: mol_type = other DNA
atgaacccccgggaggagaaggtgaagatcatcacagaggagttcattgaaaatgatgaagatgctgacatgggccggcagaacaagaacagcaaggtgcggcggcagcccaggaagaagcagaagcccacccccttcagccgggcctgctggcagatcctgccccacctgtctgctggggtgcccctgctgggctgggagcaccctgtgcagggcaagagcttccaggccaccaactgctgcccccagggcaatggagtgaggaagatccccccctggcagcccccaggggcctgtgccggcggggcccaggaccccccaccagaatatgacagccctgagcggcccacagagcgggccggctgctag

SEQ ID NO: 147968 - DNA, 4863 bp, synthetic construct; identical to SEQ ID NO: 147964
  misc_feature 1..4863: note = Description of Artificial Sequence: Synthetic coding sequence
  source 1..4863: mol_type = other DNA

SEQ ID NO: 147969 - DNA, 369 bp, synthetic construct; identical to SEQ ID NO: 147967
  misc_feature 1..369: note = Description of Artificial Sequence: Synthetic coding sequence
  source 1..369: mol_type = other DNA

SEQ ID NO: 147970 - DNA, 4539 bp, synthetic construct; identical to SEQ ID NO: 147963
  misc_feature 1..4539: note = Description of Artificial Sequence: Synthetic coding sequence
  source 1..4539: mol_type = other DNA

SEQ ID NO: 147971 - DNA, 369 bp, synthetic construct; identical to SEQ ID NO: 147967
  misc_feature 1..369: note = Description of Artificial Sequence: Synthetic coding sequence
  source 1..369: mol_type = other DNA

SEQ ID NO: 147972 - DNA, 1767 bp, synthetic construct
  misc_feature 1..1767: note = Description of Artificial Sequence: Synthetic coding sequence
  source 1..1767: mol_type = other DNA
atgaacccccgggaggagaaggtgaagatcatcacagaggagttcattgaaaatgatgaagatgctgacatgggccggcagaacaagaacagcaaggtgcggcggcagcccaggaagaagcagcccccaacagctgtgcccaaggagatggtgtctgagaagagccacctgggcaacccccaggagcctgtgcaggaggagcccaagacccggctgctgtccatgacagtgcggcggggccccaggagcctgccccccatccccagcaccagcaggactggatttgctgagttctccatgaggggccgcatgagggagaagctgcaggccgcccggagcaaggccgagagcgccctgctgcaggagatccccaccccccggccccggcggctgcggagccccagcaagaaggagctggagacagaatttggaacagagcccgggaaggaggtggagaggacccagcaggaggtggacagccagagctacagccgggtgaagttccatgattctgccaggaagatcaagcccaagccccaggtgcccccaggcttccccagcgctgaggaggcctacaacttcttcaccttcaactttgatcctgagcctgagggcagcgaggagaagcccaaggcccggcaccgggccggcaccaaccaggaggaggaggagggggaggaggaggagcccccagcccagggcggcggcaaggagatggatgaggaggagctgctgaatggagatgatgctgaggacttcctgctgggcctggaccacgtggctgatgactttgtggccgtgcggcctgctgactatgagagcatccatgaccggctgcagatggagcgggagatgctgttcatccccagccggcagacagtgcccacctacaagaagctgcctgaaaatgtgcagccccgcttcctggaggatgagggcctgtacacaggagtgcggcctgaggtggcccggaccaaccagaacatcatggagaaccggctgctgatgcaggaccctgagcggcgctggtttggagatgatggccgcatcctggccctgcccaaccccatcaagcccttccccagccggccccctgtgctgacccaggagcagagcatcaaggccgagctggagaccctgtacaagaaggctgtgaagtatgtgcacagcagccagcacgtgatccgcagcggggaccccccaggcaacttccagctggacatcgacatcagcggcctcatcttcacccaccacccctgcttcagccgggagcacgtgctggccgccaagctggcccagctgtatgaccagtacctggcccggcaccagaggaacaaggccaagttcctgacagacaagctgcaggccctgagaaatgctgtgcagacaggcctggaccctgagaagccccaccagagcctggacaccatccagaagaccatcaatgagtacaagtctgagatccggcagaccaggaagttcagagatgctgagcaggagaaggacaggaccctgctgaagaccatcatcaaggtgtggaaggagatgaagagcctgcgggagttccagcgcttcaccaacacccccctgaagctggtgctgaggaaggagaaggctgaccagaaggcagatgaggaggcctatgaggccgagatccaggccgagatcagcgagctgctggaggagcacacagaggagtatgcccagaagatggaggagtaccgcaccagcctgcagcagtggaaggcctggaggaaggtgcagtag

SEQ ID NO: 147973 - DNA, 336 bp, synthetic construct
  misc_feature 1..336: note = Description of Artificial Sequence: Synthetic coding sequence
  source 1..336: mol_type = other DNA
atgaacccccgggaggagaaggtgaagatcatcacagaggagttcattgaaaatgatgaagatgctgacatgggccggcagaacaagaacagcaaggtgcggcggcagcccaggaagaagcagcccccaacagctgtgcccaaggagatggtgtctgagaagagccacctgggcaacccccaggagcctgtgcaggaggagcccaagacccggctgctgtccatgacagtgcggcggggcccccggcgggagctggtggtgaagaagagcctgggccggcccggcaccgtgacccacgtgtgcaaccccagcaccctggagggccggggcggctag

SEQ ID NO: 147974 - DNA, 882 bp, synthetic construct
  misc_feature 1..882: note = Description of Artificial Sequence: Synthetic coding sequence
  source 1..882: mol_type = other DNA
atggccctggtgtctgctgacagcagaattgctgagctgctgacagagctgcaccagctgatcaagcagacccaggaggagaggagccgctctgagcacaacctggtgaacatccagaagacccatgagaggatgcagacagagaacaagatcagcccctactaccgcaccaagctgcggggcctgtacaccacagccaaggcagatgctgaggccgagtgcaacatcctgaggaaggccctggacaagattgctgagatcaagagcctgctggaggagaggagaattgctgccaagattgctggcctgtacaatgattctgagccccccaggaagaccatgagaagaggagtgctgatgaccctgctgcagcagagcgccatgaccctgcccctgtggattggcaagccaggggacaagcccccacccctgtgtggggccatcccagccagcggggactatgtggcccggcctggggacaaggtggccgcccgggtgaaggctgtggatggagatgagcagtggatcctggccgaggtggtgtcctacagccacgccaccaacaagtatgaggtggatgacattgatgaggagggcaaggagcggcacaccctgagcagaagaagagtcatccccctgccccagtggaaggccaaccctgagacagatcctgaggccctcttccagaaggagcagctggtgctggccctgtacccccagaccacctgcttctaccgggccctgatccacgccccaccccagaggccccaggatgactacagcgtgctgtttgaggacaccagctatgcagatggctacagcccccccctgaatgtggcccagagatatgtggtggcctgcaaggagcccaagaagaagtag

SEQ ID NO: 147975 - DNA, 843 bp, synthetic construct
  misc_feature 1..843: note = Description of Artificial Sequence: Synthetic coding sequence
  source 1..843: mol_type = other DNA
atgaatgacaggagcagcagaagaaggaccatgaaggatgatgagacctttgagatcagcatcccctttgatgaggccccccacctggacccccagatcttctacagcctgagccccagcagaagaaactttgaggagcccccagaggccgccagcagcgccctggccctgatgaacagcgtgaagacccagctgcacatggccctggagagaaattcctggctgcagaagagaattgaggacctggaggaggagcgggacttcctgcgctgccagctggacaagttcatcagcagcgccaggatggaggccgaggaccactgcaggatgaagccaggccccaggaggatggagggggacagcagaggaggagctggaggagaggccagtgaccctgagagcgctgccagcagcctgagcggggccagcgaggagggcagcgccagcgagcggcggcggcagaagcagaagggcggggccagcagaagaagatttgggaagcccaaggcccgggagcggcagagggtgaaggatgctgatggagtgctgtgccgctacaagaagatcctgggcaccttccagaagctgaagtccatgagccgggcctttgagcaccaccgggtggacaggaacacagtggccctgaccacccccatcgccgagctgctgattgtggcccctgagaagctggccgaggtgggggagtttgaccccagcaaggagcggctgctggagtacagccgccgctgcttcctggccctggatgatgagaccctgaagaaggtgcaggccctgaagaagagcaagctgctgctgcccatcacctaccgcttcaagaggtag

SEQ ID NO: 147976 - DNA, 495 bp, synthetic construct
  misc_feature 1..495: note = Description of Artificial Sequence: Synthetic coding sequence
  source 1..495: mol_type = other DNA
atgatgctgacccaggcccccagctctgtggtgcgcagcaggaacagcaggaaccacacagtgaacagcggcggcagctgcctgagcgccagcacagtggccatcccagccatcaatgacagcagcgctgccatgtctgcctgcagcaccatcagcgcccagcctgccagctccatggacacccagatgcacagccccaagaagcaggagcgggtgaacaagagggtcatctggggcatcgaggtggccgaggagctgcactggaagggctgggagctgggcaaggagaccaccaggaacctggtgctgaagaacagaagcctgaagctgcagaagatgaagtaccgctaccagtacaagggcagcaggacccagtgccacagcctggagcccaggaagcaggccctcttcaagaccaagcagaacaagcagaagaagcccctgacctgccacatcaaggccagcgagtgcctgaagtatgtgcagtatgaatag

SEQ ID NO: 147977 - DNA, 495 bp, synthetic construct; identical to SEQ ID NO: 147976
  misc_feature 1..495: note = Description of Artificial Sequence: Synthetic coding sequence
  source 1..495: mol_type = other DNA

SEQ ID NO: 147978 - DNA, 5778 bp, synthetic construct
  misc_feature 1..5778: note = Description of Artificial Sequence: Synthetic coding sequence
  source 1..5778: mol_type = other DNA
atgttcaccctgaccggctgccgcctggtggagaagacccagaaggtggagaaccccagcgtgtcctttgccagcagcttccccctcatccccctgctgctgcggggcaagtctgtgcagaagaagcaggccgagagcaagagccagatcaagctgcacacccagagcgcccccttcggcctgtgccccaaggacatgatgctgacccaggcccccagctctgtggtgcgcagcaggaacagcaggaaccacacagtgaacagcggcggcagctgcctgagcgccagcacagtggccatcccagccatcaatgacagcagcgctgccatgtctgcctgcagcaccatcagcgcccagcctgccagctccatggacacccagatgcacagccccaagaagcaggagcgggtgaacaagagggtcatctggggcatcgaggtggccgaggagctgcactggaagggctgggagctgggcaaggagaccaccaggaacctggtgctgaagaacagaagcctgaagctgcagaagatgaagtaccggccccccaagaccaagttcttcttcaccgtcatcccccagcccatcttcctgagccctggcatcaccctgaccctgcccatcgtgttccggcccctggaggccaaggagtacatggaccagctgtggtttgagaaggccgagggcatgttctgtgtgggcctgcgggccaccctgccctgccacaggctcatctgccggccccccagcctgcagctgcccatgtgtgctgtgggggacaccacagaggccttcttctgcctggacaacgtgggggacctgcccaccttcttcacctgggagttcagcagccccttccagatgctgcctgccaccggcctgctggagcccggccaggccagccagatcaaggtgaccttccagcccctgacagctgtgatctatgaggtgcaggccacctgctggtatggagctggcagccggcagaggagcagcatccagctgcaggccgtggccaagtgtgcccagctgctggtgtccatcaagcacaagtgcccagaggaccaggatgctgagggcttccagaagctgctgtactttggatctgtggccgtgggctgcaccagcgagcggcagatccggctgcacaaccccagcgctgtgaatgcccccttccgcatcgagatcagcccagatgagctggccgaggaccaggccttcagctgccccacagcccatggaattgtgctgcccggggagaagaagtgtgtgtctgtgttcttccaccccaagaccctggacaccaggacagtggactactgcagcatcatgcccagcggctgtgccagcaagaccctgctgaaggtggtgggcttctgccggggccctgctgtgtccctgcagcactactgtgtgaacttctcctgggtgaacctgggggagaggtctgagcagcccctgtggattgagaaccagagcgactgcacagcccacttccagtttgccatcgactgcctggagagcgtcttcaccatccggcctgccttcggcaccctggtgggcaaggccaggatgaccctgcactgtgccttccagcccacccaccccatcatctgcttcagaagagtggcctgcctgatccaccaccaggaccccctcttcctggacctgatgggcacctgccacagcgacagcaccaagccagccatcctgaagccccagcacctgacctggtaccgcacccacctggcccggggcctgaccctgtaccccccagacatcctggatgccatgctgaaggagaagaagctggcccaggaccagaatggagccctgatgatccccatccaggacctggaggacatgcctgccccccagtacccctacatcccccccatgacagagttcttctttgatggcaccagtgacatcaccatcttccccccacccatctctgtggagcctgtggaggtggactttggagcctgccccggccctgaggcccccaaccctgtgcccctgtgcctgatgaaccacaccaagggcaagatcatggtggtgtggacccggcggagtgactgccccttctgggtgaccccagagagctgtgatgtgccccccctgaagtccatggccatgaggctgcacttccagcccccccaccccaactgcctgtacacagtggagctggaggcctttgccatctacaaggtgctgcagagctacagcaacatcgaggaggactgcaccatgtgccccagctggtgcctgactgtgcgggcccggggccacagctactttgctggctttgagcaccacatcccccagtacagcctggatgtgcccaagctgtttcctgctgtgagcagcggggagcccacctaccgcagcctgctgctggtgaacaaggactgcaagctgctgaccttcagcctggccccccagaggggcagtgatgtgatcctgcggcccaccagcggcctggtggcccctggggcccaccagatcatcctgatctgcacctacccagagggcagctcctggaagcagcacaccttctacctgcagtgcaatgccagcccccagtacctgaaggaggtgtccatgtacagccgggaggagcccctgcagctgaagctggacacccacaagagcctgtacttcaagcccacctgggtgggctgcagcagcaccagccccttcaccttcaggaaccccagccggctgcccctgcagtttgagtggagggtgtctgagcagcacaggaagctgctggccgtgcagcccagccggggcctcatccagcccaatgaaaggctgaccctgacctggaccttcagccccctggaggagaccaagtacctgttccaggtgggcatgtgggtgtgggaggccggcctgagccccaatgccaacccagctgccaccacccactacatgctgcggctggtgggcgtgggcctgaccagcagcctgagcgccaaggagaaggagctggcctttggaaatgtgctggtgaacagcaagcagagccgcttcctggtgctgctgaatgatggcaactgcaccctgtactaccgcctgtacctggagcagggcagccctgaggccgtggacaaccaccccctggccctgcagctggacagaacagagggctccatgccacccaggagccaggacaccatctgcctgacagcctgccccaagcagaggagccagtacagctggaccatcacctacagcctgctgagccaccgggacaacaaggccggggagaagcaggagctgtgctgcgtgtccctggtggccgtgtaccccctgctgagcatcctggatgtgtcctccatgggcagcgctgagggcatcaccaggaagcacctgtggaggctcttcagcctggacctgctgaacagctacctggagcgggaccccaccccctgtgagctgacctacaaggtgcccaccaggcacagcatgagccagatcccccctgtgctgacccccctgcggctggacttcaactttggagctgcccccttcaaggcccctccttctgtggtgttcctggccctgaagaacagcggcgtggtgtccctggactgggccttcctgctgcccagcgaccagagaattgatgtggagctgtgggccgagcaggccgagctgaacagcacagagctgcaccagatgagggtgcaggacaactgcctcttcagcatcagccccaaggccggcagcctgagccctggccaggagcagatggtggagctgaagtacagccacctgttcatcggcacagaccacctgcctgtgctcttcaaggtgagccacggccgggagatcctgctgaacttcatcggcgtgacagtgaagccagagcagaagtatgtgcacttcaccagcaccacccaccagttcatccccatccccatcggggacaccctgcccccccggcagatctatgagctgtacaatggaggctctgtgcctgtgacctatgaggtgcagacagatgtgctgagccaggtgcaggagaagaactttgaccaccccatcttctgctgcctgaaccccaagggggagatccagcccggcagcacagcccgggtgctgtggatcttcagccccatcgaggccaagacctacacagtggatgtgcccatccacatcctgggctggaacagcgccctgatccacttccagggcgtgggctacaacccccacatgatgggagacacagcccccttccacaacatcagctcctgggacaacagcagcatccacagccggctggtggtgcccggccagaatgtgttcctgagccagagccacatcagcctgggcaacatccctgtgcagagcaagtgcagccggctgctcttcctgaacaacatcagcaagaatgaggagatcgccttctcctggcagcccagccccctggactttggagaggtgtctgtgagccccatgattggagtggtggcccctgaggagaccgtgccctttgtggtgaccctgcgggcctctgtgcacgccagcttctacagcgctgacctggtgtgcaagctgtacagccagcagctgatgaggcagtaccacaaggagctgcaggagtggaaggatgagaaggtgcggcaggaggtggagttcaccatcacagacatgaaggtgaagaagaggacctgctgcacagcctgtgagcccgccaggaagtacaagaccctgccccccatcaagaaccagcagagcgtgtccaggcctgcctcctggaagctgcagacccccaaggaggaggtgtcctggccctgcccccagccccccagccctggcatgctgtgcctgggcctgacagcccgggcccacgccacagactacttcctggccaacttcttcagcgagttcccctgccacttcctgcaccgggagctgcccaagaggaaggccccccgggaggagagcgagaccagcgaggagaagagccccaacaagtggggccctgtgtccaagcagaagaagcagctgctggtggacatcctgaccaccatcatccggggcctgctggaggacaagaacttccatgaagctgtggaccagagcctggtggagcaggtgccctacttccggcagttctggaatgagcagagcaccaagttcatggaccagaagaacagcctgtacctgatgcccatcctgcctgtgcccagcagctcctgggaggatggcaagggcaagcagcccaaggaggacaggcctgagcactacccaggcctgggcaagaaggaggagggggaggaggagaagggggaggaggaggaggaggagctggaggaggaggaggaggaggaggaggagacagaggaggaggagctgggcaaggaggagattgaggagaaggaggaggagagagatgagaaggaggagaaggtgtcctgggccggcatcggccccaccccccagcctgagagccaggagagcatgcagtggcagtggcagcagcagctgaatgtgatggtgaaggaggagcaggagcaggatgagaaggaggccatccggcggctgcctgcctttgccaacctgcaggaggccctgctggagaacatgatccagaacatcctggtggaggccagcagaggagaggtggtgctgaccagccggccccgggtgattgccctgccccccttctgtgtgcccaggagcctgaccccagacaccctgctgcccacccagcaggccgaggtgctgcaccctgtggtgcccctgcccacagacctgccctag

SEQ ID NO: 147979 - DNA, 2190 bp, synthetic construct
  misc_feature 1..2190: note = Description of Artificial Sequence: Synthetic coding sequence
  source 1..2190: mol_type = other DNA
atgctgacccaggcccccagctctgtggtgcgcagcaggaacagcaggaaccacacagtgaacagcggcggcagctgcctgagcgccagcacagtggccatcccagccatcaatgacagcagcgctgccatgtctgcctgcagcaccatcagcgcccagcctgccagctccatggacacccagatgcacagccccaagaagcaggagcgggtgaacaagagggtcatctggggcatcgaggtggccgaggagctgcactggaagggctgggagctgggcaaggagaccaccaggaacctggtgctgaagaacagaagcctgaagctgcagaagatgaagtaccggccccccaagaccaagttcttcttcaccgtcatcccccagcccatcttcctgagccctggcatcaccctgaccctgcccatcgtgttccggcccctggaggccaaggagtacatggaccagctgtggtttgagaaggccgagggcatgttctgtgtgggcctgcgggccaccctgccctgccacaggctcatctgccggccccccagcctgcagctgcccatgtgtgctgtgggggacaccacagaggccttcttctgcctggacaacgtgggggacctgcccaccttcttcacctgggagttcagcagccccttccagatgctgcctgccaccggcctgctggagcccggccaggccagccagatcaaggtgaccttccagcccctgacagctgtgatctatgaggtgcaggccacctgctggtatggagctggcagccggcagaggagcagcatccagctgcaggccgtggccaagtgtgcccagctgctggtgtccatcaagcacaagtgcccagaggaccaggatgctgagggcttccagaagctgctgtactttggatctgtggccgtgggctgcaccagcgagcggcagatccggctgcacaaccccagcgctgtgaatgcccccttccgcatcgagatcagcccagatgagctggccgaggaccaggccttcagctgccccacagcccatggaattgtgctgcccggggagaagaagtgtgtgtctgtgttcttccaccccaagaccctggacaccaggacagtggactactgcagcatcatgcccagcggctgtgccagcaagaccctgctgaaggtggtgggcttctgccggggccctgctgtgtccctgcagcactactgtgtgaacttctcctgggtgaacctgggggagaggtctgagcagcccctgtggattgagaaccagagcgactgcacagcccacttccagtttgccatcgactgcctggagagcgtcttcaccatccggcctgccttcggcaccctggtgggcaaggccaggatgaccctgcactgtgccttccagcccacccaccccatcatctgcttcagaagagtggcctgcctgatccaccaccaggaccccctcttcctggacctgatgggcacctgccacagcgacagcaccaagccagccatcctgaagccccagcacctgacctggtaccgcacccacctggcccggggcctgaccctgtaccccccagacatcctggatgccatgctgaaggagaagaagctggcccaggaccagaatggagccctgatgatccccatccaggacctggaggacatgcctgccccccagtacccctacatcccccccatgacagagttcttctttgatggcaccagtgacatcaccatcttccccccacccatctctgtggagcctgtggaggtggactttggagcctgccccggccctgaggcccccaaccctgtgcccctgtgcctgatgaaccacaccaagggcaagatcatggtggtgtggacccggcggagtgactgccccttctgggtgaccccagagagctgtgatgtgccccccctgaagtccatggccatgaggctgcacttccagcccccccaccccaactgcctgtacacagtggagctggaggcctttgccatctacaaggtgtgtgccagaaatgaaagagaggagtgtggggtgtctgcccggagcctgagcggcctggtgggctggcaggaggtgacagagggcagcttccggctgcaccccctgcgggcccggctgagcctgggctggacagtgacccccatgagcctgagcccccccaagctgctggcctag

SEQ ID NO: 147980 - DNA, 5778 bp, synthetic construct; identical to SEQ ID NO: 147978
  misc_feature 1..5778: note = Description of Artificial Sequence: Synthetic coding sequence
  source 1..5778: mol_type = other DNA

SEQ ID NO: 147981 - DNA, 5778 bp, synthetic construct; identical to SEQ ID NO: 147978
  misc_feature 1..5778: note = Description of Artificial Sequence: Synthetic coding sequence
  source 1..5778: mol_type = other DNA

SEQ ID NO: 147982 - DNA, 816 bp, synthetic construct
  misc_feature 1..816: note = Description of Artificial Sequence: Synthetic coding sequence
  source 1..816: mol_type = other DNA
atgaccctgcactgtgccttccagcccacccaccccatcatctgcttcagaagagtggcctgcctgatccaccaccaggaccccctcttcctggacctgatgggcacctgccacagcgacagcaccaagccagccatcctgaagccccagcacctgacctggtaccgcacccacctggcccggggcctgaccctgtaccccccagacatcctggatgccatgctgaaggagaagaagctggcccaggaccagaatggagccctgatgatccccatccaggacctggaggacatgcctgccccccagtacccctacatcccccccatgacagagttcttctttgatggcaccagtgacatcaccatcttccccccacccatctctgtggagcctgtggaggtggactttggagcctgccccggccctgaggcccccaaccctgtgcccctgtgcctgatgaaccacaccaagggcaagatcatggtggtgtggacccggcggagtgactgccccttctgggtgaccccagagagctgtgatgtgccccccctgaagtccatggccatgaggctgcacttccagcccccccaccccaactgcctgtacacagtggagctggaggcctttgccatctacaaggtgtgtgccagaaatgaaagagaggagtgtggggtgtctgcccggagcctgagcggcctggtgggctggcaggaggtgacagagggcagcttccggctgcaccccctgcgggcccggctgagcctgggctggacagtgacccccatgagcctgagcccccccaagctgctggcctag

SEQ ID NO: 147983 - DNA, 543 bp, synthetic construct
  misc_feature 1..543: note = Description of Artificial Sequence: Synthetic coding sequence
  source 1..543: mol_type = other DNA
atggccgccctggacctgcgggcagagctggacagcctggtgctgcagctgctgggggacctggaggagctggagggcaagaggacagtgctgaatgcccgggtggaggagggctggctgagcctggccaaggcccgctatgccatgggcgccaagtctgtgggccccctgcagtatgccagccacatggagccccaggtgtgcctgcacgccagcgaggcccaggagggcctgcagaagttcaaggtggtgcgggccggcgtgcacgcccctgaggaggtgggcccccgggaggccggcctgcggcggaggaagggccccaccaagaccccagagcctgagagcagcgaggccccccaggaccccctgaactggtttggcatcctggtgccccacagcctgcggcaggcccaggccagcttcagagatggcctgcagctggccgctgacatcgccagcctgcagaacagaattgactggggccgcagccagctgcggggcctgcaggagaagctgaagcagctggagcctggagctgcctag

SEQ ID NO: 147984 - DNA, 567 bp, synthetic construct
  misc_feature 1..567: note = Description of Artificial Sequence: Synthetic coding sequence
  source 1..567: mol_type = other DNA
atgggcacccccctggatggcggcagccgggtgcccatcggctgcccagccaagctgcggcgggtgaccaggaagaaggtggccccagacctggagggctggctgagcctggccaaggcccgctatgccatgggcgccaagtctgtgggccccctgcagtatgccagccacatggagccccaggtgtgcctgcacgccagcgaggcccaggagggcctgcagaagttcaaggtggtgcgggccggcgtgcacgcccctgaggaggtgggcccccgggaggccggcctgcggcggaggaagggccccaccaagaccccagagcctgagagcagcgaggccccccaggaccccctgaactggtttggcatcctggtgccccacagcctgcggcaggcccaggccagcttcagagatggagtgctggaggccaagaagaggaagtgcttcctggagagggtcatccagtgtgtggtgtccccagctgctgagcaggaggctgaagatgagagctgcccagaggactgggccgctgctgtgcctgctgagaccagcgccaaggccatctag

SEQ ID NO: 147985 - DNA, 855 bp, synthetic construct
  misc_feature 1..855: note = Description of Artificial Sequence: Synthetic coding sequence
  source 1..855: mol_type = other DNA
atgtctgacaacaaggagaggaagagccagggcttccccaaggaggacaaccaggacaccagcagcctggctgatgctgtggagaaggtggccaagcagcagcagagccaggccagcgagattgagaagaacaagaaggtgctcttcaacctgaagaatgagctgcacgagctggagaaggagattgctgccatctctgctgagaccaaggagacagagcggcagatctaccagcaggacagcgccatcgagaacaccaagctgcactgtgacagcctggagacccagatcaagagcctgcacagtgaaaatgtgaagctgaagtttgatattgaaacagcccaggaggactttgaggagcacatgatcaagtacaatgcctactatgccaagatcaaggcccacaagaacagcctgggggaggtggagagcaagtggagcttcatgacagagctgcacgagaagagggactttgtgaagaagctgaagaccatgaaggaggagctgatgcaggacctgcagaaccctgggggcaaccgcatcacccaggtgcaggaggacatcaccaacctgaaggacaagatcatcaccgtgaaggagagcatcatcgagaagacctgcttcctggaggaggagaagaagacccatgagaagctgaggaaggagattgagagcctggcccccagcccccggctggagtgcagcagcgccatcagcgcccactgcaagctgtgcctgcccggcagccgccacagccctgccagcgccagcggcgtggccggcaccactggagcctgccaccacacccagctgatcttctgcatcttcagcagagatggagtgagcccctgctag

SEQ ID NO: 147986 - DNA, 822 bp, synthetic construct
  misc_feature 1..822: note = Description of Artificial Sequence: Synthetic coding sequence
  source 1..822: mol_type = other DNA
atgtctgacaacaaggagaggaagagccagggcttccccaaggaggacaaccaggacaccagcagcctggctgatgctgtggagaaggtggccaagcagcagcagagccaggccagcgagattgagaagaacaagaaggtgctcttcaacctgaagaatgagctgcacgagctggagaaggagattgctgccatctctgctgagaccaaggagacagagcggcagatctaccagcaggacagcgccatcgagaacaccaagctgcactgtgacagcctggagacccagatcaagagcctgcacagtgaaaatgtgaagctgaagtttgatattgaaacagcccaggaggactttgaggagcacatgatcaagtacaatgcctactatgccaagatcaaggcccacaagaacagcctgggggaggtggagagcaagtggagcttcatgacagagctgcacgagaagagggactttgtgaagaagctgaagaccatgaaggaggagctgatgcaggacctgcagaaccctgggggcaaccgcatcacccaggtgcaggaggacatcaccaacctgaaggacaagatcatcaccgtgaaggagagcatcatcgagaagacctgcttcctggaggaggagaagaagacccatgagaagctgaggaaggagattgaggtgcagcacaagagatatgatgccatcctgaagaggctgcactgccaggtgaacaagctgcagagcaacagacggcagtggcagtggaacatccagcagctggagaagacagctgctgagctgaggaaatgtattggcatgcaggagtag

SEQ ID NO: 147987 - DNA, 1536 bp, synthetic construct
  misc_feature 1..1536: note = Description of Artificial Sequence: Synthetic coding sequence
  source 1..1536: mol_type = other DNA
atgagcaaggtggcccggagcagcagcgagagtgatgtgcagctgtgggagacagaggaggatgacatgacagaaggagacctgggctacggcctgggcaggaagccaggcggcatctatgaaattgagttcagccacaggagcaggaagagaagtgatggcaagaacttcagccccccacccttccccaggaaaggagaggagagaaatgaggccagcttccagtacagcaagcacaagagccagcaggacaccttcccccaggtgagccgcatcagcaactaccgccggcagagcagcacagtggacagcaacagcgagctgagcaatgaggagctgcggcagtgcctgaatgagaccctggaggaggtggagatgctgaagacagagctggaggccagccagaggcagctgcggggcaaggaggaggccctgaagatcctgcagagcatggccatcctgggcaaggccaccagccacacccaggccgtgctgcagaagaccatggagcagaacagaagcctggagaaggagatcaatgccctgcagtgggagattgaatttgaccacaaccgcttcaagaacatcgaggagagctggatccagaagtatgaccggctgaactgtgaaaatgctgtgctgaaggagaacctgaaggtgaagacagaggagatcaagatgctgaagagtgacaatgctgtgctgaaccagcgctacctggaggccctggccatgctggacatcaagcagcagaagatggcccaggagaacatgtgctgtgacaagagcggctttgctgaggccagcggcctggagctggccgtgctgggcgcctgcctgtgccacggccctgggggcaacccctgcagctgtgccaggatggccgccagcaccaggaagctgctgctgcagctgaagcaggagctggagatcctgcagaagagcaaggaggaggcctacgtgatggctgatgccttccgcatcgcctttgagcagcagctgatgaggaagaatgaccaggccctgcagctgacccagatggacaagatgcacaagaaggccaccaagtggatgaactggaagcacctgaaggaggatggcttccccagccccaggagcaagaagaccttcggccagaggctgctgggcatgctgcccagcgagaacagcagcaagaggatggaggaccaggacagcccccaggaggtgctgaagatgctgattgacctgctgaatgacaaggaggaggccctggcccaccagaggaaggtgtcctacatgctggcccgggccctggaggacaaggacacagccagcaatgaaaacaaggagaagaaccccatcaaggagaacttccccttcaacaacccctggaggaagaccagcgagttctctgtgctgggggaccccatccacagctctgtgtgcatcctgaacagcgtgggctgcatctgcagcatccagcacagccagattgaccccaactaccgcaccctgaagaggagccacagcctgcccagcagcatcatcttctag

SEQ ID NO: 147988 - DNA, 1536 bp, synthetic construct; identical to SEQ ID NO: 147987
  misc_feature 1..1536: note = Description of Artificial Sequence: Synthetic coding sequence
  source 1..1536: mol_type = other DNA

SEQ ID NO: 147989 - DNA, 1161 bp, synthetic construct
  misc_feature 1..1161: note = Description of Artificial Sequence: Synthetic coding sequence
  source 1..1161: mol_type = other DNA
atgctgaagacagagctggaggccagccagaggcagctgcggggcaaggaggaggccctgaagatcctgcagagcatggccatcctgggcaaggccaccagccacacccaggccgtgctgcagaagaccatggagcagaacagaagcctggagaaggagatcaatgccctgcagtgggagattgaatttgaccacaaccgcttcaagaacatcgaggagagctggatccagaagtatgaccggctgaactgtgaaaatgctgtgctgaaggagaacctgaaggtgaagacagaggagatcaagatgctgaagagtgacaatgctgtgctgaaccagcgctacctggaggccctggccatgctggacatcaagcagcagaagatggcccaggagaacatgtgctgtgacaagagcggctttgctgaggccagcggcctggagctggccgtgctgggcgcctgcctgtgccacggccctgggggcaacccctgcagctgtgccaggatggccgccagcaccaggaagctgctgctgcagctgaagcaggagctggagatcctgcagaagagcaaggaggaggcctacgtgatggctgatgccttcagaattgcctttgagcagcagctgatgaggaagaatgaccaggccctgcagctgacccagatggacaagatgcacaagaaggccaccaagtggatgaactggaagcacctgaaggaggatggcttccccagccccaggagcaagaagaccttcggccagaggctgctgggcatgctgcccagcgagaacagcagcaagaggatggaggaccaggacagcccccaggaggtgctgaagatgctgattgacctgctgaatgacaaggaggaggccctggcccaccagaggaaggtgtcctacatgctggcccgggccctggaggacaaggacacagccagcaatgaaaacaaggagaagaaccccatcaaggagaacttccccttcaacaacccctggaggaagaccagcgagttctctgtgctgggggaccccatccacagctctgtgtgcatcctgaacagcgtgggctgcatctgcagcatccagcacagccagattgaccccaactaccgcaccctgaagaggagccacagcctgcccagcagcatcatcttctag

SEQ ID NO: 147990 - DNA, 3465 bp, synthetic construct
  misc_feature 1..3465: note = Description of Artificial Sequence: Synthetic coding sequence
  source 1..3465: mol_type = other DNA
atgcaggccatggagggggaggtgctgctgcctgccctgtatgaggaggaggaggaggaggaggaggaggaggaggaggtggaggaggaggaggagcaggtgcagaagggcggctctgtgggcagcctgtctgtgaacaagcaccggggcctgagcctgacagaaacagagctggaggagctgcgggcccaggtgctgcagctggtggccgagctggaggagacccgggagctggccggccagcatgaagatgacagcctggagctgcagggcctgctggaggatgagcggctggccagcgcccagcaggccgaggtgttcaccaagcagatccagcagctgcagggcgagctgcggagcctgcgggaggagatcagcctgctggagcacgagaaggagagcgagctgaaggagattgagcaggagctgcacctggcccaggccgagatccagagcctgcggcaggccgctgaggacagcgccacagagcacgagagtgacatcgccagcctgcaggaggacctgtgcaggatgcagaatgagctggaggacatggagcgcatccggggggactatgagatggagatcgccagcctgcgggcagagatggagatgaagagcagcgagcccagcggcagcctgggcctgagtgactacagcggcctgcaggaggagctgcaggagctgcgggagcgctaccacttcctgaatgaggagtaccgggccctgcaggagagcaacagcagcctgaccggccagctggccgacctggagagcgagaggacccagagggccacagagcgctggctgcagagccagaccctgtccatgaccagcgctgagagccagaccagcgagatggacttcctggagccagaccctgagatgcagctgctgcggcagcagctgagagatgctgaggagcagatgcacggcatgaagaacaagtgccaggagctgtgctgtgagctggaggagctgcagcaccaccggcaggtgtctgaggaggagcagaggcggctgcagcgggagctgaagtgtgcccagaatgaggtgctgcgcttccagaccagccacagcgtgacccagaatgaggagctgaagagccggctgtgcaccctgcagaagaagtatgacaccagccaggatgagcagaatgagctgctgaagatgcagctgcagctgcagacagagctgcggcagctgaaggtgatgaagagcaccctggtggagaaccagagcgagaaggagctgctgtgccgcctgcagaagctgcacctgcagcaccagaatgtgacctgtgagaaggagaagctgctggagcggcagcagcagctgcaggaggagctgcagtgccatgaagctgagctgcagcacctgcgggacacagtggccagcttcaaggagagcaatgagaaggacacagagacccacgcccagctgcaggagatgaagcagctgtaccaggccagcaaggatgagctggagcggcagaagcacatgtatgaccagctggagcaggacctgctgctgtgccagctggagctgaaggagctgaaggccagccaccccatcccagaagataaaggaaaatgtgccaacaagtgtgacaccctgctgagccggctgacagagctgcaggagaagtacaaggccagccagaaggagatgggccagctgcagatggagcagtgtgagctgctggaggaccagaggaggatgcaggaggagcagggccagctgcaggaggagctgcaccggctgaccctgcccctgcccaagagcggcctgctgctgaagagccaggagctgctgaccaagctggaggacctgtgtgagctgcagctgctgtaccagggcatgcaggaggagcagaagaagctgatccagaaccaggactgtgtgctgaaggagcagctggagatccacgaggagctgcggcgcttcaaggagagccacttccaggaggtgctggagaacccagatgacagcaagctggccaagagcagcaagtgcaacagaaacaagcagagcaagctgctgatggagcagatgcaggccctgcaggtgatgtatgatgctggccaggccaagcaggagctgctgcagcaggagcagggccgcctgctggaggagaggaagaggctgcaggccgacctgcagctgtgcctggaggagatgcagctgctgcaggtgcagagccccagcatcaagatgagcctggagagctatggcaagagctatggctccatggtgcccagcaatgaaaactgcaggaagacctatgacaccaccgtggatgacaatgaaagctactacaagagctacaccagcacccagaccagcagcaagagcttcctgaagagctatgacagcagcaccagcgccagcgaggcctacggcaagagctactgcaccaccagcaacagcagcatcacctacaagaagagctatggcagcaccagcagcagtgacacctgccagaagagctttgtgagcagctgcacagatgaggagcctgctgagcctgaggacatggagagatttgaggagatggtggtgaaggtgctgatcaagctgcaggccgtgcaggccatgtaccagatcagccaggaggagcacagccagctgcaggagcagatggagaagctgctggccaagcagaaggacctgaaggaggagctggatgcctgtgagcgggagttcaaggagtgcatggagtgcctggagaagcccatggccccccagaatgacaagaatgagatcaaggagctgcagaccaagctgcgggagctgcagctgcagtaccaggcctccatggatgagcagggccgcctgctggtggtgcaggagcagctggagggccagctgcagtgctgccaggaggagctgcggcagctgcgggagaagaggccttctgtggtgaaggaggcccggggcaagaatgccaacaagaacatgaacaagaatgccaacggggtgaagatgaagaaggtgaccaagccctgcagcgacaccagcgagagtgacctggagaccaggaagagcctggaggtggtgctgtactacaaggccagccagaggaagctggatggcctggccaaggaggaggagaagaaggaggagatggaggaggagaagaagcaggtgaaggaggaggccaaggagcagtgtggagatgagctggtggccgagcctgctgaccctgaggaggccaagagcacagaggaccaggaggagaatgaggaggacaaggaggaggaggagaaggaggaggacagcgaggaggaggaggatgatgctgacagcagcctggagagccctgaggagaacaaccccctgcggctgtctgagagcaagaagagcagccccacccccaacccccccatcttcagcctgcccctggtgggcctggtggtgatcagcgccctgctgtggtgctggtgggccgagaccagcagctag

SEQ ID NO: 147991 - DNA, 2874 bp, synthetic construct
  misc_feature 1..2874: note = Description of Artificial Sequence: Synthetic coding sequence
  source 1..2874: mol_type = other DNA
ctgcgggccctggagggggaggtgctgctgcctgccctgtatgaggaggaggaggaggaggaggaggaggaggaggaggtggaggaggaggaggagcaggtgcagaagggcggctctgtgggcagcctgtctgtgaacaagcaccggggcctgagcctgacagaaacagagctggaggagctgcgggcccaggtgctgcagctggtggccgagctggaggagacccgggagctggccggccagcatgaagatgacagcctggagctgcagggcctgctggaggatgagcggctggccagcgcccagcaggccgaggtgttcaccaagcagatccagcagctgcagggcgagctgcggagcctgcgggaggagatcagcctgctggagcacgagaaggagagcgagctgaaggagattgagcaggagctgcacctggcccaggccgagatccagagcctgcggcaggccgctgaggacagcgccacagagcacgagagtgacatcgccagcctgcaggaggacctgtgcaggatgcagaatgagctggaggacatggagcgcatccggggggactatgagatggagatcgccagcctgcgggcagagatggagatgaagagcagcgagcccagcggcagcctgggcctgagtgactacagcggcctgcaggaggagctgcaggagctgcgggagcgctaccacttcctgaatgaggagtaccgggccctgcaggagagcaacagcagcctgaccggccagctggccgacctggagagcgagaggacccagagggccacagagcgctggctgcagagccagaccctgtccatgaccagcgctgagagccagaccagcgagatggacttcctggagccagaccctgagatgcagctgctgcggcagcagctgagagatgctgaggagcagatgcacggcatgaagaacaagtgccaggagctgtgctgtgagctggaggagctgcagcaccaccggcaggtgtctgaggaggagcagaggcggctgcagcgggagctgaagtgtgcccagaatgaggtgctgcgcttccagaccagccacagcgtgacccagaatgaggagctgaagagccggctgtgcaccctgcagaagaagtatgacaccagccaggatgagcagaatgagctgctgaagatgcagctgcagctgcagacagagctgcggcagctgaaggtgatgaagagcaccctggtggagaaccagagcgagaaggagctgctgtgccgcctgcagaagctgcacctgcagcaccagaatgtgacctgtgagaaggagaagctgctggagcggcagcagcagctgcaggaggagctgcagtgccatgaagctgagctgcagcacctgcgggacacagtggccagcttcaaggagagcaatgagaaggacacagagacccacgcccagctgcaggagatgaagcagctgtaccaggccagcaaggatgagctggagcggcagaagcacatgtatgaccagctggagcaggacctgctgctgtgccagctggagctgaaggagctgaaggccagccaccccatcccagaagataaaggaaaatgtgccaacaagtgtgacaccctgctgagccggctgacagagctgcaggagaagtacaaggccagccagaaggagatgggccagctgcagatggagcagtgtgagctgctggaggaccagaggaggatgcaggaggagcagggccagctgcaggaggagctgcaccggctgaccctgcccctgcccaagagcggcctgctgctgaagagccaggagctgctgaccaagctggaggacctgtgtgagctgcagctgctgtaccagggcatgcaggaggagcagaagaagctgatccagaaccaggactgtgtgctgaaggagcagctggagatccacgaggagctgcggcgcttcaaggagagccacttccaggaggtgctggagaacccagatgacagcaagctggccaagagcagcaagtgcaacagaaacaagcagagcaagctgctgatggagcagatgcaggccctgcaggtgatgtatgatgctggccaggccaagcaggagctgctgcagcaggagcagggccgcctgctggaggagaggaagaggctgcaggccgacctgcagctgtgcctggaggagatgcagctgctgcaggtgcagagccccagcatcaagatgagcctggagagctatggcaagagctatggctccatggtgcccagcaatgaaaactgcaggaagacctatgacaccaccgtggatgacaatgaaagctactacaagagctacaccagcacccagaccagcagcaagagcttcctgaagagctatgacagcagcaccagcgccagcgaggcctacggcaagagctactgcaccaccagcaacagcagcatcacctacaagaagagctatggcagcaccagcagcagtgacacctgccagaagagctttgtgagcagctgcacagatgaggagcctgctgagcctgaggacatggagagatttgaggagatggtggtgaaggtgctgatcaagctgcaggccgtgcaggccatgtaccagatcagccaggaggagcacagccagctgcaggagcagatggagaagctgctggccaagcagaaggacctgaaggaggagctggatgcctgtgagcgggagttcaaggagtgcatggagtgcctggagaagcccatggccccccagaatgacaagaatgaaaacatgtttggcctgtggaagcccatggtgttcctggccatcgctgctgtggccctgtatgtgctgcccaacatgaggcagcaggagagcgagttctgcctgatggagtag

SEQ ID NO: 147992 - DNA, 1305 bp, synthetic construct
  misc_feature 1..1305: note = Description of Artificial Sequence: Synthetic coding sequence
  source 1..1305: mol_type = other DNA
atggaggccggggccggggccggggccggggccgccggctggagctgccccggccctggccccaccgtgaccaccctgggcagctatgaggccagcgagggctgtgagaggaagaagggccagcgctggggcagcctggagcggcggggcatgcaggccatggagggggaggtgctgctgcctgccctgtatgaggaggaggaggaggaggaggaggaggaggaggaggtggaggaggaggaggagcaggtgcagaagggcggctctgtgggcagcctgtctgtgaacaagcaccggggcctgagcctgacagaaacagagctggaggagctgcgggcccaggtgctgcagctggtggccgagctggaggagacccgggagctggccggccagcatgaagatgacagcctggagctgcagggcctgctggaggatgagcggctggccagcgcccagcaggccgaggtgttcaccaagcagatccagcagctgcagggcgagctgcggagcctgcgggaggagatcagcctgctggagcacgagaaggagagcgagctgaaggagattgagcaggagctgcacctggcccaggccgagatccagagcctgcggcaggccgctgaggacagcgccacagagcacgagagtgacatcgccagcctgcaggaggacctgtgcaggatgcagaatgagctggaggacatggagcgcatccggggggactatgagatggagatcgccagcctgcgggcagagatggagatgaagagcagcgagcccagcgaggagctgcaggagctgcgggagcgctaccacttcctgaatgaggagtaccgggccctgcaggagagcaacagcagcctgaccggccagctggccgacctggagagcgagaggacccagagggccacagagcgctggctgcagagccagaccctgtccatgaccagcgctgagagccagaccagcgagatggacttcctggagccagaccctgagatgcagctgctgcggcagcagctgagagatgctgaggagcagatgcacggcatgaagaacaagtgccaggagctgtgctgtgagctggaggagctgcagcaccaccggcaggtgtctgaggaggagcagaggcggctgcagcgggagctgaagtgtgcccagaatgaggtgctgcgcttccagaccagccacagcgtgacccagagcagccccacccccaacccccccatcttcagcctgcccctggtgggcctggtggtgatcagcgccctgctgtggtgctggtgggccgagaccagcagctag

SEQ ID NO: 147993 - DNA, 3474 bp, synthetic construct
  misc_feature 1..3474: note = Description of Artificial Sequence: Synthetic coding sequence
  source 1..3474: mol_type = other DNA
ctgcgggccctggagggggaggtgctgctgcctgccctgtatgaggaggaggaggaggaggaggaggaggaggaggaggtggaggaggaggaggagcaggtgcagaagggcggctctgtgggcagcctgtctgtgaacaagcaccggggcctgagcctgacagaaacagagctggaggagctgcgggcccaggtgctgcagctggtggccgagctggaggagacccgggagctggccggccagcatgaagatgacagcctggagctgcagggcctgctggaggatgagcggctggccagcgcccagcaggccgaggtgttcaccaagcagatccagcagctgcagggcgagctgcggagcctgcgggaggagatcagcctgctggagcacgagaaggagagcgagctgaaggagattgagcaggagctgcacctggcccaggccgagatccagagcctgcggcaggccgctgaggacagcgccacagagcacgagagtgacatcgccagcctgcaggaggacctgtgcaggatgcagaatgagctggaggacatggagcgcatccggggggactatgagatggagatcgccagcctgcgggcagagatggagatgaagagcagcgagcccagcggcagcctgggcctgagtgactacagcggcctgcaggaggagctgcaggagctgcgggagcgctaccacttcctgaatgaggagtaccgggccctgcaggagagcaacagcagcctgaccggccagctggccgacctggagagcgagaggacccagagggccacagagcgctggctgcagagccagaccctgtccatgaccagcgctgagagccagaccagcgagatggacttcctggagccagaccctgagatgcagctgctgcggcagcagctgagagatgctgaggagcagatgcacggcatgaagaacaagtgccaggagctgtgctgtgagctggaggagctgcagcaccaccggcaggtgtctgaggaggagcagaggcggctgcagcgggagctgaagtgtgcccagaatgaggtgctgcgcttccagaccagccacagcgtgacccagaatgaggagctgaagagccggctgtgcaccctgcagaagaagtatgacaccagccaggatgagcagaatgagctgctgaagatgcagctgcagctgcagacagagctgcggcagctgaaggtgatgaagagcaccctggtggagaaccagagcgagaaggagctgctgtgccgcctgcagaagctgcacctgcagcaccagaatgtgacctgtgagaaggagaagctgctggagcggcagcagcagctgcaggaggagctgcagtgccatgaagctgagctgcagcacctgcgggacacagtggccagcttcaaggagagcaatgagaaggacacagagacccacgcccagctgcaggagatgaagcagctgtaccaggccagcaaggatgagctggagcggcagaagcacatgtatgaccagctggagcaggacctgctgctgtgccagctggagctgaaggagctgaaggccagccaccccatcccagaagataaaggaaaatgtgccaacaagtgtgacaccctgctgagccggctgacagagctgcaggagaagtacaaggccagccagaaggagatgggccagctgcagatggagcagtgtgagctgctggaggaccagaggaggatgcaggaggagcagggccagctgcaggaggagctgcaccggctgaccctgcccctgcccaagagcggcctgctgctgaagagccaggagctgctgaccaagctggaggacctgtgtgagctgcagctgctgtaccagggcatgcaggaggagcagaagaagctgatccagaaccaggactgtgtgctgaaggagcagctggagatccacgaggagctgcggcgcttcaaggagagccacttccaggaggtgctggagaacccagatgacagcaagctggccaagagcagcaagtgcaacagaaacaagcagagcaagctgctgatggagcagatgcaggccctgcaggtgatgtatgatgctggccaggccaagcaggagctgctgcagcaggagcagggccgcctgctggaggagaggaagaggctgcaggccgacctgcagctgtgcctggaggagatgcagctgctgcaggtgcagagccccagcatcaagatgagcctggagagctatggcaagagctatggctccatggtgcccagcaatgaaaactgcaggaagacctatgacaccaccgtggatgacaatgaaagctactacaagagctacaccagcacccagaccagcagcaagagcttcctgaagagctatgacagcagcaccagcgccagcgaggcctacggcaagagctactgcaccaccagcaacagcagcatcacctacaagaagagctatggcagcaccagcagcagtgacacctgccagaagagctttgtgagcagctgcacagatgaggagcctgctgagcctgaggacatggagagatttgaggagatggtggtgaaggtgctgatcaagctgcaggccgtgcaggccatgtaccagatcagccaggaggagcacagccagctgcaggagcagatggagaagctgctggccaagcagaaggacctgaaggaggagctggatgcctgtgagcgggagttcaaggagtgcatggagtgcctggagaagcccatggccccccagaatgacaagaatgagatcaaggagctgcagaccaagctgcgggagctgcagctgcagtaccaggcctccatggatgagcagggccgcctgctggtggtgcaggagcagctggagggccagctgcagtgctgccaggaggagctgcggcagctgcgggagaagaggccttctgtggtgaaggaggcccggggcaagaatgccaacaagaacatgaacaagaatgccaacggggtgaagatgaagaaggtgaccaagccctgcagcgacaccagcgagagtgacctggagaccaggaagagcctggaggtggtgctgtactacaaggccagccagaggaagctggatggcctggccaaggaggaggagaagaaggaggagatggaggaggagaagaagcaggtgaaggaggaggccaaggagcagtgtggagatgagctggtggccgagcctgctgaccctgaggaggccaagagcacagaggaccaggaggagaatgaggaggacaaggaggaggaggagaaggaggaggacagcgaggaggaggaggatgatgctgacagcagcctggagagccctgaggagaacaaccccctgcggctgtctgagagcaagaagaacatgtttggcctgtggaagcccatggtgttcctggccatcgctgctgtggccctgtatgtgctgcccaacatgaggcagcaggagagcgagttctgcctgatggagtag

SEQ ID NO: 147994 - DNA, 309 bp, synthetic construct
  misc_feature 1..309: note = Description of Artificial Sequence: Synthetic coding sequence
  source 1..309: mol_type = other DNA
atgcaggccatggagggggaggtgctgctgcctgccctgtatgaggaggaggaggaggaggaggaggaggaggaggaggtggaggaggaggaggagcaggtgcagaagggcggctctgtgggcagcctgtctgtgaacaagcaccggggcctgagcctgacagaaacagagctggaggagctgcgggcccaggtgctgcagctggtggccgagctggaggagacccgggagctggccggccagcatgaagatgacagcctggagctgcagggcctgctggaggatgagcggctggccagcgcccagtag

SEQ ID NO: 147995 - DNA, 1341 bp, synthetic construct
  misc_feature 1..1341: note = Description of Artificial Sequence: Synthetic coding sequence
  source 1..1341: mol_type = other DNA
atggaggccggggccggggccggggccggggccgccggctggagctgccccggccctggccccaccgtgaccaccctgggcagctatgaggccagcgagggctgtgagaggaagaagggccagcgctggggcagcctggagcggcggggcatgcaggccatggagggggaggtgctgctgcctgccctgtatgaggaggaggaggaggaggaggaggaggaggaggaggtggaggaggaggaggagcaggtgcagaagggcggctctgtgggcagcctgtctgtgaacaagcaccggggcctgagcctgacagaaacagagctggaggagctgcgggcccaggtgctgcagctggtggccgagctggaggagacccgggagctggccggccagcatgaagatgacagcctggagctgcagggcctgctggaggatgagcggctggccagcgcccagcaggccgaggtgttcaccaagcagatccagcagctgcagggcgagctgcggagcctgcgggaggagatcagcctgctggagcacgagaaggagagcgagctgaaggagattgagcaggagctgcacctggcccaggccgagatccagagcctgcggcaggccgctgaggacagcgccacagagcacgagagtgacatcgccagcctgcaggaggacctgtgcaggatgcagaatgagctggaggacatggagcgcatccggggggactatgagatggagatcgccagcctgcgggcagagatggagatgaagagcagcgagcccagcggcagcctgggcctgagtgactacagcggcctgcaggaggagctgcaggagctgcgggagcgctaccacttcctgaatgaggagtaccgggccctgcaggagagcaacagcagcctgaccggccagctggccgacctggagagcgagaggacccagagggccacagagcgctggctgcagagccagaccctgtccatgaccagcgctgagagccagaccagcgagatggacttcctggagccagaccctgagatgcagctgctgcggcagcagctgagagatgctgaggagcagatgcacggcatgaagaacaagtgccaggagctgtgctgtgagctggaggagctgcagcaccaccggcaggtgtctgaggaggagcagaggcggctgcagcgggagctgaagtgtgcccagaatgaggtgctgcgcttccagaccagccacagcgtgacccagagcagccccacccccaacccccccatcttcagcctgcccctggtgggcctggtggtgatcagcgccctgctgtggtgctggtgggccgagaccagcagctag

SEQ ID NO: 147996 - DNA, 21 bp, synthetic construct
  misc_feature 1..21: note = Description of Artificial Sequence: Synthetic coding sequence
  source 1..21: mol_type = other DNA
atgcaggccatggagggctag

SEQ ID NO: 147997 - DNA, 414 bp, synthetic construct
  misc_feature 1..414: note = Description of Artificial Sequence: Synthetic coding sequence
  source 1..414: mol_type = other DNA
atgcaggccatggagggggaggtgctgctgcctgccctgtatgaggaggaggaggaggaggaggaggaggaggaggaggtggaggaggaggaggagcaggtgcagaagggcggctctgtgggcagcctgtctgtgaacaagcaccggggcctgagcctgacagaaacagagctggaggagctgcgggcccaggtgctgcagctggtggccgagctggaggagacccgggagctggccggccagcatgaagatgacagcctggagctgcagggcctgctggaggatgagcggctggccagcgcccagcaggccgaggtgttcaccaagcagatccagcagctgcagggcgagctgcggagcctgcgggaggagatcagcctgctggagcacgagaaggagagcgagctgaagtag

SEQ ID NO: 147998 - DNA, 192 bp, synthetic construct
  misc_feature 1..192: note = Description of Artificial Sequence: Synthetic coding sequence
  source 1..192: mol_type = other DNA
atgcaggccatggagggggaggtgctgctgcctgccctgtatgaggaggaggaggaggaggaggaggaggaggaggaggtggaggaggaggaggagcaggtgcagaagggcggctctgtgggcagcctgtctgtgaacaagcaccggggcctgagcctgacagaaacagagctggaggagctgcgggcctag

SEQ ID NO: 147999 - DNA, 870 bp, synthetic construct
  misc_feature 1..870: note = Description of Artificial Sequence: Synthetic coding sequence
  source 1..870: mol_type = other DNA
atggccggggccggccgcggggctgctgtgtcccgggtgcaggccggccctggcagcccccggcgggcccggggccggcagcaggtgcagcccctgggcaagcagaggcctgccccctggccaggcctgcggagcaaggagaagaagaaggtgaactgcaagcccaagaaccaggatgagcaggagatccccttccggctgcgggagatcatgaggagccggcaggagatgaagaaccccatcagcaacaagaagaggaagaaggccgcccaggtgaccttcaggaagaccctggagaaggaggccaagggggaggagccagacattgctgtgcccaagttcaagcagaggaagggggagagtgatggagcctacatccacaggatgcagcaggaggcccagcacgtgctcttcctgagcaagaaccaggccatccggcagcctgaggtgcaggccgcccccaaggagaagtctgagcagaagaaggccaagaaggccttccagaagaggcggctggacaaggtgcggaggaagaaggaggagaaggctgctgaccggctggagcaggagctgctgcgggacacagtgaagtttggagaggtggtgctgcagcccccagagctgacagcccggccccagaggtctgtgtccaaggaccagcctggaagaagaagccagatgctgaggatgctgctgagccctgggggcgtgtcccagcccctgacagccagcctggcccggcagagaattgtggaggaggagcgggagagagctgtgcaggcctaccgggccctgaagcagaggcagcagcagctgcatggagagcggccccacctgaccagcaggaagaagccagagccccagctgtag

SEQ ID NO: 148000 - DNA, 1656 bp, synthetic construct
  misc_feature 1..1656: note = Description of Artificial Sequence: Synthetic coding sequence
  source 1..1656: mol_type = other DNA
atgcccctgagcacagctggcatcctgagcagcagcagcgctgccagcaacagaagcaggaacaaggcccgctaccgcaccaaggctgtgagcagcgaggtggatgagagcctgtttggagacatcaagagccctgcccagggccagagcgacagccccatcgtgctgctgcgggacaagcacaccctgcagaagaccctgacagccctgggcctggacaggaagccagagaccatccagctgatcacccgggacatggtgcgggagctgattgtgcccacagaggaccccagcggggagagcctcatcatcagccctgaggagtttgagcgcatcaagtgggccagccacgtgctgacccgggaggagctggaggcccgggaccaggccttcaagaaggagaaggaggccaccatggatgctgtgatgaccaggaagaagatcatgaagcagaaggagatggtgtggaacaacaacaagaagctgagtgacctggaggaggtggccaaggagcgggcccagaacctgctgcagagggccaacaagctgaggatggagcaggaggaggagctgaaggacatgagcaagatcatcctgaatgccaagtgccacgccatcagagatgcccagatcctggagaagcagcagatccagaaggagctggacacagaggagaagaggctggaccagatgatggaggtggagcggcagaagagcatccagaggcaggaggagctggagaggaagaggcgggaggagcgcatccggggccggcggcagatcgtggagcagatggagaagaaccaggaggagaggagcctgctggccgagcagcgggagcaggagaaggagcagatgctggagtacatggagcagctgcaggaggaggacctgaaggacatggagcggcggcagcagcagaagctgaagatgcaggccgagatcaagaggatcaatgatgagaaccagaagcagaaggccgagctgctggcccaggagaagctggccgaccagatggtgatggagttcaccaagaagaagatggcccgggaggccgagtttgaggccgagcaggagcgcatccggcgggagaaggagaaggagatcgcccggctgcgggccatgcaggagaaggcccaggactaccaggccgagcaggatgccctgcgggccaagaggaaccaggaggtggccgaccgggagtggaggaggaaggagaaggaaaatgccaggaagaagatggagacagaggccgagctgaggaagagccggctggagcaggtggccttcaaggagcacgccctggccgtgcaggtgcagagggacagagatgaatttgagcgcatcctgcgggcccagcgggagcagatcgagaaggagcggctggaggaggagaagaaggccaccggccgcctgcagcacgccaatgagctgcggcggcaggtgcgggagaaccagcagaaggaggtgcagaaccgcatcgccacctttgaggagggccgccgcctgaaggaggaggcccagaagaggcgggagagaattgatgagatcaagaggaagaagctggaggagctgcgggccaccggcctgcctgagaagtactgcatcgaggccgagaggaaggccaacatcctgcctgccacctctgtgaactag

SEQ ID NO: 148001 - DNA, 1401 bp, synthetic construct
  misc_feature 1..1401: note = Description of Artificial Sequence: Synthetic coding sequence
  source 1..1401: mol_type = other DNA
atggtgcgggagctgattgtgcccacagaggaccccagcggggagagcctcatcatcagccctgaggagtttgagcgcatcaagtgggccagccacgtgctgacccgggaggagctggaggcccgggaccaggccttcaagaaggagaaggaggccaccatggatgctgtgatgaccaggaagaagatcatgaagcagaaggagatggtgtggaacaacaacaagaagctgagtgacctggaggaggtggccaaggagcgggcccagaacctgctgcagagggccaacaagctgaggatggagcaggaggaggagctgaaggacatgagcaagatcatcctgaatgccaagtgccacgccatcagagatgcccagatcctggagaagcagcagatccagaaggagctggacacagaggagaagaggctggaccagatgatggaggtggagcggcagaagagcatccagaggcaggaggagctggagaggaagagaagagaggagcgcatccggggccggcggcagatcgtggagcagatggagaagaaccaggaggagaggagcctgctggccgagcagcgggagcaggagaaggagcagatgctggagtacatggagcagctgcaggaggaggacctgaaggacatggagcggcggcagcagcagaagctgaagatgcaggccgagatcaagaggatcaatgatgagaaccagaagcagaaggccgagctgctggcccaggagaagctggccgaccagatggtgatggagttcaccaagaagaagatggcccgggaggccgagtttgaagctgagcaggagcgcatcagaagagagaaggagaaggagatcgcccggctgcgggccatgcaggagaaggcccaggactaccaggccgagcaggatgccctgcgggccaagaggaaccaggaggtggccgaccgggagtggaggaggaaggagaaggaaaatgccaggaagaagatggagacagaagctgagctgaggaagagccggctggagcaggtggccttcaaggagcacgccctggccgtgcaggtgcagagggacagagatgaatttgagcgcatcctgcgggcccagcgggagcagatcgagaaggagcggctggaggaggagaagaaggccaccggccgcctgcagcacgccaatgagctgcggcggcaggtgcgggagaaccagcagaaggaggtgcagaacagaattgccacctttgaggagggccggcggctgaaggaggaggcccagaagagaagagaaagaattgatgagatcaagaggaagaagctggaggagctgcgggccaccggcctgcctgagaagtactgcattgaagctgagaggaaggccaacatcctgcctgccacctctgtgaactag

SEQ ID NO: 148002 - DNA, 1884 bp, synthetic construct
  misc_feature 1..1884: note = Description of Artificial Sequence: Synthetic coding sequence
  source 1..1884: mol_type = other DNA
atggaggaggccgaccgcatcctgatccacagcctgcggcaggccggcacagctgtgcccccagatgtgcagaccctgcgggccttcaccacagagctggtggtggaggccgtggtgcgctgcctgcgggtcatcaacccagctgtgggcagcggcctgagccccctgctgcccctggccatgtctgcccgcttccggctggccatgagcctggcccaggcctgcatggacctgggctaccccctggagctgggctaccagaacttcctgtaccccagcgagccagacctgcgggacctgctgctcttcctggccgagcggctgcccacagatgcctctgaagatgctgaccagcctgctggggacagcgccatcctgctgcgggccatcggcagccagatccgggaccagctggccctgccctgggtgcccccccacctgcggacccccaagctgcagcacctgcagggcagcgccctgcagaagcccttccacgccagccggctggtggtgcctgagctgagcagcagaggagagccccgggagttccaggccagccccctgctgctgcctgtgcccacccaggtgccccagcctgtgggccgggtggccagcctgctggagcaccacgccctgcagctgtgccagcagacaggccgggacaggcctggagatgaggactgggtgcacaggaccagccggctgcccccccaggaggacacccgggcccagaggcagaggctgcagaagcagctgacagagcacctgcggcagagctggggcctgctgggcgcccccatccaggcccgggacctgggggagctgctgcaggcctggggcgctggggccaagacaggagcccccaagggcagccgcttcacccacagcgagaagttcaccttccacctggagccccaggcccaggccacccaggtgtctgatgtgcctgccaccagccggcggcctgagcaggtgacctgggccgcccaggagcaggagctggagagcctgcgggagcagctggagggcgtgaacagaagcattgaggaggtggaggccgacatgaagaccctgggcgtgtcctttgtgcaggccgagagcgagtgccgccacagcaagctgagcacagctgagcgggagcaggccctgcggctgaagagcagagctgtggagctgctgcctgatggaacagccaacctggccaagctgcagctggtggtggagaacagcgcccagagggtcatccacctggccggccagtgggagaagcaccgggtgcccctgctggccgagtaccgccacctgaggaagctgcaggactgccgggagctggagagcagccggcggctggccgagatccaggagctgcaccagagcgtgcgggctgctgctgaggaggcccggaggaaggaggaggtgtacaagcagctgatgtctgagctggagaccctgcccagagatgtgtcccggctggcctacacccagaggatcctggagatcgtgggcaacatcaggaagcagaaggaggagatcaccaagatcctgagtgacaccaaggagctgcagaaggagatcaacagcctgagcggcaagctggacaggacctttgctgtgacagatgagctggtgttcaaggatgccaagaaggatgatgctgtgaggaaggcctacaagtacctggccgccctgcacgagaactgcagccagctgatccagaccatcgaggacaccggcaccatcatgagggaggtgcgggacctggaggagcagattgaaacagagctgggcaagaagaccctgagcaacctggagaagatccgggaggactaccgggccctgcggcaggagaatgccggcctgctgggccgggtgcgggaggcctag

SEQ ID NO: 148003 - DNA, 1743 bp, synthetic construct
  misc_feature 1..1743: note = Description of Artificial Sequence: Synthetic coding sequence
  source 1..1743: mol_type = other DNA
atggaggaggccgaccgcatcctgatccacagcctgcggcaggccggcacagctgtgcccccagatgtgcagaccctgcgggccttcaccacagagctggtggtggaggccgtggtgcgctgcctgcgggtcatcaacccagctgtgggcagcggcctgagccccctgctgcccctggccatgtctgcccgcttccggctggccatgagcctggcccaggcctgcatggacctgggctaccccctggagctgggctaccagaacttcctgtaccccagcgagccagacctgcgggacctgctgctcttcctggccgagcggctgcccacagatgcctctgaagatgctgaccagcctgctggggacagcgccatcctgctgcgggccatcggcagccagatccgggaccagctggccctgccctgggtgcccccccacctgcggacccccaagctgcagcacctgcagggcagcgccctgcagaagcccttccacgccagccggctggtggtgcctgagctgagcagcagaggagagccccgggagttccaggccagccccctgctgctgcctgtgcccacccaggtgccccagcctgtgggccgggtggccagcctgctggagcaccacgccctgcagctgtgccagcagacaggccgggacaggcctggagatgaggactgggtgcacaggaccagccggctgcccccccaggaggacacccgggcccagaggcagaggctgcagaagcagctgacagagcacctgcggcagagctggggcctgctgggcgcccccatccaggcccgggacctgggggagctgctgcaggcctggggcgctggggccaagacaggagcccccaagggcagccgcttcacccacagcgagaagttcaccttccacctggagccccaggcccaggccacccaggtgtctgatgtgcctgccaccagccggcggcctgagcaggtgacctgggccgcccaggagcaggagctggagagcctgcgggagcagctggagggcgtgaacagaagcattgaggaggtggaggccgacatgaagaccctgggcgtgtcctttgtgcaggccgagagcgagtgccgccacagcaagctgagcacagctgagcgggagcaggccctgcggctgaagagcagagctgtggagctgctgcctgatggaacagccaacctggccaagctgcagctggtggtggagaacagcgcccagagggtcatccacctggccggccagtgggagaagcaccgggtgcccctgctggccgagtaccgccacctgaggaagctgcaggactgccgggagctggagagcagccggcggctggccgagatccaggagctgcaccagagcgtgcgggctgctgctgaggaggcccggaggaaggaggaggtgtacaagcagctgatgtctgagctggagaccctgcccagagatgtgtcccggctggcctacacccagaggatcctggagatcgtgggcaacatcaggaagcagaaggaggagatcaccaagatcctgagtgacaccaaggagctgcagaaggagatcaacagcctgagcggcaagctggacaggacctttgctgtgacagatgagctggtgttcaaggatgccaagaaggatgatgctgtgaggaaggcctacaagtacctggccgccctgcacttcatcggagatggcaccgtgggctggggcccctggatccccaacaagtag

SEQ ID NO: 148004 - DNA, 603 bp, synthetic construct
  misc_feature 1..603: note = Description of Artificial Sequence: Synthetic coding sequence
  source 1..603: mol_type = other DNA
atggatgacaagaagaagaagaggagccccaagccctgcctggcccagcctgcccaggcccctggcaccctgcggcgggtgcctgtgcccaccagccacagcggcagcctggccctgggcctgccccacctgcccagccccaagcagagggccaagttcaagagggtgggcaaggagaagtgcaggcctgtgctggccggcggcggcagcggcagcgctggcacccccctgcagcacagcttcctgacagaggtgacagatgtgtatgagatggagggcggcctgctgaacctgctgaatgacttccacagcggccgcctgcaggccttcggcaaggaatgttcctttgagcagctggagcacgtgcgggagatgcaggagaagctggcccggctgcacttcagcctggatgtgtgtggggaggaggaggatgatgaggaggaggaggatggagtgacagagggcctgcctgaggagcagaagaagaccatggctgacaggaacctggaccagctgctgagcaacctggaggacctgagcaacagcatccagaagctgcacctggccgagaatgctgagcctgaggagcagagcgctgcctag

SEQ ID NO: 148005 - DNA, 690 bp, synthetic construct
  misc_feature 1..690: note = Description of Artificial Sequence: Synthetic coding sequence
  source 1..690: mol_type = other DNA
atgtgggccgccggccgctggggccccaccttccccagcagctatgccggcttctctgctgactgccggcccaggagccggcccagcagtgacagctgcagcgtgcccatgaccggggcccggggccagggcctggaggtggtgcgcagccccagcccccccctgcccctgagctgcagcaacagcaccaggagcctgctgagccccctgggccaccagagcttccagtttgatgaagatgatggagatggagaagatgaggaggatgtggatgatgaggaggatgtggatgaagatgcccatgattctgaggccaaggtggccagcctgcggggcatggagctgcagggctgtgccagcacccaggtggagagcgagaacaaccaggaggagcagaagcaggtgcggctgcctgagagccggctgaccccctgggaggtgtggttcatcggcaaggagaaggaggagcgggaccggctgcagctgaaggccctggaggagctgaaccagcagctggagaagaggaaggagatggaggagcgggagaagaggaagatcatcgccgaggagaagcacaaggagtgggtgcagaagaagaatgagcaggtgcggcggggcaagtggatccacaccctgaccagcctgctgcagaacatcagcagctactacaccagcctgccccgcttctag

SEQ ID NO: 148006 - DNA, 1122 bp, synthetic construct
  misc_feature 1..1122: note = Description of Artificial Sequence: Synthetic coding sequence
  source 1..1122: mol_type = other DNA
atgtgggccgccggccgctggggccccaccttccccagcagctatgccggcttctctgctgactgccggcccaggagccggcccagcagtgacagctgcagcgtgcccatgaccggggcccggggccagggcctggaggtggtgcgcagccccagcccccccctgcccctgagctgcagcaacagcaccaggagcctgctgagccccctgggccaccagagcttccagtttgatgaagatgatggagatggagaagatgaggaggatgtggatgatgaggaggatgtggatgaagatgcccatgattctgaggccaaggtggccagcctgcggggcatggagctgcagggctgtgccagcacccaggtggagagcgagaacaaccaggaggagcagaagcaggtgcggctgcctgagagccggctgaccccctgggaggtgtggttcatcggcaaggagaaggaggagcgggaccggctgcagctgaaggccctggaggagctgaaccagcagctggagaagaggaaggagatggaggagcgggagaagaggaagatcatcgccgaggagaagcacaaggagtgggtgcagaagaagaatgagcagaagaggaaggagcgggagcagaagatcaacaaggagatggaggagaaggccgccaaggagctggagaaggagtacctgcaggagaaggccaaggagaagtaccaggagtggctgaagaagaagaatgcagaagaatgtgagaggaagaagaaggagaaggagaaggagaagcagcagcaggccgagatccaggagaagaaggagattgctgagaagaagttccaggagtggctggagaatgccaagcacaagcccaggcctgctgccaagagctatggctacgccaacgggaagctgaccggcttctacagcggcaacagctacccagagcccgccttctacaaccccatcccctggaagcccatccacatgcccccacccaaggaggccaaggacctgagcggcaggaagagcaagaggcctgtgatcagccagccccacaagagcagcagcctggtgatccacaaggcccggagcaacctgtgcctgggcaccctgtgccgcatccagaggtag

SEQ ID NO: 148007 - DNA, 2268 bp, synthetic construct
  misc_feature 1..2268: note = Description of Artificial Sequence: Synthetic coding sequence
  source 1..2268: mol_type = other DNA
atggagtacatcttccccaacacaggagtgctgtggagctggctgatcaacatcctgtgcaacagacgcatcgtgtggttcaccagcagccagctgccccggggccccccagccagcagcggcggccacagcttccacaccctgcgggagaggtctgagagccggctgtttgtggagagctatgctgctgcctggcagcccccaggcaccagcggcggggccagctgctgcagcagcctgagcgcccaggtgatgagcagcgagttcctggccgagctgcactgggaggatggctttgccatccctgtggccaatgaggagaacaagctgctggaggaccagctgagcaagctgaaggatgagcgggccagcctgcaggatgagctgcgggagtatgaggagcgcatcaacagcatgaccagccacttcaagaatgtgaagcaggagctgagcatcacccagagcctgtgcaaggcccgggagcgggagacagagagcgaggagcacttcaaggccatcgcccagcgggagctgggccgggtgaaggatgagatccagaggctggagaatgagatggccagcatcctggagaagaagagtgacaaggaaaatggcatcttcaaggccacccagaagctggatggcctgaagtgccagatgaactgggaccagcaggccctggaggcctggctggaggagagcgcccacaaggacagtgatgccctgaccctgcagaagtatgcccagcaggatgacaacaagatccgggccctgaccctgcagctggagcggctgaccctggagtgcaaccagaagaggaagatcctggacaatgagctgacagagaccatcagcgcccagctggagctggacaaggccgcccaggacttcaggaagatccacaatgaaaggcaggagctgatcaagcagtgggagaacaccatcgagcagatgcagaagagagatggagacatcgacaactgtgccctggagctggcccgcatcaagcaggagacccgggagaaggagaacctggtgaaggagaagatcaagttcctggagagcgagatcggcaacaacacagaatttgagaagaggatctctgtggccgacaggaagctgctgaagtgcaggacagcctaccaggaccacgagaccagccgcatccagctgaagggggagctggacagcctgaaggccaccgtgaacagaaccagcagtgacctggaggccctgaggaagaacatcagcaagatcaagaaggacatccacgaggagacagcccggctgcagaagaccaagaaccacaatgagatcatccagaccaagctgaaggagatcacagagaagaccatgtctgtggaggagaaggccaccaacctggaggacatgctgaaggaggaggagaaggatgtgaaggaggtggatgtgcagctgaacctgatcaagggcgtgctcttcaagaaggcccaggagctgcagacagagaccatgaaggagaaggctgtgctgtctgaaattgagggcaccaggagcagcctgaagcacctgaaccaccagctgcagaagctggactttgagaccctgaagcagcaggagatcatgtacagccaggacttccacatccagcaggtggagaggaggatgagccggctgaagggggagatcaacagcgaggagaagcaggccctggaggccaagatcgtggagctgaggaagagcctggaggagaagaagagcacctgtggcctgctggagacccagatcaagaagctgcacaatgacctgtacttcatcaagaaggcccacagcaagaacagtgatgagaagcagagcctgatgaccaagatcaatgagctgaacctcttcatcgacagaagtgagaaggagctggacaaggccaagggcttcaagcaggacctgatgattgaggacaacctgctgaagctggaggtgaagaggacccgggagatgctgcacagcaaggccgaggaggtgctgagcctggagaagaggaagcagcagctgtacacagccatggaggagaggacagaggagatcaaggtgcacaagaccatgctggccagccagatccgctacgtggaccaggagcgggagaacatcagcacagagttccgggagcggctgagcaagattgagaagctgaagaacagatatgagatcctgactgtggtgatgctgcccccagagggggaggaggagaagacccaggcctactacgtgatcaaggtgatgtccatgtcctag

SEQ ID NO: 148008 - DNA, 2826 bp, synthetic construct
  misc_feature 1..2826: note = Description of Artificial Sequence: Synthetic coding sequence
  source 1..2826: mol_type = other DNA
atgagcagcgagttcctggccgagctgcactgggaggatggctttgccatccctgtggccaatgaggagaacaagctgctggaggaccagctgagcaagctgaaggatgagcgggccagcctgcaggatgagctgcgggagtatgaggagcgcatcaacagcatgaccagccacttcaagaatgtgaagcaggagctgagcatcacccagagcctgtgcaaggcccgggagcgggagacagagagcgaggagcacttcaaggccatcgcccagcgggagctgggccgggtgaaggatgagatccagaggctggagaatgagatggccagcatcctggagaagaagagtgacaaggaaaatggcatcttcaaggccacccagaagctggatggcctgaagtgccagatgaactgggaccagcaggccctggaggcctggctggaggagagcgcccacaaggacagtgatgccctgaccctgcagaagtatgcccagcaggatgacaacaagatccgggccctgaccctgcagctggagcggctgaccctggagtgcaaccagaagaggaagatcctggacaatgagctgacagagaccatcagcgcccagctggagctggacaaggccgcccaggacttcaggaagatccacaatgaaaggcaggagctgatcaagcagtgggagaacaccatcgagcagatgcagaagagagatggagacatcgacaactgtgccctggagctggcccgcatcaagcaggagacccgggagaaggagaacctggtgaaggagaagatcaagttcctggagagcgagatcggcaacaacacagaatttgagaagaggatctctgtggccgacaggaagctgctgaagtgcaggacagcctaccaggaccacgagaccagccgcatccagctgaagggggagctggacagcctgaaggccaccgtgaacagaaccagcagtgacctggaggccctgaggaagaacatcagcaagatcaagaaggacatccacgaggagacagcccggctgcagaagaccaagaaccacaatgagatcatccagaccaagctgaaggagatcacagagaagaccatgtctgtggaggagaaggccaccaacctggaggacatgctgaaggaggaggagaaggatgtgaaggaggtggatgtgcagctgaacctgatcaagggcgtgctcttcaagaaggcccaggagctgcagacagagaccatgaaggagaaggctgtgctgtctgaaattgagggcaccaggagcagcctgaagcacctgaaccaccagctgcagaagctggactttgagaccctgaagcagcaggagatcatgtacagccaggacttccacatccagcaggtggagaggaggatgagccggctgaagggggagatcaacagcgaggagaagcaggccctggaggccaagatcgtggagctgaggaagagcctggaggagaagaagagcacctgtggcctgctggagacccagatcaagaagctgcacaatgacctgtacttcatcaagaaggcccacagcaagaacagtgatgagaagcagagcctgatgaccaagatcaatgagctgaacctcttcatcgacagaagtgagaaggagctggacaaggccaagggcttcaagcaggacctgatgattgaggacaacctgctgaagctggaggtgaagaggacccgggagatgctgcacagcaaggccgaggaggtgctgagcctggagaagaggaagcagcagctgtacacagccatggaggagaggacagaggagatcaaggtgcacaagaccatgctggccagccagatccgctacgtggaccaggagcgggagaacatcagcacagagttccgggagcggctgagcaagattgagaagctgaagaacagatatgagatcctgactgtggtgatgctgcccccagagggggaggaggagaagacccaggcctactacgtgatcaaggccgcccaggagaaggaggagctgcagcgggagggggactgcctggatgccaagatcaacaaggccgagaaggagatctatgccctggagaacaccctgcaggtgctgaacagctgcaacaacaactacaagcagagcttcaagaaggtgacccccagcagtgatgaatatgagctgaagatccagctggaggagcagaagagagctgtggatgagaagtaccgctacaagcagaggcagatccgggagctgcaggaggacatccagagcatggagaacaccctggatgtgattgagcacctggccaacaacgtgaaggagaagctgtctgagaagcaggcctacagcttccagctgagcaaggagacagaggagcagaagcccaagctggagcgggtgaccaagcagtgtgccaagctgaccaaggagatccggctgctgaaggacaccaaggatgagaccatggaggagcaggacatcaagctgcgggagatgaagcagttccacaaggtgattgatgagatgctggtggacatcatcgaggagaacacagagatccgcatcatcctgcagacctacttccagcagagcggcctggagctgcccacagccagcaccaagggcagccggcagagcagccgcagccccagccacaccagcctgagcgcccggagcagccgcagcaccagcaccagcaccagccagagcagcatcaaggtgctggagctgaagtttcctgccagcagcagcctggtgggcagccccagccggcccagcagcgccagcagcagcagcagcaatgtgaagagcaagaagagcagcaagtag

SEQ ID NO: 148009 - DNA, 1740 bp, synthetic construct
  misc_feature 1..1740: note = Description of Artificial Sequence: Synthetic coding sequence
  source 1..1740: mol_type = other DNA
atggccgagcccggcggggccgccggccgcagccacccagaagatggcagcgccagcgagggggagaaggagggcaacaatgaaagccacatggtgagccccccagagaaggatgatggccagaagggggaggaggccgtgggcagcacagagcaccctgaggaggtgaccacccaggccgaggccgccatcgaggagggggaggtggagacagaaggagaggccgctgtggagggggaggaggaggccgtgtcctatggagatgctgagagcgaggaggagtactactacacagagaccagcagccctgagggccagatctctgctgctgacaccacctacccctacttcagccccccccaggagctgcccggggaggaggcctatgattctgtgtctggagaggccggcctgcagggcttccagcaggaggccaccggccccccagagagccgggagcggcgggtgaccagccctgagcccagccatggagtgctgggccccagcgagcagatgggccaggtgaccagcggccctgctgtgggccgcctgaccggcagcacagaggagccccagggccaggtgctgcccatgggcgtgcagcaccgcttccggctgagccacggcagtgacatcgagagcagtgacctggaggagtttgtgtcccaggagcctgtgatccccccaggagtgcctgatgcccacccccgggagggggacctgcccgtcttccaggaccagatccagcagcccagcacagaggagggcgccatggccgagcgggtggagagcgagggcagtgatgaggaggccgaggatgagggcagccagctggtggtgctggaccctgaccaccccctgatggtgcgcttccaggccgccctgaagaactacctgaaccggcagatcgagaagctgaagctggacctgcaggagctggtggtggccaccaagcagagccgggcccagaggcaggagctgggcgtgaacctgtatgaggtgcagcagcacctggtgcacctgcagaagctgctggagaagagccatgacagacatgccatggccagcagcgagcggcggcagaaggaggaggagctgcaggccgcccgggccctgtacaccaagacctgtgccgccgccaatgaggagaggaagaagctggccgccctgcagacagagatggagaacctggccctgcacctgttctacatgcagaacatcgaccaggacatgagagatgacatccgggtgatgacccaggtggtgaagaaggccgagacagagcgcatccgggcagaaattgagaagaagaagcaggacctgtatgtggaccagctgaccacccgggcccagcagctggaggaggacatcgccctgtttgaggcccagtacctggcccaggccgaggacacccgcatcctgaggaaggctgtgtctgaggcctgcacagaaattgatgccatctctgtggagaagaggcgcatcatgcagcagtgggccagcagcctggtgggcatgaagcacagagatgaggcccacagagctgtgctggaggccctgtctgtgtccctggagcgcttccccagccagaacatcaacacagcccggagccggctgagcaccacctggcacagcgctggcatcctgctgcggggcagcttcctgcccggggccagccgggcctttgcctctgtgtgctatggaggagctgctgtggacaaccgcatccgggagtgctag

SEQ ID NO: 148010 - DNA, 1437 bp, synthetic construct
  misc_feature 1..1437: note = Description of Artificial Sequence: Synthetic coding sequence
  source 1..1437: mol_type = other DNA
atggccgagcccggcggggccgccggccgcagccacccagaagatggcagcgccagcgagggggagaaggagggcaacaatgaaagccacatggtgagccccccagagaaggatgatggccagaagggggaggaggccgtgggcagcacagagcaccctgaggaggtgaccacccaggccgaggccgccatcgaggagggggaggtggagacagaaggagaggccgctgtggagggggaggaggaggccgtgtcctatggagatgctgagagcgaggaggagtactactacacagagaccagcagccctgagggccagatctctgctgctgacaccacctacccctacttcagccccccccaggagctgcccggggaggaggcctatgattctgtgtctggagaggccggcctgcagggcttccagcaggaggccaccggccccccagagagccgggagcggcgggtgaccagccctgagcccagccatggagtgctgggccccagcgagcagatgggccaggtgaccagcggccctgctgtgggccgcctgaccggcagcacagaggagccccagggccaggtgctgcccatgggcgtgcagcaccgcttccggctgagccacggcagtgacatcgagagcagtgacctggaggagtttgtgtcccaggagcctgtgatccccccaggagtgcctgatgcccacccccgggagggggacctgcccgtcttccaggaccagatccagcagcccagcacagaggagggcgccatggccgagcgggtggagagcgagggcagtgatgaggaggccgaggatgagggcagccagctggtggtgctggaccctgaccaccccctgatggtgcgcttccaggccgccctgaagaactacctgaaccggcagatcgagaagctgaagctggacctgcaggagctggtggtggccaccaagcagagccgggcccagaggcaggagctgggcgtgaacctgtatgaggtgcagcagcacctggtgcacctgcagaagctgctggagaagagccatgacagacatgccatggccagcagcgagcggcggcagaaggaggaggagctgcaggccgcccgggccctgtacaccaagacctgtgccgccgccaatgaggagaggaagaagctggccgccctgcagacagagatggagaacctggccctgcacctgttctacatgcagaacatcgaccaggacatgagagatgacatccgggtgatgacccaggtggtgaagaaggccgagacagagcgcatccgggcagaaattgagaagaagaagcagggcgtgggggacaccggggccgccttcatccccaagaccacccagggcgaccaggtgtctggccggggcaagaagaagccaggcaccgtggtggcccgggtgtccccagctgagctgtag

SEQ ID NO: 148011 - DNA, 3093 bp, synthetic construct
  misc_feature 1..3093: note = Description of Artificial Sequence: Synthetic coding sequence
  source 1..3093: mol_type = other DNA
atggccgagcccggcggggccgccggccgcagccacccagaagatggcagcgccagcgagggggagaaggagggcaacaatgaaagccacatggtgagccccccagagaaggatgatggccagaagggggaggaggccgtgggcagcacagagcaccctgaggaggtgaccacccaggccgaggccgccatcgaggagggggaggtggagacagaaggagaggccgctgtggagggggaggaggaggccgtgtcctatggagatgctgagagcgaggaggagtactactacacagagaccagcagccctgagggccagatctctgctgctgacaccacctacccctacttcagccccccccaggagctgcccggggaggaggcctatgattctgtgtctggagaggccggcctgcagggcttccagcaggaggccaccggccccccagagagccgggagcggcgggtgaccagccctgagcccagccatggagtgctgggccccagcgagcagatgggccaggtgaccagcggccctgctgtgggccgcctgaccggcagcacagaggagccccagggccaggtgctgcccatgggcgtgcagcaccgcttccggctgagccacggcagtgacatcgagagcagtgacctggaggagtttgtgtcccaggagcctgtgatccccccaggagtgcctgatgcccacccccgggagggggacctgcccgtcttccaggaccagatccagcagcccagcacagaggagggcgccatggccgagcgggtggagagcgagggcagtgatgaggaggccgaggatgagggcagccagctggtggtgctggaccctgaccaccccctgatggtgcgcttccaggccgccctgaagaactacctgaaccggcagatcgagaagctgaagctggacctgcaggagctggtggtggccaccaagcagagccgggcccagaggcaggagctgggcgtgaacctgtatgaggtgcagcagcacctggtgcacctgcagaagctgctggagaagagccatgacagacatgccatggccagcagcgagcggcggcagaaggaggaggagctgcaggccgcccgggccctgtacaccaagacctgtgccgccgccaatgaggagaggaagaagctggccgccctgcagacagagatggagaacctggccctgcacctgttctacatgcagaacatcgaccaggacatgagagatgacatccgggtgatgacccaggtggtgaagaaggccgagacagagcgcatccgggcagaaattgagaagaagaagcaggacctgtatgtggaccagctgaccacccgggcccagcagctggaggaggacatcgccctgtttgaggcccagtacctggcccaggccgaggacacccgcatcctgaggaaggctgtgtctgaggcctgcacagaaattgatgccatctctgtggagaagaggcgcatcatgcagcagtgggccagcagcctggtgggcatgaagcacagagatgaggcccacagagctgtgctggaggccctgcggggctgccagcaccaggccaagagcacagatggagaaattgaggcctacaagaagagcatcatgaaggaggaggagaagaatgagaagctggccagcatcctgaacagaacagaaacagaggccaccctgctgcagaagctgaccacccagtgcctgaccaagcaggtggccctgcagagccagttcaacacctaccgcctgaccctgcaggacacagaagatgccctgagccaggaccagctggagcagatgatcctgacagaggagctgcaggccatccggcaggccatccagggcgagctggagctgcggaggaagacagatgctgccatccgggagaagctgcaggagcacatgaccagcaacaagaccaccaagtacttcaaccagctgatcctgcggctgcagaaggagaagaccaacatgatgacccacctgagcaagatcaatggagacatcgcccagaccaccctggacatcacccacaccagcagccggctggatgcccaccagaagaccctggtggagctggaccaggatgtgaagaaggtgaatgagctgatcaccaacagccagagcgagatcagcaggaggaccatcctgattgaaaggaagcagggcctcatcaacttcctgaacaagcagctggagaggatggtgtctgagctgggcggggaggaggtgggccccctggagctggagatcaagaggctgagcaagctgattgatgaacatgatggcaaggctgtgcaggcccaggtgacctggctgcggctgcagcaggagatggtgaaggtgacccaggagcaggaggagcagctggccagcctggatgccagcaagaaggagctgcacatcatggagcagaagaagctgcgggtggagagcaagattgagcaggagaagaaggagcagaaggagattgagcaccacatgaaggacctggacaatgacctgaagaagctgaacatgctgatgaacaagaaccgctgcagcagcgaggagctggagcagaacaacagagtgacagaaaatgaatttgtgcgcagcctgaaggccagcgagcgggagaccatcaagatgcaggacaagctgaaccagctgtctgaggagaaggccaccctgctgaaccagctggtggaggccgagcaccagatcatgctgtgggagaagaagatccagctggccaaggagatgaggagctctgtggacagcgagatcggccagacagagatccgggccatgaagggggagatccacaggatgaagaagtactgcaggaccacccaggatgcccaccgccacgtgcatgagcagcacggcacccatgctggcacctgcaccaagaacacaggccgggcccaggcccgggcccggaccaccagagatgcccggggccacgtgcatgagcagcacggcaccagggctggcacctgcaccaacaacacaggccgggcccaggcccgggcccggaccagagatgccaggagacatgtgcatgagcacaggacccacacagcccgggcctag

SEQ ID NO: 148012 - DNA, 3429 bp, synthetic construct
  misc_feature 1..3429: note = Description of Artificial Sequence: Synthetic coding sequence
  source 1..3429: mol_type = other DNA
atggccgagcccggcggggccgccggccgcagccacccagaagatggcagcgccagcgagggggagaaggagggcaacaatgaaagccacatggtgagccccccagagaaggatgatggccagaagggggaggaggccgtgggcagcacagagcaccctgaggaggtgaccacccaggccgaggccgccatcgaggagggggaggtggagacagaaggagaggccgctgtggagggggaggaggaggccgtgtcctatggagatgctgagagcgaggaggagtactactacacagagaccagcagccctgagggccagatctctgctgctgacaccacctacccctacttcagccccccccaggagctgcccggggaggaggcctatgattctgtgtctggagaggccggcctgcagggcttccagcaggaggccaccggccccccagagagccgggagcggcgggtgaccagccctgagcccagccatggagtgctgggccccagcgagcagatgggccaggtgaccagcggccctgctgtgggccgcctgaccggcagcacagaggagccccagggccaggtgctgcccatgggcgtgcagcaccgcttccggctgagccacggcagtgacatcgagagcagtgacctggaggagtttgtgtcccaggagcctgtgatccccccaggagtgcctgatgcccacccccgggagggggacctgcccgtcttccaggaccagatccagcagcccagcacagaggagggcgccatggccgagcgggtggagagcgagggcagtgatgaggaggccgaggatgagggcagccagctggtggtgctggaccctgaccaccccctgatggtgcgcttccaggccgccctgaagaactacctgaaccggcagatcgagaagctgaagctggacctgcaggagctggtggtggccaccaagcagagccgggcccagaggcaggagctgggcgtgaacctgtatgaggtgcagcagcacctggtgcacctgcagaagctgctggagaagagccatgacagacatgccatggccagcagcgagcggcggcagaaggaggaggagctgcaggccgcccgggccctgtacaccaagacctgtgccgccgccaatgaggagaggaagaagctggccgccctgcagacagagatggagaacctggccctgcacctgttctacatgcagaacatcgaccaggacatgagagatgacatccgggtgatgacccaggtggtgaagaaggccgagacagagcgcatccgggcagaaattgagaagaagaagcaggacctgtatgtggaccagctgaccacccgggcccagcagctggaggaggacatcgccctgtttgaggcccagtacctggcccaggccgaggacacccgcatcctgaggaaggctgtgtctgaggcctgcacagaaattgatgccatctctgtggagaagaggcgcatcatgcagcagtgggccagcagcctggtgggcatgaagcacagagatgaggcccacagagctgtgctggaggccctgcggggctgccagcaccaggccaagagcacagatggagaaattgaggcctacaagaagagcatcatgaaggaggaggagaagaatgagaagctggccagcatcctgaacagaacagaaacagaggccaccctgctgcagaagctgaccacccagtgcctgaccaagcaggtggccctgcagagccagttcaacacctaccgcctgaccctgcaggacacagaagatgccctgagccaggaccagctggagcagatgatcctgacagaggagctgcaggccatccggcaggccatccagggcgagctggagctgcggaggaagacagatgctgccatccgggagaagctgcaggagcacatgaccagcaacaagaccaccaagtacttcaaccagctgatcctgcggctgcagaaggagaagaccaacatgatgacccacctgagcaagatcaatggagacatcgcccagaccaccctggacatcacccacaccagcagccggctggatgcccaccagaagaccctggtggagctggaccaggatgtgaagaaggtgaatgagctgatcaccaacagccagagcgagatcagcaggaggaccatcctgattgaaaggaagcagggcctcatcaacttcctgaacaagcagctggagaggatggtgtctgagctgggcggggaggaggtgggccccctggagctggagatcaagaggctgagcaagctgattgatgaacatgatggcaaggctgtgcaggcccaggtgacctggctgcggctgcagcaggagatggtgaaggtgacccaggagcaggaggagcagctggccagcctggatgccagcaagaaggagctgcacatcatggagcagaagaagctgcgggtggagagcaagattgagcaggagaagaaggagcagaaggagattgagcaccacatgaaggacctggacaatgacctgaagaagctgaacatgctgatgaacaagaaccgctgcagcagcgaggagctggagcagaacaacagagtgacagaaaatgaatttgtgcgcagcctgaaggccagcgagcgggagaccatcaagatgcaggacaagctgaaccagctgtctgaggagaaggccaccctgctgaaccagctggtggaggccgagcaccagatcatgctgtgggagaagaagatccagctggccaaggagatgaggagctctgtggacagcgagatcggccagacagagatccgggccatgaagggggagatccacaggatgaaggtgcggctgggccagctgctgaagcagcaggagaagatgatccgggccatggagctggccgtggcccggcgggagaccgtgaccacccaggccgagggccagaggaagatggacaggaaggccctgaccaggacagacttccaccacaagcagctggagctgcggaggaagatcagagatgtgaggaaggccacagatgaatgtaccaagacagtgctggagctggaggagacccagagaaatgtgagcagcagcctgctggagaagcaggagaagctgagcgtcatccaggccgactttgacaccctggaggccgacctgacccggctgggcgccctgaagaggcagaacctgtctgaaattgtggccctgcagacccggctgaagcacctgcaggccgtgaaggagggccgctacgtgttcctgttccgcagcaagcagagcctggtgctggagcggcagaggctggacaagaggctggccctgattgccaccatcctggacagagtgagagatgagtacccccagttccaggaggccctgcacaaggtgtcccagatgattgccaacaagctggagagccctggccccagctag

SEQ ID NO: 148013 - DNA, 921 bp, synthetic construct
  misc_feature 1..921: note = Description of Artificial Sequence: Synthetic coding sequence
  source 1..921: mol_type = other DNA
atggccgaggtgtccattgaccagagcaagctgcccggggtgaaggaggtgtgccgggactttgctgtgctggaggaccacaccctggcccacagcctgcaggagcaggagattgagcaccacctggccagcaatgtgcagaggaaccggctggtgcagcacgacctgcaggtggccaagcagctgcaggaggaggacctgaaggcccaggcccagctgcagaagcgctacaaggacctggagcagcaggactgtgaaattgcccaggagatccaggagaagctggccattgaagctgagcggcggcgcatccaggagaagaaggatgaggacatcgcccggctgctgcaggagaaggagctgcaggaggagaagaagaggaagaagcacttccctgagttccctgccacccgggcctatgctgacagctactactatgaagatggcggcatgaagccccgggtgatgaaggaggccgtgtccacccccagcaggatggcccaccgggaccaggagtggtatgatgctgagatcgccaggaagctgcaggaggaggagctgctggccacccaggtggacatgagagctgcccaggtggcccaggatgaggagatcgcccggctgctgatggccgaggagaagaaggcctacaagaaggccaaggagcgggagaagagcagcctggacaagaggaagcaggaccctgagtggaagcccaagacagccaaggccgccaacagcaagagcaaggagagtgatgagccccaccacagcaagaatgaaagacctgcccggcccccaccacccatcatgacagatggagaagatgctgactacacccacttcaccaaccagcagagcagcaccaggcacttcagcaagtctgagagcagccacaagggcttccactacaagcactag

SEQ ID NO: 148014 - DNA, 1449 bp, synthetic construct
  misc_feature 1..1449: note = Description of Artificial Sequence: Synthetic coding sequence
  source 1..1449: mol_type = other DNA
atggccgaggtgtccattgaccagagcaagctgcccggggtgaaggaggtgtgccgggactttgctgtgctggaggaccacaccctggcccacagcctgcaggagcaggagattgagcaccacctggccagcaatgtgcagaggaaccggctggtgcagcacgacctgcaggtggccaagcagctgcaggaggaggacctgaaggcccaggcccagctgcagaagcgctacaaggacctggagcagcaggactgtgaaattgcccaggagatccaggagaagctggccattgaagctgagcggcggcgcatccaggagaagaaggatgaggacatcgcccggctgctgcaggagaaggagctgcaggaggagaagaagaggaagaagcacttccctgagttccctgccacccgggcctatgctgacagctactactatgaagatggagaccagcccggcagcagaagagcccgggagctgggcagcggcttcagccggccctgccgcctgcagagagatggcaagacagtgaagcacaagaaggagaagccagagcaccccctggagaacctggaggagcctgagcagcactgcagcagcaagaggagcctgagcagcagcagcagcggcaagggccgggacaacccccacatcaacaatgagcagcacgagaggaagaggagcacccaggagcggccccggcggcccctgctgcccaccatcagcggggaggtgttcctgagcacagaatgtgatgactgggagaccaagatcaaccaccagaccaggaactgggagaagcagagccgccaccaggaccggctgagccccaagagcagccagaaggccggcctgcactgcaaggaggtggtgtatggccgggaccacggccagggcgagcacaggaagaggaggcaccggcccaggaccccacccttcagcgagagcgaggagcagctgcacctgcatgatgctggcatgaagccccgggtgatgaaggaggccgtgtccacccccagcaggatggcccaccgggaccaggagtggtatgatgctgagatcgccaggaagctgcaggaggaggagctgctggccacccaggtggacatgagagctgcccaggtggcccaggatgaggagatcgcccggctgctgatggccgaggagaagaaggcctacaagaaggccaaggagcgggagaagagcagcctggacaagaggaagcaggaccctgagtggaagcccaagacagccaaggccgccaacagcaagagcaaggagagtgatgagccccaccacagcaagaatgaaagacctgcccggcccccaccacccatcatgacagatggagaagatgctgactacacccacttcaccaaccagcagagcagcaccaggcacttcagcaagtctgagagcagccacaagggcttccactacaagcactag

SEQ ID NO: 148015 - DNA, 1425 bp, synthetic construct
  misc_feature 1..1425: note = Description of Artificial Sequence: Synthetic coding sequence
  source 1..1425: mol_type = other DNA
atggctgacagcgccagcgagagtgacacagatggagctgggggcaacagcagcagcagcgctgccatgcagagcagctgcagcagcaccagcggcggcggcggcggcggcggcggcggcggcggcggcggcaagagcggcggcatcgtcatcagccccttccggctggaggagctgaccaaccggctggccagcctgcagcaggagaacaaggtgctgaagattgagctggagacctacaagctgaagtgcaaggccctgcaggaggagaacagagacctgaggaaggcctctgtgaccatccaggcccgggcagagcaggaggaggagttcatcagcaacaccctcttcaagaagatccaggccctgcagaaggagaaggagaccctggccgtgaactatgagaaggaggaggagttcctgaccaatgagctgagcaggaagctgatgcagctgcagcacgagaaggccgagctggagcagcacctggagcaggagcaggagttccaggtgaacaagctgatgaagaagatcaagaagctggagaatgacaccatcagcaagcagctgaccctggagcagctgcggcgggagaagattgacctggagaacaccctggagcaggagcaggaggccctggtgaaccggctgtggaagaggatggacaagctggaggccgagaagaggatcctgcaggagaagctggaccagcctgtgtctgccccacccagcccccgggacatctccatggagattgacagccctgagaacatgatgaggcacatccgcttcctgaagaatgaggtggagcggctgaagaagcagctgcgggccgcccagctgcagcacagcgagaagatggcccagtacctggaggaggagcggcacatgagggaggagaacctgcggctgcagaggaagctgcagcgggagatggagcggcgggaggccctgtgccggcagctgtctgagagcgagagcagcctggagatggatgatgagcgctacttcaatgagatgtctgcccagggcctgcggcccaggacagtgagcagccccatcccctacacccccagccccagcagcagccggcccatcagccctggcctgtcctatgccagccacacagtgggcttcaccccacccaccagcctgacccgggccggcatgagctactacaacagccctggcctgcacgtgcagcacatgggcaccagccacggcatcacccggcccagccccaggaggagcaacagcccagacaagttcaagaggcccaccccaccacccagccccaacacccagacccctgtgcagcccccacctcctcctcctcctccacccatgcagcccaccgtgcccagcgctgccaccagccagcccacccccagccagcacagcgcccaccccagcagccagccctag

SEQ ID NO: 148016 - DNA, 2055 bp, synthetic construct
  misc_feature 1..2055: note = Description of Artificial Sequence: Synthetic coding sequence
  source 1..2055: mol_type = other DNA
atgaaccccccagctgccttcctggccggccggcagaacatcggcagcgaggtggagatcagcaccatcgagaagcagaggaaggagctgcagctgctgattggagagctgaaggaccgggacaaggagctgaatgacatggtggccgtgcaccagcagcagctgctgtcctgggaggaggaccggcagaaggtgctgaccctggaggagcgctgcagcaagctggagggggagctgcacaagaggacagagatcatccgcagcctgaccaagaaggtgaaggccctggagagcaaccagatggagtgccagacagccctgcagaagacccagctgcagctgcaggagatggcccagaaggccacccacagcagcctgctgtctgaggacctggaggccagaaatgagaccctgagcaacaccctggtggagctgagcgcccaggtgggccagctgcaggcccgggagcaggccctgaccaccatgatcaagctgaaggacaaggacatcattgaagctgtgaaccacatcgctgactgcagcggcaagttcaagatgctggagcacgccctgagagatgccaagatggccgagacctgcatcgtgaaggagaagcaggactacaagcagaagctgaaggccctgaagattgaggtgaacaagctgaaggaggacctgaatgagaagaccacagagaacaatgagcagcgggaggagatcatccggctgaagcaggagaagagctgcctgcatgatgagctgctcttcaccgtggagcgggagaagaggaaggatgagctgctgaacatcgccaagagcaagcaggagaggaccaacagcgagctgcacaacctgcggcagatctacgtgaagcagcagagcgacctgcagttcctgaacttcaacgtggagaacagccaggagctgatccagatgtatgacagcaagatggaggagagcaaggccctggacagcagccgggacatgtgcctgagtgacctggagaacaaccaccccaaggtggacatcaagcgggagaagaaccagaagagcctcttcaaggaccagaagtttgaggccatgctggtgcagcagaacagaagtgacaagagcagctgtgatgagtgcaaggagaagaagcagcagattgacacagtgtttggagagaagagcgtcatcaccctgagcagcatcttcaccaaggacctggtggagaagcacaacctgccctggagcctgggcggcaagacccagatcgagcctgagaacaagatcaccctgtgcaagatccacaccaagagccccaagtgccacggcaccggggtgcagaatgaaggcaagcagcccagcgagacccccaccctgagtgatgagaagcagtggcatgatgtgtctgtgtacctgggcctgaccaactgccccagcagcaagcaccctgagaagctggatgtggagtgccaggaccagatggagaggtctgagatcagctgctgccagaagaatgaggcctgcctgggggagagcggcatgtgtgacagcaagtgctgccaccccagcaacttcatcatcgaggcccctggccacatgtctgatgtggagtggatgagcatcttcaagcccagcaagatgcagagaattgtgcggctgaagagcggctgcacctgcagcgagagcatctgtggcacccagcacgacagccctgccagcgagctgattgccatccaggacagccacagcctgggcagcagcaagagcgccctgagagaagatgaaacagagagcagcagcaacaagaagaacagccccaccagcctgctgatctacaaggatgccccagccttcaatgagaaggccagcatcgtgctgcccagccaggatgacttcagccccaccagcaagctgcagaggctgctggccgagagccggcagatggtgacagacctggagctgagcaccctgctgcccatcagccatgagaacctgaccggcagcgccaccaacaagtctgaggtgcctgaggagagcgcccagaagaacacctttgtgtcctactag

SEQ ID NO: 148017 - DNA, 1338 bp, synthetic construct
  misc_feature 1..1338: note = Description of Artificial Sequence: Synthetic coding sequence
  source 1..1338: mol_type = other DNA
atgcccaacagcagccccaaggaccccaccacagccagcggaaatggcagcaaggtggagcgggagaagaggaaggatgagctgctgaacatcgccaagagcaagcaggagaggaccaacagcgagctgcacaacctgcggcagatctacgtgaagcagcagagcgacctgcagttcctgaacttcaacgtggagaacagccaggagctgatccagatgtatgacagcaagatggaggagagcaaggccctggacagcagccgggacatgtgcctgagtgacctggagaacaaccaccccaaggtggacatcaagcgggagaagaaccagaagagcctcttcaaggaccagaagtttgaggccatgctggtgcagcagaacagaagtgacaagagcagctgtgatgagtgcaaggagaagaagcagcagattgacacagtgtttggagagaagagcgtcatcaccctgagcagcatcttcaccaaggacctggtggagaagcacaacctgccctggagcctgggcggcaagacccagatcgagcctgagaacaagatcaccctgtgcaagatccacaccaagagccccaagtgccacggcactggagtgcagaatgaaggcaagcagcccagcgagacccccaccctgagtgatgagaagcagtggcatgatgtgtctgtgtacctgggcctgaccaactgccccagcagcaagcaccctgagaagctggatgtggagtgccaggaccagatggagaggtctgagatcagctgctgccagaagaatgaggcctgcctgggggagagcggcatgtgtgacagcaagtgctgccaccccagcaacttcatcatcgaggcccctggccacatgtctgatgtggagtggatgagcatcttcaagcccagcaagatgcagagaattgtgcggctgaagagcggctgcacctgcagcgagagcatctgtggcacccagcacgacagccctgccagcgagctgattgccatccaggacagccacagcctgggcagcagcaagagcgccctgcgggaggatgaaacagagagcagcagcaacaagaagaacagccccaccagcctgctgatctacaaggatgccccagccttcaatgagaaggccagcatcgtgctgcccagccaggatgacttcagccccaccagcaagctgcagaggctgctggccgagagccggcagatggtgacagacctggagctgagcaccctgctgcccatcagccatgagaacctgactggaagtgccaccaacaagtctgaggtgcctgaggagagcgcccagaagaacacctttgtgtcctactag

SEQ ID NO: 148018 - DNA, 2049 bp, synthetic construct
  misc_feature 1..2049: note = Description of Artificial Sequence: Synthetic coding sequence
  source 1..2049: mol_type = other DNA
atgaaccccccagctgccttcctggccggccggcagaacatcggcagcgaggtggagatcagcaccatcgagaagcagaggaaggagctgcagctgctgattggagagctgaaggaccgggacaaggagctgaatgacatggtggccgtgcaccagcagcagctgctgtcctgggaggaggaccggcagaaggtgctgaccctggaggagcgctgcagcaagctggagggggagctgcacaagaggacagagatcatccgcagcctgaccaagaaggtgaaggccctggagagcaaccagatggagtgccagacagccctgcagaagacccagctgcagctgcaggagatggcccagaaggccacccacagcagcctgctgtctgaggacctggaggccagaaatgagaccctgagcaacaccctggtggagctgagcgcccaggtgggccagctgcaggcccgggagcaggccctgaccaccatgatcaagctgaaggacaaggacatcattgaagctgtgaaccacatcgctgactgcagcggcaagttcaagatgctggagcacgccctgagagatgccaagatggccgagacctgcatcgtgaaggagaagcaggactacaagcagaagctgaaggccctgaagattgaggtgaacaagctgaaggaggacctgaatgagaagaccacagagaacaatgagcagcgggaggagatcatccggctgaagcaggagaagagctgcctgcatgatgagctgctcttcaccgtggagcgggagaagaggaaggatgagctgctgaacatcgccaagagcaagcaggagaggaccaacagcgagctgcacaacctgcggcagatctacgtgaagcagcagagcgacctgcagttcctgaacttcaacgtggagaacagccaggagctgatccagatgtatgacagcaagatggaggagagcaaggccctggacagcagccgggacatgtgcctgagtgacctggagaacaaccaccccaaggtggacatcaagcgggagaagaaccagaagagcctcttcaaggaccagaagtttgaggccatgctggtgcagcagaacagaagtgacaagagcagctgtgatgagtgcaaggagaagaagcagcagattgacacagtgtttggagagaagagcgtcatcaccctgagcagcatcttcaccaaggacctggtggagaagcacaacctgccctggagcctgggcggcaagacccagatcgagcctgagaacaagatcaccctgtgcaagatccacaccaagagccccaagtgccacggcaccggggtgcagaatgaaggcaagcagcccagcgagacccccaccctgagtgatgagaagcagtggcatgatgtgtctgtgtacctgggcctgaccaactgccccagcagcaagcaccctgagaagctggatgtggagtgccaggaccagatggagaggtctgagatcagctgctgccagaagaatgaggcctgcctgggggagagcggcatgtgtgacagcaagtgctgccaccccagcaacttcatcatcgaggcccctggccacatgtctgatgtggagtggatgagcatcttcaagcccagcaagatgcagagaattgtgcggctgaagagcggctgcacctgcagcgagagcatctgtggcacccagcacgacagccctgccagcgagctgattgccatccaggacagccacagcctgggcagcagcaagagcgccctgagagaagatgaaacagagagcagcagcaacaagaagaacagccccaccagcctgctgatctacaaggatgccccagccttcaatgagaaggccagcatcgtgctgcccagccaggatgacttcagccccaccagcaagctgcagaggctgctggccgagagccggcagatggtgacagacctggagctgagcaccctgctgcccatcagccatgagaacctgaccggcagcgccaccaacatcagccacctgtgtggccggcagaaggctgacaccaacacagaatag

SEQ ID NO: 148019 - DNA, 1494 bp, synthetic construct
  misc_feature 1..1494: note = Description of Artificial Sequence: Synthetic coding sequence
  source 1..1494: mol_type = other DNA
atgcccaagaaggagaagatggccaagacccccctgagtgatgagaagcagctgctgctcttccagcagaagctgctggccgaggaggagatggccaagaagaaggagcggctgctgagccagttcctgaaggacaagctggccaaggaggagcacaacagcgccctgaacctgaacaagatcaacacccagtggaggacagtgctgcgggaggtgaagacccgggagctgcacaaggacatcgagatcctgagccagacctttgagcgggtggtggactgcaaggacaacgtcatcaagagcctggccaaggacctgtctgaggccgaggagcagtatgcccacgccctgcggagccacctgcacaacgtggaccagctgctggccctgcagaggcaccggctgagcctgctggaggagagctacaacatggagctggaggccctgaccaaggagtttgaaacagagaggaagaccatcatcgaccagcacgagaaggagatccactacctgcaggacatcttcatggccatggagcagaactacattgattctgaatatgagagcaagctggagttccagagcatgtggaatgacctgaagaacatgaacctggaggagaagcacttcctgcggctgcacctggagaacagagtggaggacctgtggaggaagttccaggatgtgctgaagaactacacagatgccacagaggacaggaaggccgcctttgagaccctgcaggtgaaggatgagaagagcagcaaggagattgaggtgcagatgaagaagatccagaagctgcaggatgccatcaccatcagcaagggcaagatcatgatccacagccgggagagtgaagatgaaaatcgctacatcagaaatgacaaggagctggtgctggtgcagctgaggaagctgaaggcccagaggacccaggcccgggccgccagccagaagaacctggtgcggctgaccctggagagcaatgccaccctgaaggccctgaggaagatcgtggacaagggggagaagatcctgaagctggccgagatctgcaggaagtttgaaacagaggaggagaaggtgctgcccttctacagctctgtgctgacccccaaggagcaggagggcatccagaagaacaacctggaggagctgacagaggagctgaccaaggtgatggtggactacatcggcatggagaacttctggaagcgctacaacaaggtgaagctggagcagctgagcctgcagcacagaagagcccagctgctggacatcaatggcaagctgcgggagatgctgaagcagtacctggatggcatctctgtgtctgatgaggtgctgagccagctgaaccccctcttcatcgtgaactaccagagcaacctgctgcagcccctgagcatcagaattgcccaccctggcagcaccagccccagcgccccctggagggaccagaggaggagcttcttcctgggcagcagctag

SEQ ID NO: 148020 - DNA, 1455 bp, synthetic construct
  misc_feature 1..1455: note = Description of Artificial Sequence: Synthetic coding sequence
  source 1..1455: mol_type = other DNA
atgcccaagaaggagaagatggccaagacccccctgagtgatgagaagcagctgctgctcttccagcagaagctgctggccgaggaggagatggccaagaagaaggagcggctgctgagccagttcctgaaggacaagctggccaaggaggagcacaacagcgccctgaacctgaacaagatcaacacccagtggaggacagtgctgcgggaggtgaagacccgggagctgcacaaggacatcgagatcctgagccagacctttgagcgggtggtggactgcaaggacaacgtcatcaagagcctggccaaggacctgtctgaggccgaggagcagtatgcccacgccctgcggagccacctgcacaacgtggaccagctgctggccctgcagaggcaccggctgagcctgctggaggagagctacaacatggagctggaggccctgaccaaggagtttgaaacagagaggaagaccatcatcgaccagcacgagaaggagatccactacctgcaggacatcttcatggccatggagcagaactacattgattctgaatatgagagcaagctggagttccagagcatgtggaatgacctgaagaacatgaacctggaggagaagcacttcctgcggctgcacctggagaacagagtggaggacctgtggaggaagttccaggatgtgctgaagaactacacagatgccacagaggacaggaaggccgcctttgagaccctgcaggtgaaggatgagaagagcagcaaggagattgaggtgcagatgaagaagatccagaagctgcaggatgccatcaccatcagcaagggcaagatcatgatccacagccgggagagtgaagatgaaaatcgctacatcagaaatgacaaggagctggtgctggtgcagctgaggaagctgaaggcccagaggacccaggcccgggccgccagccagaagaacctggtgcggctgaccctggagagcaatgccaccctgaaggccctgaggaagatcgtggacaagggggagaagatcctgaagctggccgagatctgcaggaagtttgaaacagaggaggagaaggtgctgcccttctacagctctgtgctgacccccaaggagcaggagggcatccagaagaacaacctggaggagctgacagaggagctgaccaaggtgatggtggactacatcggcatggagaacttctggaagcgctacaacaaggtgaagctggagcagctgagcctgcagcacagaagagcccagctgctggacatcaatggcaagctgcgggagatgctgaagcagtacctggatggcatctctgtgtctgatgaggtgctgagccagctgaaccccctcttcatcgtgaactaccagagcaacctgctgcagcccctgagcatcagaattgcccaccctggggacaagcagcaccccaccacctag

SEQ ID NO: 148021 - DNA, 3240 bp, synthetic construct
  misc_feature 1..3240: note = Description of Artificial Sequence: Synthetic coding sequence
  source 1..3240: mol_type = other DNA
atggagagcaacttcaacacagagagcagcagcaccttcaccctgcagagcagcagcgagaccctcttcagcatccagctgctggacttcaagaccagcctgctggaggccctggaggagctgaggatgaggcgggaggccgagatccactatgaggagcagatcggcaagatcatcgtggagacccaggagctgaagtggcagaaggagaccctgcagaaccagaaggagaccctggccgagcagcacaaggaggccatggctgtgttcaagaagcagctgcagatgaagatgtgtgccctggaggaggagaagggcaagtaccagctggccacagagatcaaggagaaggagattgagggcctgaaggagaccctgaaggccctgcaggtgtccaagtacagcctgcagaagaaggtgtctgagatggagcagaaggtgcagctgcacctgctggccaaggaggactaccacaagcagctgtctgaaattgagaagtactatgccaccatcaccggccagtttggcctggtgaaggagaaccacgagaagctggagcagaatgtgcgggaggccatccagagcaacaagaggctgagcgccctgaacaagaagcaggaggccgagatctgcagcctgaagaaggagctgaagaaggccgccagtgacctgatcaagagcaaggtgacctgccagtacaagatgggagaggagaacatcaacctgaccatcaaggagcagaagttccaggagctgcaggagcggctgaacatggagctggagctgaatgagaagatcaatgaggagatcacccacatccaggaggagaagcaggacatcatcatctccttccagcacatgcagcagctgctgcggcagcagatccaggccaacacagagatggaggccgagctgaaggtgctgaaggagaacaaccagaccctggagcgggacaatgagctgcagcgggagaaggtgaaggaaaatgaggagaagttcctgaacctgcagaatgagcacgagaaggccctgggcacctggaagagacatgctgaggagctgaatggagagatcaacaagatcaagaatgagctgagcagcctgaaggagacccacatcaagctgcaggagcactacaacaagctgtgcaaccagaagacctttgaggaggacaagaagttccagaatgtgcctgaggtgaacaatgaaaattctgagatgagcacagagaagtctgagaacaccatcatccagaagtacaacacagagcaggagatccgggaggagaacatggagaacttctgcagcgacacagagtaccgggagaaggaggagaagaaggagggcagcttcatcgaggagatcatcattgatgacctgcagctgtttgagaagagcttcaagaatgaaattgacacagtggtgtcccaggatgagaaccagagcgagatcagcctgagcaagaccctgagcctggacaaggaggtgatcagccagggccagaccagcaatgtgacagacaacaggaagtctgtgaccacagagatcaaggacaagatctgcctggagaaggacaatggctgcacagagttcaagagccccaacaaccactttgtggtgctggacacagccattgaaacagagaagatccacctggagaggacccggggcctggatgtgcaccacacagatgtgaacctggaggtggagaacaacaagaccagcttcaacagcatcctgaatgaaacagcccacaacacctaccacaacaacaacaaggatgtgtctgaaaatgagcccttcaagcagttccggctgctgcccggcacccgggagcacgccctggagaaggagatcaccaacagcgaccagaccaaggctgacctggacagcagcctggacatcaagaagaaccctgtgccctgccagaagtacagcctgaggaacagcagcaatgtgatgctggatgacaagcagtgcaagatcaagcagatccagctgctgaccaagaagtcagaatgttccatcctgctgagcaagcagaccagtgacttcctgcaggtgtgcaatgacaccctggagaagtctgagctgactgtgccctgtgacatcgtcatcgaccaccacgtgtcctatgctgccttcagcgccaacagcaagctgctgctgaagaacagcgacaagaatgtgcacagcatgtccatgctggtgaagcccaacagcagccctgggggcaagaccatgtgcaagaacatgtctgacatgcagaacagccagttcaacaactgcctgggctacctggagaacaccaacgtgaacatcagccacctgcacctgaacaatgaaaacagccacgccagccaggccaaggatgtgaagacagctgtgcacatgaagacctgcacagaaacagagttcagcaacaagaagaaccagattgatgagaaccaggtgacagaggccaccaagaatgacctcttcctgtttgtgtccatcaatgaaaggcagcacaccctgctgaacaacacagagaagacagagagcctgaatgacatcgtgtctgggaagatgttttctgagggccagctggaggagagccacagcttccacatcgagcccagcggggacctggtgaacagaagtggccgcagcacctttgacctgagcaccagtgacaagaagacagagaagacccctgtgtacatgaacttcagtgaccccggcccctggagcaaggtgaaccacatcgagagccagacagccagcagcagcaccccctgcatcagcctgctgctgaaggagcggcccctggaccccagcgagaacaagaagatcatctccatggccctgtgcaagaacatcggcgtggatgatgtgggcaaggacattggaccagacaccaccagcatcaacagagtggccgacaccctgaacaactggagcatccacccagaccccaagggggagcccagcgaggagaagaatgccatggccaagaccttctatgacagcagcttccccacagagcacgtgaagaccaagcccctcatcagcacccccctgcagagccacctgcaggccatcaagaccaccaagaacaccagcggagatgatgactggcagagcctcatcaccaaccagctgaacaagtctgagaacctgctgagcctggagaatgacaaccagcccaagaagaggaaggccgaggagaccctggagaagaacaaccggctgaagtag

SEQ ID NO: 148022 - DNA, 1617 bp, synthetic construct
  misc_feature 1..1617: note = Description of Artificial Sequence: Synthetic coding sequence
  source 1..1617: mol_type = other DNA
atgctgcagatcggggaggatgtggactacctgctgatcccccgggaggtgcggctggccggcggcgtgtggagggtcatcagcaagccagccaccaaggaggccgagttccgggagcggctgacccagttcctggaggaggagggccgcaccctggaggatgtggcccgcatcatggagaagagcaccccccaccccccccagccccccaagaagcccaaggagccccgggtgagaagaagagtgcagcagatggtgaccccaccaccccggctggtggtgggcacctatgacagcagcaatgccagtgacagcgagttcagtgactttgagaccagccgggacaagagccggcagggcccccggcggggcaagaaggtgaggaagatgcctgtgtcctacctgggcagcaagttcctgggcagtgacctggagagtgaagatgatgaggagctggtggaggccttcctgcggcggcaggagaagcagcccagcgcccccccagccaggagaagagtgaacctgcctgtgcccatgtttgaggacaacctgggcccccagctgagcaaggctgaccgctggagagaatatgtgtcccaggtgtcctggggcaagctgaagagaagagtgaagggctgggcccccagggctggccctggggtgggggaggcccggctggccagcacagctgtggagagcgctggggtgagcagcgcccctgagggcaccagccctggggaccggctgggcaatgctggagatgtgtgtgtgccccaggccagcccccggcgctggaggcccaagatcaactgggccagcttcagaagaagaaggaaggagcagacagcccccaccggccagggcgctgacattgaagctgaccagggcggggaggccgctgacagccagcgggaggaggccatcgctgaccagcgggagggcgccgccggcaaccagagagctggggccccagctgaccagggcgctgaggccgctgacaaccagcgggaggaggccgctgacaaccagagagctggggccccagctgaggagggcgctgaggccgctgacaaccagcgggaggaggccgctgacaaccagagagctgaggccccagctgaccagaggagccagggcacagacaaccaccgggaggaggccgctgacaaccagagagctgaggccccagctgaccagggcagcgaggtgacagacaaccagcgggaggaggccgtgcatgaccagcgggagcgggccccagctgtgcagggcgctgacaaccagagggcccaggcccgggccggccagagagctgaggccgcccacaaccagagagctggggcccctggcatccaggaggccgaggtgtctgctgcccagggcaccactggaacagcccctggggcccgggccaggaagcaggtgaagacagtgcgcttccagaccccaggccgcttctcctggttctgcaagagaagaagagccttctggcacaccccccggctgcccaccctgcccaagagggtgccccgggccggggaggccaggaacctgcgggtgctgcgggcagaggcccgggcagaggccgagcagggcgagcaggaggaccagctgtag

SEQ ID NO: 148023 - DNA, 975 bp, synthetic construct
  misc_feature 1..975: note = Description of Artificial Sequence: Synthetic coding sequence
  source 1..975: mol_type = other DNA
atgctgcagatcggggaggatgtggactacctgctgatcccccgggaggtgcggctggccggcggcgtgtggagggtcatcagcaagccagccaccaaggaggccgagttccgggagcggctgacccagttcctggaggaggagggccgcaccctggaggatgtggcccgcatcatggagaagagcaccccccaccccccccagccccccaagaagcccaaggagccccgggtgagaagaagagtgcagcagatggtgaccccaccaccccggctggtggtgggcacctatgacagcagcaatgccagtgacagcgagttcagtgactttgagaccagccgggacaagagccggcagggcccccggcggggcaagaaggtgaggaagatgcctgtgtcctacctgggcagcaagttcctgggcagtgacctggagagtgaagatgatgaggagctggtggaggccttcctgcggcggcagggcctgcaggtgatccggggccagggcccccagctgacccggggccagaggctgcagatcatccggggcaagaggctgcagatcatccggggccagggcccccagctgcggcggggccagaggctgcagatcacccggggcaagaggctgcagatcatccggggccagaggccccagctgacccggggccaccgggcccagatcaccaccgggaagaggctgcagatcatccggggccggcggccccagctgacccggggccagaggctgcagatcatcaagggcaagaggccctacatgacccggggcaagggcccccagctgagccgggtgcagatcatccggggccacaggcctggcctggcccggggccagaggctgcacatcatccggggccagggcccccaggtgtccaggaagctgaagagccagctgcccaagggcccccaggagcagctgcaggagcccggccctggcaacagaagccggcagtag

SEQ ID NO: 148024 - DNA, 5532 bp, synthetic construct
  misc_feature 1..5532: note = Description of Artificial Sequence: Synthetic coding sequence
  source 1..5532: mol_type = other DNA
atggagaatgagatcttcacccccctgctggagcagttcatgaccagccccctggtgacctgggtgaagaccttcggccccctggccgctggaaatggcaccaacctggatgaatatgtggccctggtggatggagtcttcctgaaccaggtgatgctgcagatcaaccccaagctggagagccagagggtgaacaagaaggtgaacaatgatgccagcctgaggatgcacaacctgagcatcctggtgcggcagatcaagttctactaccaggagaccctgcagcagctgatcatgatgagcctgcccaacgtgctgatcatcggcaagaaccccttcagcgagcagggcacagaggaggtgaagaagctgctgctgctgctgctgggctgtgctgtgcagtgccagaagaaggaggagttcatcgagcgcatccagggcctggactttgacaccaaggctgctgtggccgcccacatccaggaggtgacccacaaccaggagaatgtgtttgacctgcagtggatggaggtgacagacatgagccaggaggacatcgagcccctgctgaagaacatggccctgcacctgaagaggctgattgatgaaagagatgagcacagcgagaccatcatcgagctgtctgaggagagagatggcctgcacttcctgccccacgccagcagcagcgcccagagcccctgtggcagccctggcatgaagaggacagagagccggcagcacctgtctgtggagctggctgatgccaaggccaagatccggcggctgcggcaggagctggaggagaagacagagcagctgctggactgcaagcaggagctggagcagatggagattgagctgaagaggctgcagcaggagaacatgaacctgctgagtgatgcccggagcgccaggatgtacagagatgagctggatgccctgcgggagaaggctgtgcgggtggacaagctggagagcgaggtgagccgctacaaggagcggctgcatgacatcgagttctacaaggcccgggtggaggagctgaaggaggacaaccaggtgctgctggagaccaagaccatgctggaggaccagctggagggcacccgggcccggagtgacaagctgcacgagctggagaaggagaacctgcagctgaaggccaagctgcatgacatggagatggagcgggacatggacaggaagaagattgaggagctgatggaggagaacatgaccctggagatggcccagaagcagagcatggatgagagcctgcacctgggctgggagctggagcagatcagcaggaccagcgagctgtctgaggccccccagaagagcctgggccacgaggtgaatgagctgaccagcagccggctgctgaagctggagatggagaaccagagcctgaccaagacagtggaggagctgcggaccaccgtggacagcgtggagggcaatgccagcaagatcctgaagatggagaaggagaaccagaggctgagcaagaaggtggagatcctggagaatgagatcgtgcaggagaagcagagcctgcagaactgccagaacctgagcaaggacctgatgaaggagaaggcccagctggagaagaccatcgagaccctgagagaaaattctgagcggcagatcaagatcctggagcaggagaatgagcacctgaaccagacagtgagcagcctgcggcagaggagccagatctctgctgaggcccgggtgaaggacatcgagaaggagaacaagatcctgcacgagagcatcaaggagaccagcagcaagctgagcaagattgaatttgagaagaggcagatcaagaaggagctggagcactacaaggagaagggggagagagctgaggagctggagaatgagctgcaccacctggagaaggaaaatgagctgctgcagaagaagatcaccaacctgaagatcacctgtgagaagattgaggccctggagcaggagaacagcgagctggagagagaaaataggaagctgaagaagaccctggacagcttcaagaacctgaccttccagctggagagcctggagaaggagaacagccagctggatgaggagaacctggagctgcggagaaatgtggagagcctgaagtgtgcctccatgaagatggcccagctgcagctggagaacaaggagctggagagcgagaaggagcagctgaagaagggcctggagctgctgaaggccagcttcaagaagacagagcggctggaggtgtcctaccagggcctggacatcgagaaccagaggctgcagaagaccctggagaacagcaacaagaagatccagcagctggagagcgagctgcaggacctggagatggagaaccagaccctgcagaagaacctggaggagctgaagatcagcagcaagaggctggagcagctggagaaggagaacaagagcctggagcaggagaccagccagctggagaaggacaagaagcagctggagaaggagaacaagaggctgcggcagcaggccgagatcaaggacaccaccctggaggagaacaacgtgaagattggcaacctggagaaggagaacaagaccctgagcaaggagatcggcatctacaaggagagctgtgtgcggctgaaggagctggagaaggagaacaaggagctggtgaagagggccaccatcgacatcaagaccctggtgaccctgcgggaggacctggtgtctgagaagctgaagacccagcagatgaacaatgacctggagaagctgacccatgagctggagaagattggcctgaacaaggagcggctgctgcatgatgagcagagcacagatgacagccgctacaagctgctggagagcaagctggagagcaccctgaagaagagcctggagatcaaggaggagaagattgctgccctggaggcccggctggaggagagcaccaactacaaccagcagctgcggcaggagctgaagacagtgaagaagaactatgaggccctgaagcagaggcaggatgaggagaggatggtgcagagcagcccccccatcagcggggaggacaacaagtgggagcgggagagccaggagaccacccgggagctgctgaaggtgaaggaccggctgattgaggtggagagaaataatgccaccctgcaggccgagaagcaggccctgaagacccagctgaagcagctggagacccagaacaacaacctgcaggcccagatcctggccctgcagaggcagacagtgtccctgcaggagcagaacaccaccctgcagacccagaatgccaagctgcaggtggagaacagcaccctgaacagccagagcaccagcctgatgaaccagaatgcccagctgctgatccagcagagcagcctggagaatgaaaatgaatctgtcatcaaggagcgggaggacctgaagagcctgtatgacagcctcatcaaggaccacgagaagctggagctgctgcacgagcggcaggcctctgaatatgagagcctcatcagcaagcacggcaccctgaagagcgcccacaagaacctggaggtggagcaccgggacctggaggaccgctacaaccagctgctgaagcagaagggccagctggaggacctggagaagatgctgaaggtggagcaggagaagatgctgctggagaacaagaaccatgaaacagtggccgctgagtacaagaagctgtgtggggagaatgaccggctgaaccacacctacagccagctgctgaaggagacagaggtgctgcagacagaccacaagaacctgaagagcctgctgaacaacagcaagctggagcagacccggctggaggccgagttcagcaagctgaaggagcagtaccagcagctggacatcaccagcaccaagctgaacaaccagtgtgagctgctgagccagctgaagggcaacctggaggaggagaacagacacctgctggaccagatccagaccctgatgctgcagaacagaaccctgctggagcagaacatggagagcaaggacctcttccacgtggagcagaggcagtacatcgacaagctgaatgagctgcggcggcagaaggagaagctggaggagaagatcatggaccagtacaagttctatgaccccagcccccccaggagaagaggcaactggatcaccctgaagatgaggaagctgatcaagagcaagaaggacatcaaccgggagcggcagaagagcctgaccctgacccccaccaggagtgacagcagcgagggcttcctgcagctgccccaccaggacagccaggacagcagctctgtgggcagcaacagcctggaggatggccagaccctgggcaccaagaagagcagcaccatgaatgacctggtgcagagcatggtgctggccggccagtggacaggcagcacagagaacctggaggtgcctgatgacatcagcacaggcaagaggaggaaggagctgggcgccatggccttcagcaccacagccatcaacttcagcacagtgaacagcagcgctggcttccgcagcaagcagctggtgaacaacaaggacaccaccagctttgaggacatcagcccccagggcgtgtctgatgacagcagcacaggcagccgggtgcacgccagcaggcctgccagcctggacagcggccgcaccagcaccagcaacagcaacaacaatgccagcctgcacgaggtgaaggccggggctgtgaacaaccagagccggccccagagccacagcagtggagagttcagcctgctgcatgaccacgaggcctggagcagcagcggcagcagccccatccagtacctgaagaggcagaccaggagcagccctgtgctgcagcacaagatcagcgagaccctggagagccgccaccacaagatcaagacaggcagccctggcagcgaggtggtgaccctgcagcagttcctggaggagagcaacaagctgacctctgtgcagatcaagagcagcagccaggagaacctgctggatgaggtgatgaagagcctgtctgtgtccagtgacttcctgggcaaggacaagcctgtgtcctgtggcctggcccggtctgtgtctgggaagacccctggggacttctatgacaggaggaccaccaagccagagttcctgcggcccggccccaggaagacagaggacacctacttcatcagcagcgctgggaagcccaccccaggcacccagggcaagatcaagctggtgaaggagagcagcctgagccggcagagcaaggacagcaacccctatgccaccctgccccgggccagcagcgtcatcagcacagctgagggcaccaccaggaggaccagcatccatgacttcctgaccaaggacagccggctgcccatctctgtggacagccccccagctgctgctgacagcaacaccacagctgccagcaatgtggacaaggtgcaggagagcaggaacagcaagagccgcagccgggagcagcagagcagctag

SEQ ID NO: 148025 - DNA, 5613 bp, synthetic construct
  misc_feature 1..5613: note = Description of Artificial Sequence: Synthetic coding sequence
  source 1..5613: mol_type = other DNA
atggagaatgagatcttcacccccctgctggagcagttcatgaccagccccctggtgacctgggtgaagaccttcggccccctggccgctggaaatggcaccaacctggatgaatatgtggccctggtggatggagtcttcctgaaccaggtgatgctgcagatcaaccccaagctggagagccagagggtgaacaagaaggtgaacaatgatgccagcctgaggatgcacaacctgagcatcctggtgcggcagatcaagttctactaccaggagaccctgcagcagctgatcatgatgagcctgcccaacgtgctgatcatcggcaagaaccccttcagcgagcagggcacagaggaggtgaagaagctgctgctgctgctgctgggctgtgctgtgcagtgccagaagaaggaggagttcatcgagcgcatccagggcctggactttgacaccaaggctgctgtggccgcccacatccaggaggtgacccacaaccaggagaatgtgtttgacctgcagtggatggaggtgacagacatgagccaggaggacatcgagcccctgctgaagaacatggccctgcacctgaagaggctgattgatgaaagagatgagcacagcgagaccatcatcgagctgtctgaggagagagatggcctgcacttcctgccccacgccagcagcagcgcccagagcccctgtggcagccctggcatgaagaggacagagagccggcagcacctgtctgtggagctggctgatgccaaggccaagatccggcggctgcggcaggagctggaggagaagacagagcagctgctggactgcaagcaggagctggagcagatggagattgagctgaagaggctgcagcaggagaacatgaacctgctgagtgatgcccggagcgccaggatgtacagagatgagctggatgccctgcgggagaaggctgtgcgggtggacaagctggagagcgaggtgagccgctacaaggagcggctgcatgacatcgagttctacaaggcccgggtggaggagctgaaggaggacaaccaggtgctgctggagaccaagaccatgctggaggaccagctggagggcacccgggcccggagtgacaagctgcacgagctggagaaggagaacctgcagctgaaggccaagctgcatgacatggagatggagcgggacatggacaggaagaagattgaggagctgatggaggagaacatgaccctggagatggcccagaagcagagcatggatgagagcctgcacctgggctgggagctggagcagatcagcaggaccagcgagctgtctgaggccccccagaagagcctgggccacgaggtgaatgagctgaccagcagccggctgctgaagctggagatggagaaccagagcctgaccaagacagtggaggagctgcggaccaccgtggacagcgtggagggcaatgccagcaagatcctgaagatggagaaggagaaccagaggctgagcaagaaggtggagatcctggagaatgagatcgtgcaggagaagcagagcctgcagaactgccagaacctgagcaaggacctgatgaaggagaaggcccagctggagaagaccatcgagaccctgagagaaaattctgagcggcagatcaagatcctggagcaggagaatgagcacctgaaccagacagtgagcagcctgcggcagaggagccagatctctgctgaggcccgggtgaaggacatcgagaaggagaacaagatcctgcacgagagcatcaaggagaccagcagcaagctgagcaagattgaatttgagaagaggcagatcaagaaggagctggagcactacaaggagaagggggagagagctgaggagctggagaatgagctgcaccacctggagaaggaaaatgagctgctgcagaagaagatcaccaacctgaagatcacctgtgagaagattgaggccctggagcaggagaacagcgagctggagagagaaaataggaagctgaagaagaccctggacagcttcaagaacctgaccttccagctggagagcctggagaaggagaacagccagctggatgaggagaacctggagctgcggagaaatgtggagagcctgaagtgtgcctccatgaagatggcccagctgcagctggagaacaaggagctggagagcgagaaggagcagctgaagaagggcctggagctgctgaaggccagcttcaagaagacagagcggctggaggtgtcctaccagggcctggacatcgagaaccagaggctgcagaagaccctggagaacagcaacaagaagatccagcagctggagagcgagctgcaggacctggagatggagaaccagaccctgcagaagaacctggaggagctgaagatcagcagcaagaggctggagcagctggagaaggagaacaagagcctggagcaggagaccagccagctggagaaggacaagaagcagctggagaaggagaacaagaggctgcggcagcaggccgagatcaaggacaccaccctggaggagaacaacgtgaagattggcaacctggagaaggagaacaagaccctgagcaaggagatcggcatctacaaggagagctgtgtgcggctgaaggagctggagaaggagaacaaggagctggtgaagagggccaccatcgacatcaagaccctggtgaccctgcgggaggacctggtgtctgagaagctgaagacccagcagatgaacaatgacctggagaagctgacccatgagctggagaagattggcctgaacaaggagcggctgctgcatgatgagcagagcacagatgaccgctacaagctgctggagagcaagctggagagcaccctgaagaagagcctggagatcaaggaggagaagattgctgccctggaggcccggctggaggagagcaccaactacaaccagcagctgcggcaggagctgaagacagtgaagaagaactatgaggccctgaagcagaggcaggatgaggagaggatggtgcagagcagcccccccatctctggagaggacaacaagtgggagcgggagagccaggagaccacccgggagctgctgaaggtgaaggacaggctcatcgaggtggagaggaacaatgccaccctgcaggccgagaagcaggccctgaagacccagctgaagcagctggagacccagaacaacaacctgcaggcccagatcctggccctgcagaggcagacagtgtccctgcaggagcagaacaccaccctgcagacccagaatgccaagctgcaggtggagaacagcaccctgaacagccagagcaccagcctgatgaaccagaatgcccagctgctgatccagcagagcagcctggagaatgaaaatgaatctgtcatcaaggagcgggaggacctgaagagcctgtatgacagcctcatcaaggaccacgagaagctggagctgctgcacgagcggcaggcctctgaatatgagagcctcatcagcaagcacggcaccctgaagagcgcccacaagaacctggaggtggagcaccgggacctggaggaccgctacaaccagctgctgaagcagaagggccagctggaggacctggagaagatgctgaaggtggagcaggagaagatgctgctggagaacaagaaccacgagaccgtggccgctgagtacaagaagctgtgtggagaaaatgaccggctgaaccacacctacagccagctgctgaaggagacagaggtgctgcagacagaccacaagaacctgaagagcctgctgaacaacagcaagctggagcagacccggctggaggccgagttcagcaagctgaaggagcagtaccagcagctggacatcaccagcaccaagctgaacaaccagtgtgagctgctgagccagctgaagggcaacctggaggaggagaacagacacctgctggaccagatccagaccctgatgctgcagaacagaaccctgctggagcagaacatggagagcaaggacctcttccacgtggagcagaggcagtacatcgacaagctgaatgagctgcggcggcagaaggagaagctggaggagaagatcatggaccagtacaagttctatgaccccagccccccaagaagaagaggcaactggatcaccctgaagatgaggaagctgatcaagagcaagaaggacatcaaccgggagcggcagaagagcctgaccctgacccccaccaggagtgacagcagcgagggcttcctgcagctgccccaccaggacagccaggacagcagctctgtgggcagcaacagcctggaggatggccagaccctgggcaccaagaagagctccatggtggccctgaagaggctgcccttcctgaggaaccggcccaaggacaaggacaagatgaaggcctgctaccgccgctccatgtccatgaatgacctggtgcagagcatggtgctggccggccagtggacaggcagcacagagaacctggaggtgcctgatgacatcagcacaggcaagaggaggaaggagctgggcgccatggccttcagcaccacagccatcaacttcagcacagtgaacagcagcgctggcttccgcagcaagcagctggtgaacaacaaggacaccaccagctttgaggacatcagcccccagggcgtgtctgatgacagcagcacaggcagccgggtgcacgccagcaggcctgccagcctggacagcggccgcaccagcaccagcaacagcaacaacaatgccagcctgcacgaggtgaaggccggggctgtgaacaaccagagccggccccagagccacagcagcggggagttcagcctgctgcatgaccacgaggcctggagcagcagcggcagcagccccatccagtacctgaagaggcagaccaggagcagccctgtgctgcagcacaagatcagcgagaccctggagagccgccaccacaagatcaagacaggcagccctggcagcgaggtggtgaccctgcagcagttcctggaggagagcaacaagctgacctctgtgcagatcaagagcagcagccaggagaacctgctggatgaggtgatgaagagcctgtctgtgtccagtgacttcctgggcaaggacaagcctgtgtcctgtggcctggcccggtctgtgtctgggaagacccctggggacttctatgacaggaggaccaccaagccagagttcctgcggcccggccccaggaagacagaggacacctacttcatcagcagcgctgggaagcccaccccaggcacccagggcaagatcaagctggtgaaggagagcagcctgagccggcagagcaaggacagcaacccctatgccaccctgccccgggccagcagcgtcatcagcacagctgagggcaccaccaggaggaccagcatccatgacttcctgaccaaggacagccggctgcccatctctgtggacagccccccagctgctgctgacagcaacaccacagctgccagcaatgtggacaaggtgcaggagagcaggaacagcaagagccgcagccgggagcagcagagcagctag

SEQ ID NO: 148026 - DNA, 2667 bp, synthetic construct
  misc_feature 1..2667: note = Description of Artificial Sequence: Synthetic coding sequence
  source 1..2667: mol_type = other DNA
ctgctggagagcaagctggagagcaccctgaagaagagcctggagatcaaggaggagaagattgctgccctggaggcccggctggaggagagcaccaactacaaccagcagctgcggcaggagctgaagacagtgaagaagaactatgaggccctgaagcagaggcaggatgaggagaggatggtgcagagcagcccccccatctctggagaggacaacaagtgggagcgggagagccaggagaccacccgggagctgctgaaggtgaaggacaggctcatcgaggtggagaggaacaatgccaccctgcaggccgagaagcaggccctgaagacccagctgaagcagctggagacccagaacaacaacctgcaggcccagatcctggccctgcagaggcagacagtgtccctgcaggagcagaacaccaccctgcagacccagaatgccaagctgcaggtggagaacagcaccctgaacagccagagcaccagcctgatgaaccagaatgcccagctgctgatccagcagagcagcctggagaatgaaaatgaatctgtcatcaaggagcgggaggacctgaagagcctgtatgacagcctcatcaaggaccacgagaagctggagctgctgcacgagcggcaggcctctgaatatgagagcctcatcagcaagcacggcaccctgaagagcgcccacaagaacctggaggtggagcaccgggacctggaggaccgctacaaccagctgctgaagcagaagggccagctggaggacctggagaagatgctgaaggtggagcaggagaagatgctgctggagaacaagaaccacgagaccgtggccgctgagtacaagaagctgtgtggagaaaatgaccggctgaaccacacctacagccagctgctgaaggagacagaggtgctgcagacagaccacaagaacctgaagagcctgctgaacaacagcaagctggagcagacccggctggaggccgagttcagcaagctgaaggagcagtaccagcagctggacatcaccagcaccaagctgaacaaccagtgtgagctgctgagccagctgaagggcaacctggaggaggagaacagacacctgctggaccagatccagaccctgatgctgcagaacagaaccctgctggagcagaacatggagagcaaggacctcttccacgtggagcagaggcagtacatcgacaagctgaatgagctgcggcggcagaaggagaagctggaggagaagatcatggaccagtacaagttctatgaccccagccccccaagaagaagaggcaactggatcaccctgaagatgaggaagctgatcaagagcaagaaggacatcaaccgggagcggcagaagagcctgaccctgacccccaccaggagtgacagcagcgagggcttcctgcagctgccccaccaggacagccaggacagcagctctgtgggcagcaacagcctggaggatggccagaccctgggcaccaagaagagcagcaccatgaatgacctggtgcagagcatggtgctggccggccagtggacaggcagcacagagaacctggaggtgcctgatgacatcagcacaggcaagaggaggaaggagctgggcgccatggccttcagcaccacagccatcaacttcagcacagtgaacagcagcgctggcttccgcagcaagcagctggtgaacaacaaggacaccaccagctttgaggacatcagcccccagggcgtgtctgatgacagcagcacaggcagccgggtgcacgccagcaggcctgccagcctggacagcggccgcaccagcaccagcaacagcaacaacaatgccagcctgcacgaggtgaaggccggggctgtgaacaaccagagccggccccagagccacagcagcggggagttcagcctgctgcatgaccacgaggcctggagcagcagcggcagcagccccatccagtacctgaagaggcagaccaggagcagccctgtgctgcagcacaagatcagcgagaccctggagagccgccaccacaagatcaagacaggcagccctggcagcgaggtggtgaccctgcagcagttcctggaggagagcaacaagctgacctctgtgcagatcaagagcagcagccaggagaacctgctggatgaggtgatgaagagcctgtctgtgtccagtgacttcctgggcaaggacaagcctgtgtcctgtggcctggcccggtctgtgtctgggaagacccctggggacttctatgacaggaggaccaccaagccagagttcctgcggcccggccccaggaagacagaggacacctacttcatcagcagcgctgggaagcccaccccaggcacccagggcaagatcaagctggtgaaggagagcagcctgagccggcagagcaaggacagcaacccctatgccaccctgccccgggccagcagcgtcatcagcacagctgagggcaccaccaggaggaccagcatccatgacttcctgaccaaggacagccggctgcccatctctgtggacagccccccagctgctgctgacagcaacaccacagctgccagcaatgtggacaaggtgcaggagagcaggaacagcaagagccgcagccgggagcagcagagcagctag

SEQ ID NO: 148027 - DNA, 5391 bp, synthetic construct
  misc_feature 1..5391: note = Description of Artificial Sequence: Synthetic coding sequence
  source 1..5391: mol_type = other DNA
atggagaatgagatcttcacccccctgctggagcagttcatgaccagccccctggtgacctgggtgaagaccttcggccccctggccgctggaaatggcaccaacctggatgaatatgtggccctggtggatggagtcttcctgaaccaggtgatgctgcagatcaaccccaagctggagagccagagggtgaacaagaaggtgaacaatgatgccagcctgaggatgcacaacctgagcatcctggtgcggcagatcaagttctactaccaggagaccctgcagcagctgatcatgatgagcctgcccaacgtgctgatcatcggcaagaaccccttcagcgagcagggcacagaggaggtgaagaagctgctgctgctgctgctgggctgtgctgtgcagtgccagaagaaggaggagttcatcgagcgcatccagggcctggactttgacaccaaggctgctgtggccgcccacatccaggaggtgacccacaaccaggagaatgtgtttgacctgcagtggatggaggtgacagacatgagccaggaggacatcgagcccctgctgaagaacatggccctgcacctgaagaggctgattgatgaaagagatgagcacagcgagaccatcatcgagctgtctgaggagagagatggcctgcacttcctgccccacgccagcagcagcgcccagagcccctgtggcagccctggcatgaagaggacagagagccggcagcacctgtctgtggagctggctgatgccaaggccaagatccggcggctgcggcaggagctggaggagaagacagagcagctgctggactgcaagcaggagctggagcagatggagattgagctgaagaggctgcagcaggagaacatgaacctgctgagtgatgcccggagcgccaggatgtacagagatgagctggatgccctgcgggagaaggctgtgcgggtggacaagctggagagcgaggtgagccgctacaaggagcggctgcatgacatcgagttctacaaggcccgggtggaggagctgaaggaggacaaccaggtgctgctggagaccaagaccatgctggaggaccagctggagggcacccgggcccggagtgacaagctgcacgagctggagaaggagaacctgcagctgaaggccaagctgcatgacatggagatggagcgggacatggacaggaagaagattgaggagctgatggaggagaacatgaccctggagatggcccagaagcagagcatggatgagagcctgcacctgggctgggagctggagcagatcagcaggaccagcgagctgtctgaggccccccagaagagcctgggccacgaggtgaatgagctgaccagcagccggctgctgaagctggagatggagaaccagagcctgaccaagacagtggaggagctgcggaccaccgtggacagcgtggagggcaatgccagcaagatcctgaagatggagaaggagaaccagaggctgagcaagaaggtggagatcctggagaatgagatcgtgcaggagaagcagagcctgcagaactgccagaacctgagcaaggacctgatgaaggagaaggcccagctggagaagaccatcgagaccctgagagaaaattctgagcggcagatcaagatcctggagcaggagaatgagcacctgaaccagacagtgagcagcctgcggcagaggagccagatctctgctgaggcccgggtgaaggacatcgagaaggagaacaagatcctgcacgagagcatcaaggagaccagcagcaagctgagcaagattgaatttgagaagaggcagatcaagaaggagctggagcactacaaggagaagggggagagagctgaggagctggagaatgagctgcaccacctggagaaggaaaatgagctgctgcagaagaagatcaccaacctgaagatcacctgtgagaagattgaggccctggagcaggagaacagcgagctggagagagaaaataggaagctgaagaagaccctggacagcttcaagaacctgaccttccagctggagagcctggagaaggagaacagccagctggatgaggagaacctggagctgcggagaaatgtggagagcctgaagtgtgcctccatgaagatggcccagctgcagctggagaacaaggagctggagagcgagaaggagcagctgaagaagggcctggagctgctgaaggccagcttcaagaagacagagcggctggaggtgtcctaccagggcctggacatcgagaaccagaggctgcagaagaccctggagaacagcaacaagaagatccagcagctggagagcgagctgcaggacctggagatggagaaccagaccctgcagaagaacctggaggagctgaagatcagcagcaagaggctggagcagctggagaaggagaacaagagcctggagcaggagaccagccagctggagaaggacaagaagcagctggagaaggagaacaagaggctgcggcagcaggccgagatcaaggacaccaccctggaggagaacaacgtgaagattggcaacctggagaaggagaacaagaccctgagcaaggagatcggcatctacaaggagagctgtgtgcggctgaaggagctggagaaggagaacaaggagctggtgaagagggccaccatcgacatcaagaccctggtgaccctgcgggaggacctggtgtctgagaagctgaagacccagcagatgaacaatgacctggagaagctgacccatgagctggagaagattggcctgaacaaggagcggctgctgcatgatgagcagagcacagatgaccgctacaagctgctggagagcaagctggagagcaccctgaagaagagcctggagatcaaggaggagaagattgctgccctggaggcccggctggaggagagcaccaactacaaccagcagctgcggcaggagctgaagacagtgaagaagaactatgaggccctgaagcagaggcaggatgaggagaggatggtgcagagcagcccccccatctctggagaggacaacaagtgggagcgggagagccaggagaccacccgggagctgctgaaggtgaaggacaggctcatcgaggtggagaggaacaatgccaccctgcaggccgagaagcaggccctgaagacccagctgaagcagctggagacccagaacaacaacctgcaggcccagatcctggccctgcagaggcagacagtgtccctgcaggagcagaacaccaccctgcagacccagaatgccaagctgcaggtggagaacagcaccctgaacagccagagcaccagcctgatgaaccagaatgcccagctgctgatccagcagagcagcctggagaatgaaaatgaatctgtcatcaaggagcgggaggacctgaagagcctgtatgacagcctcatcaaggaccacgagaagctggagctgctgcacgagcggcaggcctctgaatatgagagcctcatcagcaagcacggcaccctgaagagcgcccacaagaacctggaggtggagcaccgggacctggaggaccgctacaaccagctgctgaagcagaagggccagctggaggacctggagaagatgctgaaggtggagcaggagaagatgctgctggagaacaagaaccacgagaccgtggccgctgagtacaagaagctgtgtggagaaaatgaccggctgaaccacacctacagccagctgctgaaggagacagaggtgctgcagacagaccacaagaacctgaagagcctgctgaacaacagcaagctggagcagacccggctggaggccgagttcagcaagctgaaggagcagtaccagcagctggacatcaccagcaccaagctgaacaaccagtgtgagctgctgagccagctgaagggcaacctggaggaggagaacagacacctgctggaccagatccagaccctgatgctgcagaacagaaccctgctggagcagaacatggagagcaaggacctcttccacgtggagcagaggcagtacatcgacaagctgaatgagctgcggcggcagaaggagaagctggaggagaagatcatggaccagtacaagttctatgaccccagccccccaagaagaagaggcaactggatcaccctgaagatgaggaagctgatcaagagcaagaaggacatcaaccgggagcggcagaagagcctgaccctgacccccaccaggagtgacagcagcgagggcttcctgcagctgccccaccaggacagccaggacagcagctctgtgggcagcaacagcctggaggatggccagaccctgggcaccaagaagagctccatggtggccctgaagaggctgcccttcctgaggaaccggcccaaggacaaggacaagatgaaggcctgctaccgccgctccatgtccatgaatgacctggtgcagagcatggtgctggccggccagtggacaggcagcacagagaacctggaggtgcctgatgacatcagcacaggcaagaggaggaaggagctgggcgccatggccttcagcaccacagccatcaacttcagcacagtgaacagcagcgctggcttccgcagcaagcagctggtgaacaacaaggacaccaccagctttgaggacatcagcccccagggcgtgtctgatgacagcagcacaggcagccgggtgcacgccagcaggcctgccagcctggacagcggccgcaccagcaccagcaacagcaacaacaatgccagcctgcacgaggtgaaggccggggctgtgaacaaccagagccggccccagagccacagcagcggggagttcagcctgctgcatgaccacgaggcctggagcagcagcggcagcagccccatccagtacctgaagaggcagaccaggagcagccctgtgctgcagcacaagatcagcgagaccctggagagccgccaccacaagatcaagacaggcagccctggcagcgaggtggtgaccctgcagcagttcctggaggagagcaacaagctgacctctgtgcagatcaagagcagcagccaggagaacctgctggatgaggtgatgaagagcctgtctgtgtccagtgacttcctgggcaaggacaagcctgtgtcctgtggcctggccagcgtcatcagcacagctgagggcaccaccaggaggaccagcatccatgacttcctgaccaaggacagccggctgcccatctctgtggacagccccccagctgctgctgacagcaacaccacagctgccagcaatgtggacaaggtgcaggagagcaggaacagcaagagccgcagccgggagcagcagagcagctag

SEQ ID NO: 148028 - DNA, 1119 bp, synthetic construct
  misc_feature 1..1119: note = Description of Artificial Sequence: Synthetic coding sequence
  source 1..1119: mol_type = other DNA
atggaccagtacaagttctatgaccccagccccccaagaagaagaggcaactggatcaccctgaagatgaggaagctgatcaagagcaagaaggacatcaaccgggagcggcagaagagcctgaccctgacccccaccaggagtgacagcagcgagggcttcctgcagctgccccaccaggacagccaggacagcagctctgtgggcagcaacagcctggaggatggccagaccctgggcaccaagaagagcagcaacaccaccagctttgaggacatcagcccccagggcgtgtctgatgacagcagcacaggcagccgggtgcacgccggggctgtgaacaaccagagccggccccagagccacagcagcggggagttcagcctgctgcatgaccacgaggcctggagcagcagcggcagcagccccatccagtacctgaagaggcagaccaggagcagccctgtgctgcagcacaagatcagcgagaccctggagagccgccaccacaagatcaagacaggcagccctggcagcgaggtggtgaccctgcagcagttcctggaggagagcaacaagctgacctctgtgcagatcaagagcagcagccaggagaacctgctggatgaggtgatgaagagcctgtctgtgtccagtgacttcctgggcaaggacaagcctgtgtcctgtggcctggcccggtctgtgtctgggaagacccctggggacttctatgacaggaggaccaccaagccagagttcctgcggcccggccccaggaagacagaggacacctacttcatcagcagcgctgggaagcccaccccaggcacccagggcaagatcaagctggtgaaggagagcagcctgagccggcagagcaaggacagcaacccctatgccaccctgccccgggccagcagcgtcatcagcacagctgagggcaccaccaggaggaccagcatccatgacttcctgaccaaggacagccggctgcccatctctgtggacagccccccagctgctgctgacagcaacaccacagctgccagcaatgtggacaaggtgcaggagagcaggaacagcaagagccgcagccgggagcagcagagcagctag

SEQ ID NO: 148029 - DNA, 5616 bp, synthetic construct
  misc_feature 1..5616: note = Description of Artificial Sequence: Synthetic coding sequence
  source 1..5616: mol_type = other DNA
atggagaatgagatcttcacccccctgctggagcagttcatgaccagccccctggtgacctgggtgaagaccttcggccccctggccgctggaaatggcaccaacctggatgaatatgtggccctggtggatggagtcttcctgaaccaggtgatgctgcagatcaaccccaagctggagagccagagggtgaacaagaaggtgaacaatgatgccagcctgaggatgcacaacctgagcatcctggtgcggcagatcaagttctactaccaggagaccctgcagcagctgatcatgatgagcctgcccaacgtgctgatcatcggcaagaaccccttcagcgagcagggcacagaggaggtgaagaagctgctgctgctgctgctgggctgtgctgtgcagtgccagaagaaggaggagttcatcgagcgcatccagggcctggactttgacaccaaggctgctgtggccgcccacatccaggaggtgacccacaaccaggagaatgtgtttgacctgcagtggatggaggtgacagacatgagccaggaggacatcgagcccctgctgaagaacatggccctgcacctgaagaggctgattgatgaaagagatgagcacagcgagaccatcatcgagctgtctgaggagagagatggcctgcacttcctgccccacgccagcagcagcgcccagagcccctgtggcagccctggcatgaagaggacagagagccggcagcacctgtctgtggagctggctgatgccaaggccaagatccggcggctgcggcaggagctggaggagaagacagagcagctgctggactgcaagcaggagctggagcagatggagattgagctgaagaggctgcagcaggagaacatgaacctgctgagtgatgcccggagcgccaggatgtacagagatgagctggatgccctgcgggagaaggctgtgcgggtggacaagctggagagcgaggtgagccgctacaaggagcggctgcatgacatcgagttctacaaggcccgggtggaggagctgaaggaggacaaccaggtgctgctggagaccaagaccatgctggaggaccagctggagggcacccgggcccggagtgacaagctgcacgagctggagaaggagaacctgcagctgaaggccaagctgcatgacatggagatggagcgggacatggacaggaagaagattgaggagctgatggaggagaacatgaccctggagatggcccagaagcagagcatggatgagagcctgcacctgggctgggagctggagcagatcagcaggaccagcgagctgtctgaggccccccagaagagcctgggccacgaggtgaatgagctgaccagcagccggctgctgaagctggagatggagaaccagagcctgaccaagacagtggaggagctgcggaccaccgtggacagcgtggagggcaatgccagcaagatcctgaagatggagaaggagaaccagaggctgagcaagaaggtggagatcctggagaatgagatcgtgcaggagaagcagagcctgcagaactgccagaacctgagcaaggacctgatgaaggagaaggcccagctggagaagaccatcgagaccctgagagaaaattctgagcggcagatcaagatcctggagcaggagaatgagcacctgaaccagacagtgagcagcctgcggcagaggagccagatctctgctgaggcccgggtgaaggacatcgagaaggagaacaagatcctgcacgagagcatcaaggagaccagcagcaagctgagcaagattgaatttgagaagaggcagatcaagaaggagctggagcactacaaggagaagggggagagagctgaggagctggagaatgagctgcaccacctggagaaggaaaatgagctgctgcagaagaagatcaccaacctgaagatcacctgtgagaagattgaggccctggagcaggagaacagcgagctggagagagaaaataggaagctgaagaagaccctggacagcttcaagaacctgaccttccagctggagagcctggagaaggagaacagccagctggatgaggagaacctggagctgcggagaaatgtggagagcctgaagtgtgcctccatgaagatggcccagctgcagctggagaacaaggagctggagagcgagaaggagcagctgaagaagggcctggagctgctgaaggccagcttcaagaagacagagcggctggaggtgtcctaccagggcctggacatcgagaaccagaggctgcagaagaccctggagaacagcaacaagaagatccagcagctggagagcgagctgcaggacctggagatggagaaccagaccctgcagaagaacctggaggagctgaagatcagcagcaagaggctggagcagctggagaaggagaacaagagcctggagcaggagaccagccagctggagaaggacaagaagcagctggagaaggagaacaagaggctgcggcagcaggccgagatcaaggacaccaccctggaggagaacaacgtgaagattggcaacctggagaaggagaacaagaccctgagcaaggagatcggcatctacaaggagagctgtgtgcggctgaaggagctggagaaggagaacaaggagctggtgaagagggccaccatcgacatcaagaccctggtgaccctgcgggaggacctggtgtctgagaagctgaagacccagcagatgaacaatgacctggagaagctgacccatgagctggagaagattggcctgaacaaggagcggctgctgcatgatgagcagagcacagatgacagccgctacaagctgctggagagcaagctggagagcaccctgaagaagagcctggagatcaaggaggagaagattgctgccctggaggcccggctggaggagagcaccaactacaaccagcagctgcggcaggagctgaagacagtgaagaagaactatgaggccctgaagcagaggcaggatgaggagaggatggtgcagagcagcccccccatcagcggggaggacaacaagtgggagcgggagagccaggagaccacccgggagctgctgaaggtgaaggaccggctgattgaggtggagagaaataatgccaccctgcaggccgagaagcaggccctgaagacccagctgaagcagctggagacccagaacaacaacctgcaggcccagatcctggccctgcagaggcagacagtgtccctgcaggagcagaacaccaccctgcagacccagaatgccaagctgcaggtggagaacagcaccctgaacagccagagcaccagcctgatgaaccagaatgcccagctgctgatccagcagagcagcctggagaatgaaaatgaatctgtcatcaaggagcgggaggacctgaagagcctgtatgacagcctcatcaaggaccacgagaagctggagctgctgcacgagcggcaggcctctgaatatgagagcctcatcagcaagcacggcaccctgaagagcgcccacaagaacctggaggtggagcaccgggacctggaggaccgctacaaccagctgctgaagcagaagggccagctggaggacctggagaagatgctgaaggtggagcaggagaagatgctgctggagaacaagaaccatgaaacagtggccgctgagtacaagaagctgtgtggggagaatgaccggctgaaccacacctacagccagctgctgaaggagacagaggtgctgcagacagaccacaagaacctgaagagcctgctgaacaacagcaagctggagcagacccggctggaggccgagttcagcaagctgaaggagcagtaccagcagctggacatcaccagcaccaagctgaacaaccagtgtgagctgctgagccagctgaagggcaacctggaggaggagaacagacacctgctggaccagatccagaccctgatgctgcagaacagaaccctgctggagcagaacatggagagcaaggacctcttccacgtggagcagaggcagtacatcgacaagctgaatgagctgcggcggcagaaggagaagctggaggagaagatcatggaccagtacaagttctatgaccccagcccccccaggagaagaggcaactggatcaccctgaagatgaggaagctgatcaagagcaagaaggacatcaaccgggagcggcagaagagcctgaccctgacccccaccaggagtgacagcagcgagggcttcctgcagctgccccaccaggacagccaggacagcagctctgtgggcagcaacagcctggaggatggccagaccctgggcaccaagaagagctccatggtggccctgaagaggctgcccttcctgaggaaccggcccaaggacaaggacaagatgaaggcctgctacagaagatccatgtccatgaatgacctggtgcagagcatggtgctggccggccagtggacaggcagcacagagaacctggaggtgcctgatgacatcagcacaggcaagaggaggaaggagctgggcgccatggccttcagcaccacagccatcaacttcagcacagtgaacagcagcgctggcttccgcagcaagcagctggtgaacaacaaggacaccaccagctttgaggacatcagcccccagggcgtgtctgatgacagcagcacaggcagccgggtgcacgccagcaggcctgccagcctggacagcggccgcaccagcaccagcaacagcaacaacaatgccagcctgcacgaggtgaaggccggggctgtgaacaaccagagccggccccagagccacagcagtggagagttcagcctgctgcatgaccacgaggcctggagcagcagcggcagcagccccatccagtacctgaagaggcagaccaggagcagccctgtgctgcagcacaagatcagcgagaccctggagagccgccaccacaagatcaagacaggcagccctggcagcgaggtggtgaccctgcagcagttcctggaggagagcaacaagctgacctctgtgcagatcaagagcagcagccaggagaacctgctggatgaggtgatgaagagcctgtctgtgtccagtgacttcctgggcaaggacaagcctgtgtcctgtggcctggcccggtctgtgtctgggaagacccctggggacttctatgacaggaggaccaccaagccagagttcctgcggcccggccccaggaagacagaggacacctacttcatcagcagcgctgggaagcccaccccaggcacccagggcaagatcaagctggtgaaggagagcagcctgagccggcagagcaaggacagcaacccctatgccaccctgccccgggccagcagcgtcatcagcacagctgagggcaccaccaggaggaccagcatccatgacttcctgaccaaggacagccggctgcccatctctgtggacagccccccagctgctgctgacagcaacaccacagctgccagcaatgtggacaaggtgcaggagagcaggaacagcaagagccgcagccgggagcagcagagcagctag

SEQ ID NO: 148030 - DNA, 420 bp, synthetic construct
  misc_feature 1..420: note = Description of Artificial Sequence: Synthetic coding sequence
  source 1..420: mol_type = other DNA
atgccctgtgccgcccggagccgcagctcctggaggaggtcctggaccaacacagcctgctggagcctgtgcccctgccccggccccaggagccccagccctgcccccatgaggcgggcccagagcagcctgtgcctgagagatgagaccctggccggcggccagaggaggaagctgagcagccgcttccctgtgggccgcagcagcgagagcttcagccctggggacaccccccggcagcgcttccggcagaggcaccctggccccctgggcgcccctgtgagccacagcaagggccctggggtgggctgggagaacagcgctgagaccctgcaggagcacgagacagatgccaaccgggagggccctgaggtgcaggagcctgagaagaggcccctgacccccagcctgagccagtag

SEQ ID NO: 148031 - DNA, 4431 bp, synthetic construct
  misc_feature 1..4431: note = Description of Artificial Sequence: Synthetic coding sequence
  source 1..4431: mol_type = other DNA
atggagggcggcaagggcccccggctgcgggacttcctgagcggcagcctggccacctgggccctgggcctggccggcctggtgggggaggccgaggacagcgagggggaggaggaggaggaggaggaggagccccccctgtggctggagaagcgcttcctgcggctgagtgatggagccctgctgctgcgggtgctgggcatcatcgcccccagcagcagaggaggccccaggatgctgcggggcctggatggccctgctgcctggagggtgtggaacctgaaccacctgtggggccgcctgcgggacttctaccaggaggagctgcagctgctgatcctgagccccccaccagacctgcagaccctgggctttgaccccctgtctgaggaggccgtggagcagctggagggcgtgctgcggctgctgctgggcgcctctgtgcagtgtgagcaccgggagctgttcatccgccacatccagggcctgagcctggaggtgcagagcgagctggccgccgccatccaggaggtgacccagcctggagctggggtggtgctggccctgagcggccctgaccccggggagctggccccagctgagctggagatgctgagccgcagcctgatgggcaccctgagcaagctggcccgggagcgggacctgggcgcccagaggctggccgagctgctgctggagcgggagcccctgtgcctgcggcctgaggcccccagccgggccccagctgagggccccagccaccacctggccctgcagctggccaatgccaaggcccagctgcggcggctgcggcaggagctggaggagaaggccgagctgctgctggacagccaggccgaggtgcagggcctggaggccgagatccggcggctgcggcaggaggcccaggccctgagcggccaggccaagagagctgagctgtaccgggaggaggccgaggccctgcgggagcgggccggccgcctgccccggctgcaggaggagctgcggcgctgccgggagcggctgcaggccgctgaggcctacaagagccagctggaggaggagcgggtgctgagcggcgtgctggaggccagcaaggccctgctggaggagcagctggaggccgcccgggagcgctgtgcccggctgcacgagacccagcgggagaacctgctgctgcggacccggctgggggaggcccatgctgagctggacagcctgcggcaccaggtggaccagctggccgaggagaatgtggagctggagctggagctgcagaggagcctggagcccccacctggcagccctggagaggcccccctggccggggccgcccccagcctgcaggatgaggtgcgggaggccgaggccggccgcctgcggaccctggagagagaaaatcgggagctgcggggcctgctgcaggtgctgcagggccagcccggcggccagcaccccctgctggaggccccccgggaggaccctgtgctgcctgtgctggaggaggccccccagacccctgtggcctttgaccacagcccccagggcctggtgcagaaggccagagatggcggcccccaggccctggacctggcccccccagccctggacagcgtgctggaggccagcgctgagtgcccccaggccccagacagcgacccccaggaggccgagagccccctgcaggccgccgccatggacccccaggccagtgactggagcccccaggagagcggcagccctgtggagacccaggagagccctgagaaggccggccgccgcagcagcctgcagagccctgcctctgtggccccaccccagggccctggcaccaagatccaggccccccagctgctgggcggggagacagagggccgggaggccccccagggcgagctggtgcctgaggcctggggcctgcggcaggagggccctgagcacaagccaggccccagcgagcccagctctgtgcagctggaggagcaggagggccccaaccagggcctggacctggccaccggccaggccgaggcccgggagcatgaccagaggctggagggcaccgtgcgggaccctgcctggcagaagccccagcagaagtctgagggcgccctggaggtgcaggtgtgggagggccccatccctggagagagcctggccagcggcgtggccgagcaggaggccctgcgggaggaggtggcccagctgcggaggaaggccgaggccctgggagatgagctggaggcccaggccaggaagctggaggcccagaacacagaggccgcccggctgagcaaggagctggcccaggccaggagagctgaggccgaggcccaccgggaggccgaggcccaggcctgggagcaggcccggctgcgggaggccgtggaggccgccggccaggagctggagagcgccagccaggagcgggaggccctggtggaggccctggccgctgctggccgggagcggcggcagtgggagcgggagggcagccggctgcgggcccagagcgaggccgctgaggagaggatgcaggtgctggagagcgagggccggcagcacctggaggaggccgagcgggagcggcgggagaaggaggccctgcaggccgagctggagaaggctgtggtgcggggcaaggagctgggggaccggctggagcacctgcagcgggagctggagcaggccgccctggagcggcaggagttcctgcgggagaaggagagccagcaccagcgctaccagggcctggagcagaggctggaggccgagctgcaggccgccgccaccagcaaggaggaggccctgatggagctgaagacccgggccctgcagctggaggaggagctgttccagctgcggcagggccctgctggcctgggccccaagaagagagctgagccccagctggtggagacccagaatgtgcggctgattgaggtggagaggagcaatgccatgctggtggccgagaaggccgccctgcagggccagctgcagcacctggagggccagctgggcagcctgcagggccgggcccaggagctgctgctgcagagccagagggcccaggagcacagcagccggctgcaggccgagaagtctgtgctggagatccagggccaggagctgcacaggaagctggaggtgctggaggaggaggtgcgggccgcccggcagagccaggaggagacccggggccagcagcaggccctgctgcgggaccacaaggccctggcccagctgcagaggcggcaggaggccgagctggagggcctgctggtgcgccaccgggacctgaaggccaacatgagggccctggagctggcccaccgggagctgcagggcagacatgagcagctgcaggcccagagggcctctgtggaggcccaggaggtggccctgctggccgagcgggagcggctgatgcaggacggccaccggcagaggggcctggaggaggagctgcggcggctgcagagcgagcatgaccgggcccagatgctgctggccgagctgagccgggagcggggggagctgcagggcgagcggggggagctgcggggccgcctggcccggctggagctggagcgggcccagctggagatgcagagccagcagctgcgggagagcaaccagcagctggacctgagcgcctgccgcctgaccacccagtgtgagctgctgacccagctgcggagcgcccaggaggaggagaaccggcagctgctggccgaggtgcaggccctgagcagagaaaatcgggagctgctggagaggagcctggagagccgggaccacctgcaccgggagcagcgggagtacctggaccagctgaatgccctgcggcgggagaagcagaagctggtggagaagatcatggaccagtacagagtgctggagcctgtgcccctgcccaggaccaagaagggctcctggctggccgacaaggtgaagaggctgatgaggccccggcgggagggcggccccccaggcggcctgcggctgggcgcagatggagctggcagcacagagagcctgggcggccccccagagacagagctgcctgagggccgggaggctgatggcaccggcagccccagccctgcccccatgagaagagcccagagcagcctgtgcctgagagatgagaccctggccggcggccagaggaggaagctgagcagccgcttccctgtgggccgcagcagcgagagcttcagccctggggacaccccccggcagcgcttccggcagaggcaccctggccccctgggcgcccctgtgagccacagcaaaggacctggggtgggctgggagaacagcgctgagaccctgcaggagcatgaaacagatgccaaccgggagggccctgaggtgcaggagcctgagaagaggcccctgacccccagcctgagccagtag

SEQ ID NO: 148032 - DNA, 2139 bp, synthetic construct
  misc_feature 1..2139: note = Description of Artificial Sequence: Synthetic coding sequence
  source 1..2139: mol_type = other DNA
atggccggcgtggccgcccaccgggcccacccccccttcaccgcccacatgaagaacagaggcctgcgggaggagctggagaaggctgtggtgcggggcaaggagctgggggaccggctggagcacctgcagcgggagctggagcaggccgccctggagcggcaggagttcctgcgggagaaggagagccagcaccagcgctaccagggcctggagcagaggctggaggccgagctgcaggccgccgccaccagcaaggaggaggccctgatggagctgaagacccgggccctgcagctggaggaggagctgttccagctgcggcagggccctgctggcctgggccccaagaagagagctgagccccagctggtggagacccagaatgtgcggctgattgaggtggagaggagcaatgccatgctggtggccgagaaggccgccctgcagggccagctgcagcacctggagggccagctgggcagcctgcagggccgggcccaggagctgctgctgcagagccagagggcccaggagcacagcagccggctgcaggccgagaagtctgtgctggagatccagggccaggagctgcacaggaagctggaggtgctggaggaggaggtgcgggccgcccggcagagccaggaggagacccggggccagcagcaggccctgctgcgggaccacaaggccctggcccagctgcagaggcggcaggaggccgagctggagggcctgctggtgcgccaccgggacctgaaggccaacatgagggccctggagctggcccaccgggagctgcagggcagacatgagcagctgcaggcccagagggcctctgtggaggcccaggaggtggccctgctggccgagcgggagcggctgatgcaggacggccaccggcagaggggcctggaggaggagctgcggcggctgcagagcgagcatgaccgggcccagatgctgctggccgagctgagccgggagcggggggagctgcagggcgagcggggggagctgcggggccgcctggcccggctggagctggagcgggcccagctggagatgcagagccagcagctgcgggagagcaaccagcagctggacctgagcgcctgccgcctgaccacccagtgtgagctgctgacccagctgcggagcgcccaggaggaggagaaccggcagctgctggccgaggtgcaggccctgagcagagaaaatcgggagctgctggagaggagcctggagagccgggaccacctgcaccgggagcagcgggagtacctggaccagctgaatgccctgcggcgggagaagcagaagctggtggagaagatcatggaccagtacagagtgctggagcctgtgcccctgcccaggaccaagaagggctcctggctggccgacaagggccccctgcccaggcacccctgtgccggcccccgggcccccagcgcctgtggcatgaggccctggcaggccggcagcggcggcaacagcgcccagggcagccgctggggcgaggccctgagccacagcgccctgggcacccccctgggcaatgacagcgacagcgccatccaggccccctggggccggcccagccccacagccaaggacctggtgtgggatggccgcacccccctgcggccctgcaggaacaccaagcagatgcccacagagcgggccctgcgctacagaaacagaagaaatgtgcccagcccccaccccagcgccagtgacacagtgggcacagctggcctgggcgtgcagcccagccgccactggagcgtgtctgggggcccccggcagcccaagagcagcggcagccagggcccccagggcgagagcctggacaaggaggcctgggccctgcggagcagcacagtgtctgctggggcccggcgctggagctgggatgaatgtgtggacagaggagatggctggccaccccgggccgcccctggctggagcagcggcagcagccgctggctgcccctgcggcagaggagcctgggggaccccccagctgagggcggctggcaggagctggcccgggagcccccagccctgagccgctgggaggccgagagccagtgctggggcaccgtggcctgggccgacctggagccctag

SEQ ID NO: 148033 - DNA, 4077 bp, synthetic construct
  misc_feature 1..4077: note = Description of Artificial Sequence: Synthetic coding sequence
  source 1..4077: mol_type = other DNA
atggagggcggcaagggcccccggctgcgggacttcctgagcggcagcctggccacctgggccctgggcctggccggcctggtgggggaggccgaggacagcgagggggaggaggaggaggaggaggaggagccccccctgtggctggagaagcgcttcctgcggctgagtgatggagccctgctgctgcgggtgctgggcatcatcgcccccagcagcagaggaggccccaggatgctgcggggcctggatggccctgctgcctggagggtgtggaacctgaaccacctgtggggccgcctgcgggacttctaccaggaggagctgcagctgctgatcctgagccccccaccagacctgcagaccctgggctttgaccccctgtctgaggaggccgtggagcagctggagggcgtgctgcggctgctgctgggcgcctctgtgcagtgtgagcaccgggagctgttcatccgccacatccagggcctgagcctggaggtgcagagcgagctggccgccgccatccaggaggtgacccagcctggagctggggtggtgctggccctgagcggccctgaccccggggagctggccccagctgagctggagatgctgagccgcagcctgatgggcaccctgagcaagctggcccgggagcgggacctgggcgcccagaggctggccgagctgctgctggagcgggagcccctgtgcctgcggcctgaggcccccagccgggccccagctgagggccccagccaccacctggccctgcagctggccaatgccaaggcccagctgcggcggctgcggcaggagctggaggagaaggccgagctgctgctggacagccaggccgaggtgcagggcctggaggccgagatccggcggctgcggcaggaggcccaggccctgagcggccaggccaagagagctgagctgtaccgggaggaggccgaggccctgcgggagcgggccggccgcctgccccggctgcaggaggagctgcggcgctgccgggagcggctgcaggccgctgaggcctacaagagccagctggaggaggagcgggtgctgagcggcgtgctggaggccagcaaggccctgctggaggagcagctggaggccgcccgggagcgctgtgcccggctgcacgagacccagcgggagaacctgctgctgcggacccggctgggggaggcccatgctgagctggacagcctgcggcaccaggtggaccagctggccgaggagaatgtggagctggagctggagctgcagaggagcctggagcccccacctggcagccctggagaggcccccctggccggggccgcccccagcctgcaggatgaggtgcgggaggccgaggccggccgcctgcggaccctggagagagaaaatcgggagctgcggggcctgctgcaggtgctgcagggccagcccggcggccagcaccccctgctggaggccccccgggaggaccctgtgctgcctgtgctggaggaggccccccagacccctgtggcctttgaccacagcccccagggcctggtgcagaaggccagagatggcggcccccaggccctggacctggcccccccagccctggacagcgtgctggaggccagcgctgagtgcccccaggccccagacagcgacccccaggaggccgagagccccctgcaggccgccgccatggacccccaggccagtgactggagcccccaggagagcggcagccctgtggagacccaggagagccctgagaaggccggccgccgcagcagcctgcagagccctgcctctgtggccccaccccagggccctggcaccaagatccaggccccccagctgctgggcggggagacagagggccgggaggccccccagggcgagctggtgcctgaggcctggggcctgcggcaggagggccctgagcacaagccaggccccagcgagcccagctctgtgcagctggaggagcaggagggccccaaccagggcctggacctggccaccggccaggccgaggcccgggagcatgaccagaggctggagggcaccgtgcgggaccctgcctggcagaagccccagcagaagtctgagggcgccctggaggtgcaggtgtgggagggccccatccctggagagagcctggccagcggcgtggccgagcaggaggccctgcgggaggaggtggcccagctgcggaggaaggccgaggccctgggagatgagctggaggcccaggccaggaagctggaggcccagaacacagaggccgcccggctgagcaaggagctggcccaggccaggagagctgaggccgaggcccaccgggaggccgaggcccaggcctgggagcaggcccggctgcgggaggccgtggaggccgccggccaggagctggagagcgccagccaggagcgggaggccctggtggaggccctggccgctgctggccgggagcggcggcagtgggagcgggagggcagccggctgcgggcccagagcgaggccgctgaggagaggatgcaggtgctggagagcgagggccggcagcacctggaggaggccgagcgggagcggcgggagaaggaggccctgcaggccgagctggagaaggctgtggtgcggggcaaggagctgggggaccggctggagcacctgcagcgggagctggagcaggccgccctggagcggcaggagttcctgcgggagaaggagagccagcaccagcgctaccagggcctggagcagaggctggaggccgagctgcaggccgccgccaccagcaaggaggaggccctgatggagctgaagacccgggccctgcagctggaggaggagctgttccagctgcggcagggccctgctggcctgggccccaagaagagagctgagccccagctggtggagacccagaatgtgcggctgattgaggtggagaggagcaatgccatgctggtggccgagaaggccgccctgcagggccagctgcagcacctggagggccagctgggcagcctgcagggccgggcccaggagctgctgctggccgagcgggagcggctgatgcaggacggccaccggcagaggggcctggaggaggagctgcggcggctgcagagcgagcatgaccgggcccagatgctgctggccgagctgagccgggagcggggggagctgcagggcgagcggggggagctgcggggccgcctggcccggctggagctggagcgggcccagctggagatgcagagccagcagctgcgggagagcaaccagcagctggacctgagcgcctgccgcctgaccacccagtgtgagctgctgacccagctgcggagcgcccaggaggaggagaaccggcagctgctggccgaggtgcaggccctgagcagagaaaatcgggagctgctggagaggagcctggagagccgggaccacctgcaccgggagcagcgggagtacctggaccagctgaatgccctgcggcgggagaagcagaagctggtggagaagatcatggaccagtacagagtgctggagcctgtgcccctgcccaggaccaagaagggctcctggctggccgacaaggtgaagaggctgatgaggccccggcgggagggcggccccccaggcggcctgcggctgggcgcagatggagctggcagcacagagagcctgggcggccccccagagacagagctgcctgagggccgggaggctgatggcaccggcagccccagccctgcccccatgagaagagcccagagcagcctgtgcctgagagatgagaccctggccggcggccagaggaggaagctgagcagccgcttccctgtgggccgcagcagcgagagcttcagccctggggacaccccccggcagcgcttccggcagaggcaccctggccccctgggcgcccctgtgagccacagcaaaggacctggggtgggctgggagaacagcgctgagaccctgcaggagcatgaaacagatgccaaccgggagggccctgaggtgcaggagcctgagaagaggcccctgacccccagcctgagccagtag

SEQ ID NO: 148034 - DNA, 684 bp, synthetic construct
  misc_feature 1..684: note = Description of Artificial Sequence: Synthetic coding sequence
  source 1..684: mol_type = other DNA
atgggcggcaccaccagcacccggcgggtgacctttgaagcagatgaaaatgaaaacatcaccgtggtgaagggcatccggctgtctgaaaatgtgattgacaggatgaaggagagcagccccagcggcagcaagagccagcgctacagcggggcctatggagcctctgtgtctgatgaggagctgaagagaagagtggccgaggagctggccctggagcaggccaagaaggagagcgaggaccagaagaggctgaagcaggccaaggagctggaccgggagagagctgctgccaatgagcagctgacccgggccatcctgcgggagcgcatctgcagcgaggaggagcgggccaaggccaagcacctggcccggcagctggaggagaaggacagagtgctgaagaagcaggatgccttctacaaggagcagctggcccggctggaggagaggagcagcgagttctacagagtgaccacagagcagtaccagaaggctgctgaggaggtggaggccaagttcaagagatatgagagccaccctgtgtgtgccgacctgcaggccaagatcctgcagtgctaccgggagaacacccaccagaccctgaagtgcagcgccctggccacccagtacatgcactgtgtgaaccacgccaagcagagcatgctggagaagggcggctag

SEQ ID NO: 148035 - DNA, 417 bp, synthetic construct
  misc_feature 1..417: note = Description of Artificial Sequence: Synthetic coding sequence
  source 1..417: mol_type = other DNA
atgggcggcaccaccagcacccggcgggtgacctttgaagcagatgaaaatgaaaacatcaccgtggtgaagggcatccggctgtctgaaaatgtgattgacaggatgaaggagagcagccccagcggcagcaagagccagcgctacagcggggcctatggagcctctgtgtctgatgaggagctgaagagaagagtggccgaggagctggccctggagcaggccaagaaggagagcgaggaccagaagaggctgaagcaggccaaggagctggaccgggagagagctgctgccaatgagcagctgacccgggccatcctgcgggagcgcatctgcagcgaggaggagcgggccaaggccaagcacctgatcaaggtggagctgctgtgggtgaagccaggagtgctgacagcctag

SEQ ID NO: 148036 - DNA, 333 bp, synthetic construct
  misc_feature 1..333: note = Description of Artificial Sequence: Synthetic coding sequence
  source 1..333: mol_type = other DNA
atgaagtgtgaggagacccacgcccccaacagcaactgggtgtatgtgatgctgcccagcaagaagacagtgaggatgcccagcgtgacccagaggctgcgggaccctgacatcaacccctgcctgtctgagagtgatgccagcacccgctgcctggatgagaacaactatgaccgggagcgctgcagcacctacttcctgcgctacaagaactgccgccgcttctggaacagcatcgtgatgcagaggaggaagaatggagtgaagcccttcatgcccacagctgctgagagagatgagatcctgcgggctgtgggcaacatgccctactag

SEQ ID NO: 148037 - DNA, 258 bp, synthetic construct
  misc_feature 1..258: note = Description of Artificial Sequence: Synthetic coding sequence
  source 1..258: mol_type = other DNA
atgcccagcgtgacccagaggctgcgggaccctgacatcaacccctgcctgtctgagagtgatgccagcacccgctgcctggatgagaacaactatgaccgggagcgctgcagcacctacttcctgcgctacaagaactgccgccgcttctggaacagcatcgtgatgcagaggaggaagaatggagtgaagcccttcatgcccacagctgctgagagagatgagatcctgcgggctgtgggcaacatgccctactag

SEQ ID NO: 148038 - DNA, 285 bp, synthetic construct
  misc_feature 1..285: note = Description of Artificial Sequence: Synthetic coding sequence
  source 1..285: mol_type = other DNA
atgctgcccagcaagaagacagtgaggatgcccagcgtgacccagaggctgcgggaccctgacatcaacccctgcctgtctgagagtgatgccagcacccgctgcctggatgagaacaactatgaccgggagcgctgcagcacctacttcctgcgctacaagaactgccgccgcttctggaacagcatcgtgatgcagaggaggaagaatggagtgaagcccttcatgcccacagctgctgagagagatgagatcctgcgggctgtgggcaacatgccctactag

SEQ ID NO: 148039 - DNA, 135 bp, synthetic construct
  misc_feature 1..135: note = Description of Artificial Sequence: Synthetic coding sequence
  source 1..135: mol_type = other DNA
atgcccagcgtgacccagaggctgcgggaccctgacatcaacccctgcctgtctgagagtgatgccagcacccgctgcctggatgagaacaactatgaccgggagcgctgcagcacctacttcctgcgctactag

SEQ ID NO: 148040 - DNA, 294 bp, synthetic construct
  misc_feature 1..294: note = Description of Artificial Sequence: Synthetic coding sequence
  source 1..294: mol_type = other DNA
atgcaccagaccaggacaggcaagaagacagtgaggatgcccagcgtgacccagaggctgcgggaccctgacatcaacccctgcctgtctgagagtgatgccagcacccgctgcctggatgagaacaactatgaccgggagcgctgcagcacctacttcctgcgctacaagaactgccgccgcttctggaacagcatcgtgatgcagaggaggaagaatggagtgaagcccttcatgcccacagctgctgagagagatgagatcctgcgggctgtgggcaacatgccctactag

SEQ ID NO: 148041 - DNA, 207 bp, synthetic construct
  misc_feature 1..207: note = Description of Artificial Sequence: Synthetic coding sequence
  source 1..207: mol_type = other DNA
atgcaccagaccaggacaggcaagaagacagtgaggatgcccagcgtgacccagaggctgcgggaccctgacatcaacccctgcctgagcatcctcttctacctgctgaatgatgccagcctcatctctgtgaggaacctgatgctgcccccagatgtgtggatgaagatcaccatgaccgggaagggcgtgcccctgaccagctag

SEQ ID NO: 148042 - DNA, 264 bp, synthetic construct
  misc_feature 1..264: note = Description of Artificial Sequence: Synthetic coding sequence
  source 1..264: mol_type = other DNA
atgagcacctctgtgccccagggccacacctggacccagagggtgaagaaggatgatgaggaggaggaccccctggaccagctgatcagccgcagcggctgtgccgccagccactttgctgtgcaggagtgcatggcccagcaccaggactggaggcagtgccagccccaggtgcaggccttcaaggactgcatgtctgagcagcaggcccggcggcaggaggagctgcagaggcggcaggagcaggccggggcccaccactag

SEQ ID NO: 148043 - DNA, 264 bp, synthetic construct; identical to SEQ ID NO: 148042
  misc_feature 1..264: note = Description of Artificial Sequence: Synthetic coding sequence
  source 1..264: mol_type = other DNA

SEQ ID NO: 148044 - DNA, 291 bp, synthetic construct
  misc_feature 1..291: note = Description of Artificial Sequence: Synthetic coding sequence
  source 1..291: mol_type = other DNA
atgttctaccgcctgcccatccccaggatgagcacctctgtgccccagggccacacctggacccagagggtgaagaaggatgatgaggaggaggaccccctggaccagctgatcagccgcagcggctgtgccgccagccactttgctgtgcaggagtgcatggcccagcaccaggactggaggcagtgccagccccaggtgcaggccttcaaggactgcatgtctgagcagcaggcccggcggcaggaggagctgcagaggcggcaggagcaggccggggcccaccactag

SEQ ID NO: 148045 - DNA, 264 bp, synthetic construct; identical to SEQ ID NO: 148042
  misc_feature 1..264: note = Description of Artificial Sequence: Synthetic coding sequence
  source 1..264: mol_type = other DNA

SEQ ID NO: 148046 - DNA, 1731 bp, synthetic construct
  misc_feature 1..1731: note = Description of Artificial Sequence: Synthetic coding sequence
  source 1..1731: mol_type = other DNA
atggccgccagcgagaccgtgcggctgcggctgcagtttgactacccacctccagccaccccccactgcacagccttctggctgctggtggacctgaaccgctgccgggtggtgacagacctgatcagcctcatccggcagagatttggcttcagcagcggggccttcctgggcctgtacctggagggcggcctgctgcccccagctgagagcgcccggctggtgcgggacaatgactgcctgcgggtgaagctggaggagcggggcgtggccgagaacagcgtggtgatcagcaatggagacatcaacctgagcctgaggaaggccaagaagagggccttccagctggaggagggggaggagacagagccagactgcaagtacagcaagaagcactggaagagccgggagaacaacaacaacaatgagaaggtgctggacctggagcccaaggctgtgacagaccagacagtgtccaagaagaacaagaggaagaacaaggccacctgtggcaccgtgggagatgacaatgaggaggccaagaggaagagccccaagaagaaggagaagtgtgagtacaagaagaaggccaagaaccccaagagccccaaggtgcaggccgtgaaggactgggccaaccagcgctgcagcagccccaagggcagcgccaggaacagcctggtgaaggccaagaggaaaggatctgtgtctgtgtgcagcaaggagagccccagcagcagcagcgagagcgagagctgtgatgagagcatcagtgatggccccagcaaggtgaccctggaggccaggaacagcagcgagaagctgcccacagagctgagcaaggaggagcccagcaccaagaacaccacagctgacaagctggccatcaagctgggcttcagcctgacccccagcaagggcaagaccagcggcaccaccagcagcagcagtgacagcagcgctgagagtgatgaccagtgcctgatgagcagcagcaccccagaatgtgccgccggcttcctgaagacagtgggcctgtttgctggccggggccggcccggccctggcctgagcagccagacagctggagctgctggctggaggaggagcggcagcaatggaggcggccaggcccctggggccagccccagcgtgtccctgcctgccagcctgggccggggctggggccgggaggagaacctcttctcctggaagggggccaagggccggggcatgaggggccggggccggggccggggccaccctgtgtcctgtgtggtgaacagaagcacagacaaccagaggcagcagcagctgaatgatgtggtgaagaacagcagcaccatcatccagaaccctgtggagacccccaagaaggactacagcctgctgcccctgctggccgccgccccccaggtgggggagaagatcgccttcaagctgctggagctgaccagcagctacagcccagatgtgtctgactacaaggagggccgcatcctgagccacaaccctgagacccagcaggtggacatcgagatcctgagcagcctgcctgccctgcgggagcccgggaagtttgacctggtgtaccacaatgaaaatggagctgaggtggtggagtatgctgtgacccaggagagcaagatcaccgtcttctggaaggagctgattgaccccaggctcatcatcgagagccccagcaacaccagcagcacagagcccgcctag

SEQ ID NO: 148047 - DNA, 519 bp, synthetic construct
  misc_feature 1..519: note = Description of Artificial Sequence: Synthetic coding sequence
  source 1..519: mol_type = other DNA
atggccagtgatgagggcaagctgtttgtgggcggcctgagctttgacaccaatgagcagagcctggagcaggtgttcagcaaatatggccagatcagcgaggtggtggtggtgaaggaccgggagacccagaggagccggggctttggatttgtgacctttgaaaatattgatgatgccaaggatgccatgatggccatgaatggcaagtctgtggatggccggcagatccgggtggaccaggccggcaagagcagtgacaacagaagccggggctacagaggaggcagcgctgggggccggggcttcttccggggcggccggggccggggccggggcttcagcagaggaggaggagaccggggctatggaggcaacagatttgagagccgcagcggcggctatggaggcagccgggactactacagcagccgcagccagagcggcggctacagcgacaggagcagcggcggcagctacagagacagctatgacagctatgccacccacaatgaatag

SEQ ID NO: 148048 - DNA, 792 bp, synthetic construct
  misc_feature 1..792: note = Description of Artificial Sequence: Synthetic coding sequence
  source 1..792: mol_type = other DNA
atggccagtgatgagggcaagctgtttgtgggcggcctgagctttgacaccaatgagcagagcctggagcaggtgttcagcaaatatggccagatcagcgaggtggtggtggtgaaggaccgggagacccagaggagccggggctttggatttgtgacctttgaaaatattgatgatgccaaggatgccatgatggccatgaatggcaagtctgtggatggccggcagatccgggtggaccaggccggcggcggggaccggggctatggaggcaacagatttgagagccgcagcggcggctatggaggcagccgggactactacagcagccgcagccagagcggcggctacagcgacaggagcagcggcggcagctacagagacagctatgacagctatggcaagagccacagcgagggcgccaccctgctgtggccagctgtgggcgcccgcttcaccctggtgcccagccccagcaccctgggctggaccctgcggccctgccactgtgcctgcccagaggaggcccacctgagcagccagagccacttctacagaaggacccagaagcccaatgaaacagaccagaagggcaaaggagagcggggccctgctggccagagcgcccgctgcatgtgtggcagaagacctgccagcctgggctgcggcggctggctgctgcccggccggcggccccggcccggcctggccagcggcgtgaagctgcccctggtggcctctgtgcccctgcactgtgcctgcttcctgagcagcgccacccacaatgaatag

SEQ ID NO: 148049 - DNA, 735 bp, synthetic construct
  misc_feature 1..735: note = Description of Artificial Sequence: Synthetic coding sequence
  source 1..735: mol_type = other DNA
atgagcagccgctggagccgcagcagccagagcacagacaggagcctgaagtctgtggatggccggcagatccgggtggaccaggccggcaagagcagtgacaacagaagccggggctaccggggcggcagcgctgggggccggggcttcttccggggcggccggggccggggccggggcttcagccggggcggcggggaccggggctacggcggcaacagatttgagagccgcagcggcggctacggcggcagccgggactactacagcagccgcagccagagcggcggctacagcgacaggagcagcggcggcagctacagagacagctatgacagctatggcaagagccacagcgagggcgccaccctgctgtggccagctgtgggcgcccgcttcaccctggtgcccagccccagcaccctgggctggaccctgcggccctgccactgtgcctgcccagaggaggcccacctgagcagccagagccacttctacagaaggacccagaagcccaatgaaacagaccagaagggcaagggggagcggggccctgctggccagagcgcccgctgcatgtgtggccggcggcctgccagcctgggctgcggcggctggctgctgcctggaagaagacccaggcctggcctggccagcggcgtgaagctgcccctggtggcctctgtgcccctgcactgtgcctgcttcctgagcagcgccacccacaatgaatag

SEQ ID NO: 148050 - DNA, 519 bp, synthetic construct; identical to SEQ ID NO: 148047
  misc_feature 1..519: note = Description of Artificial Sequence: Synthetic coding sequence
  source 1..519: mol_type = other DNA

SEQ ID NO: 148051 - DNA, 2304 bp, synthetic construct
  misc_feature 1..2304: note = Description of Artificial Sequence: Synthetic coding sequence
  source 1..2304: mol_type = other DNA
atgagctttgaccccaacctgctgcacaacaacggccacaacggctaccccaacggcaccagcgctgccctgcgggagactggagtcatcgagaagctgctgaccagctatggcttcatccagtgcagcgagcggcaggcccggctcttcttccactgcagccagtacaatggaaacctgcaggacctgaaggtgggagatgatgtggagtttgaggtgtccagtgacagaagaacaggcaagcccatcgctgtgaagctggtgaagatcaagcaggagatcctgcctgaggagaggatgaatggccaggaggtgttctacctgacctacaccccagaagatgtggagggcaatgtgcagctggagactggagacaagatcaactttgtgattgacaacaacaagcacactggagctgtgtctgccaggaacatcatgctgctgaagaagaagcaggcccgctgccagggcgtggtgtgtgccatgaaggaggccttcggcttcatcgagagaggagatgtggtgaaggagatcttcttccactacagcgagttcaagggggacctggagaccctgcagcctggagatgatgtggagttcaccatcaaggacagaaatggcaaggaggtggccacagatgtgcggctgctgccccagggcaccgtcatctttgaggacatcagcattgagcactttgagggcaccgtgaccaaggtgatccccaaggtgcccagcaagaaccagaatgaccccctgcccggccgcatcaaggtggactttgtgatccccaaggagctgccctttggagacaaggacaccaagagcaaggtgaccctgctggagggggaccacgtgcgcttcaacatcagcacagacagaagagacaagctggagcgggccaccaacatcgaggtgctgagcaacaccttccagttcaccaatgaggcccgggagatgggcgtgattgctgccatgagagatggcttcggcttcatcaagtgtgtggacagagatgtgaggatgttcttccacttcagcgagatcctggatggcaaccagctgcacatcgcagatgaggtggagttcaccgtggtgcctgacatgctgagcgcccagagaaatcatgccatccgcatcaagaagctgcccaagggcaccgtgtccttccacagccacagcgaccaccgcttcctgggcaccgtggagaaggaggccaccttcagcaaccccaagaccaccagccccaacaagggcaaggagaaggaggccgaggatggcatcatcgcctatgatgactgtggggtgaagctgaccatcgccttccaggccaaggatgtggagggcagcaccagcccccagatcggggacaaggtggagttcagcatcagtgacaagcagaggcctggccagcaggtggccacctgtgtgcggctgctgggcaggaacagcaacagcaagaggctgctgggctacgtggccaccctgaaggacaactttggcttcatcgagacagccaaccacgacaaggagatcttcttccactacagcgagttctctggagatgtggacagcctggagctgggggacatggtggagtacagcctgagcaaaggaaaaggaaacaaggtgtctgctgagaaggtgaacaagacccacagcgtgaatggcatcacagaggaggccgaccccaccatctacagcggcaaggtgatccggcccctgcggtctgtggaccccacccagacagagtaccagggcatgattgagatcgtggaggagggggacatgaagggggaggtgtacccctttggaattgtgggcatggccaacaagggggactgcctgcagaagggggagagcgtgaagttccagctgtgtgtgctgggccagaatgcccagaccatggcctacaacatcacccccctgcggcgggccaccgtggagtgtgtgaaggaccagtttggcttcatcaactatgaggtgggggacagcaagaagctgttcttccacgtgaaggaggtgcaggacggcatcgagctgcaggccggagatgaggtggagttcagcgtcatcctgaaccagaggacaggcaagtgcagcgcctgcaatgtgtggagggtgtgtgagggccccaaggctgtggccgcccccaggccagaccggctggtgaaccggctgaagaacatcaccctggatgatgccagcgccccccggctgatggtgctgcggcagccccggggccctgacaacagcatgggctttggagctgagaggaagatccggcaggccggggtcatcgactag

SEQ ID NO: 148052 - DNA, 2304 bp, synthetic construct; identical to SEQ ID NO: 148051
  misc_feature 1..2304: note = Description of Artificial Sequence: Synthetic coding sequence
  source 1..2304: mol_type = other DNA

SEQ ID NO: 148053 - DNA, 2397 bp, synthetic construct
  misc_feature 1..2397: note = Description of Artificial Sequence: Synthetic coding sequence
  source 1..2397: mol_type = other DNA
atgagctttgaccccaacctgctgcacaacaacggccacaacggctaccccaacggcaccagcgctgccctgcgggagactggagtcatcgagaagctgctgaccagctatggcttcatccagtgcagcgagcggcaggcccggctcttcttccactgcagccagtacaatggaaacctgcaggacctgaaggtgggagatgatgtggagtttgaggtgtccagtgacagaagaacaggcaagcccatcgctgtgaagctggtgaagatcaagcaggagatcctgcctgaggagaggatgaatggccaggtggtgtgtgctgtgccccacaacctggagagcaagagccctgctgcccctggccagagccccactggatctgtgtgctatgaaagaaatggagaggtgttctacctgacctacaccccagaagatgtggagggcaatgtgcagctggagaccggggacaagatcaacttcgtcatcgacaacaacaagcacactggagctgtgtctgccaggaacatcatgctgctgaagaagaagcaggcccgctgccagggcgtggtgtgtgccatgaaggaggccttcggcttcatcgagagaggagatgtggtgaaggagatcttcttccactacagcgagttcaagggggacctggagaccctgcagcctggagatgatgtggagttcaccatcaaggacagaaatggcaaggaggtggccacagatgtgcggctgctgccccagggcaccgtcatctttgaggacatcagcattgagcactttgagggcaccgtgaccaaggtgatccccaaggtgcccagcaagaaccagaatgaccccctgcccggccgcatcaaggtggactttgtgatccccaaggagctgccctttggagacaaggacaccaagagcaaggtgaccctgctggagggggaccacgtgcgcttcaacatcagcacagaccggcgggacaagctggagcgggccaccaacatcgaggtgctgagcaacaccttccagttcaccaatgaggcccgggagatgggcgtgattgctgccatgagagatggcttcggcttcatcaagtgtgtggacagagatgtgaggatgttcttccacttcagcgagatcctggatggcaaccagctgcacatcgcagatgaggtggagttcaccgtggtgcctgacatgctgagcgcccagaggaaccacgccatccgcatcaagaagctgcccaagggcaccgtgtccttccacagccacagcgaccaccgcttcctgggcaccgtggagaaggaggccaccttcagcaaccccaagaccaccagccccaacaagggcaaggagaaggaggctgaagatggcatcatcgcctatgatgactgtggggtgaagctgaccatcgccttccaggccaaggatgtggagggcagcaccagcccccagattggagacaaggtggagttcagcatcagtgacaagcagaggcctggccagcaggtggccacctgtgtgcggctgctgggcaggaacagcaacagcaagaggctgctgggctacgtggccaccctgaaggacaactttggcttcattgaaacagccaaccacgacaaggagatcttcttccactacagcgagttctctggagatgtggacagcctggagctgggggacatggtggagtacagcctgagcaagggcaagggcaacaaggtgtctgctgagaaggtgaacaagacccacagcgtgaatggcatcacagaggaggccgaccccaccatctacagcggcaaggtgatccggcccctgcggtctgtggaccccacccagacagagtaccagggcatgattgaaattgtggaggagggggacatgaagggggaggtgtaccccttcggcatcgtgggcatggccaacaagggggactgcctgcagaagggggagagcgtgaagttccagctgtgtgtgctgggccagaatgcccagaccatggcctacaacatcacccccctgcggcgggccaccgtggagtgtgtgaaggaccagtttggcttcatcaactatgaggtgggggacagcaagaagctgttcttccacgtgaaggaggtgcaggacggcatcgagctgcaggccggagatgaggtggagttcagcgtcatcctgaaccagaggactggaaaatgttctgcctgcaatgtgtggagggtgtgtgagggccccaaggctgtggccgcccccaggccagaccggctggtgaaccggctgaagaacatcaccctggatgatgccagcgccccccggctgatggtgctgcggcagccccggggccctgacaacagcatgggctttggagctgagaggaagatccggcaggccggcgtgattgattag

SEQ ID NO: 148054 - DNA, 2442 bp, synthetic construct
  misc_feature 1..2442: note = Description of Artificial Sequence: Synthetic coding sequence
  source 1..2442: mol_type = other DNA
atggagaatgtgttcaccgtgtccagtgacccccaccccagccctgctgccccacccagcctgagcctgcccctgagcagcagcagcaccagcagcggcaccaagaagcagaagaggacccccacctaccagaggtccatgagctttgaccccaacctgctgcacaacaacggccacaacggctaccccaacggcaccagcgctgccctgcgggagactggagtcatcgagaagctgctgaccagctatggcttcatccagtgcagcgagcggcaggcccggctcttcttccactgcagccagtacaatggaaacctgcaggacctgaaggtgggagatgatgtggagtttgaggtgtccagtgacagaagaacaggcaagcccatcgctgtgaagctggtgaagatcaagcaggagatcctgcctgaggagaggatgaatggccaggaggtgttctacctgacctacaccccagaagatgtggagggcaatgtgcagctggagactggagacaagatcaactttgtgattgacaacaacaagcacactggagctgtgtctgccaggaacatcatgctgctgaagaagaagcaggcccgctgccagggcgtggtgtgtgccatgaaggaggccttcggcttcatcgagagaggagatgtggtgaaggagatcttcttccactacagcgagttcaagggggacctggagaccctgcagcctggagatgatgtggagttcaccatcaaggacagaaatggcaaggaggtggccacagatgtgcggctgctgccccagggcaccgtcatctttgaggacatcagcattgagcactttgagggcaccgtgaccaaggtgatccccaaggtgcccagcaagaaccagaatgaccccctgcccggccgcatcaaggtggactttgtgatccccaaggagctgccctttggagacaaggacaccaagagcaaggtgaccctgctggagggggaccacgtgcgcttcaacatcagcacagacagaagagacaagctggagcgggccaccaacatcgaggtgctgagcaacaccttccagttcaccaatgaggcccgggagatgggcgtgattgctgccatgagagatggcttcggcttcatcaagtgtgtggacagagatgtgaggatgttcttccacttcagcgagatcctggatggcaaccagctgcacatcgcagatgaggtggagttcaccgtggtgcctgacatgctgagcgcccagagaaatcatgccatccgcatcaagaagctgcccaagggcaccgtgtccttccacagccacagcgaccaccgcttcctgggcaccgtggagaaggaggccaccttcagcaaccccaagaccaccagccccaacaagggcaaggagaaggaggccgaggatggcatcatcgcctatgatgactgtggggtgaagctgaccatcgccttccaggccaaggatgtggagggcagcaccagcccccagatcggggacaaggtggagttcagcatcagtgacaagcagaggcctggccagcaggtggccacctgtgtgcggctgctgggcaggaacagcaacagcaagaggctgctgggctacgtggccaccctgaaggacaactttggcttcatcgagacagccaaccacgacaaggagatcttcttccactacagcgagttctctggagatgtggacagcctggagctgggggacatggtggagtacagcctgagcaaaggaaaaggaaacaaggtgtctgctgagaaggtgaacaagacccacagcgtgaatggcatcacagaggaggccgaccccaccatctacagcggcaaggtgatccggcccctgcggtctgtggaccccacccagacagagtaccagggcatgattgagatcgtggaggagggggacatgaagggggaggtgtacccctttggaattgtgggcatggccaacaagggggactgcctgcagaagggggagagcgtgaagttccagctgtgtgtgctgggccagaatgcccagaccatggcctacaacatcacccccctgcggcgggccaccgtggagtgtgtgaaggaccagtttggcttcatcaactatgaggtgggggacagcaagaagctgttcttccacgtgaaggaggtgcaggacggcatcgagctgcaggccggagatgaggtggagttcagcgtcatcctgaaccagaggacaggcaagtgcagcgcctgcaatgtgtggagggtgtgtgagggccccaaggctgtggccgcccccaggccagaccggctggtgaaccggctgaagaacatcaccctggatgatgccagcgccccccggctgatggtgctgcggcagccccggggccctgacaacagcatgggctttggagctgagaggaagatccggcaggccggggtcatcgactag

SEQ ID NO: 148055 - DNA, 2535 bp, synthetic construct
  misc_feature 1..2535: note = Description of Artificial Sequence: Synthetic coding sequence
  source 1..2535: mol_type = other DNA
atggagaatgtgttcaccgtgtccagtgacccccaccccagccctgctgccccacccagcctgagcctgcccctgagcagcagcagcaccagcagcggcaccaagaagcagaagaggacccccacctaccagaggtccatgagctttgaccccaacctgctgcacaacaacggccacaacggctaccccaacggcaccagcgctgccctgcgggagactggagtcatcgagaagctgctgaccagctatggcttcatccagtgcagcgagcggcaggcccggctcttcttccactgcagccagtacaatggaaacctgcaggacctgaaggtgggagatgatgtggagtttgaggtgtccagtgacagaagaacaggcaagcccatcgctgtgaagctggtgaagatcaagcaggagatcctgcctgaggagaggatgaatggccaggtggtgtgtgctgtgccccacaacctggagagcaagagccctgctgcccctggccagagccccactggatctgtgtgctatgaaagaaatggagaggtgttctacctgacctacaccccagaagatgtggagggcaatgtgcagctggagaccggggacaagatcaacttcgtcatcgacaacaacaagcacactggagctgtgtctgccaggaacatcatgctgctgaagaagaagcaggcccgctgccagggcgtggtgtgtgccatgaaggaggccttcggcttcatcgagagaggagatgtggtgaaggagatcttcttccactacagcgagttcaagggggacctggagaccctgcagcctggagatgatgtggagttcaccatcaaggacagaaatggcaaggaggtggccacagatgtgcggctgctgccccagggcaccgtcatctttgaggacatcagcattgagcactttgagggcaccgtgaccaaggtgatccccaaggtgcccagcaagaaccagaatgaccccctgcccggccgcatcaaggtggactttgtgatccccaaggagctgccctttggagacaaggacaccaagagcaaggtgaccctgctggagggggaccacgtgcgcttcaacatcagcacagaccggcgggacaagctggagcgggccaccaacatcgaggtgctgagcaacaccttccagttcaccaatgaggcccgggagatgggcgtgattgctgccatgagagatggcttcggcttcatcaagtgtgtggacagagatgtgaggatgttcttccacttcagcgagatcctggatggcaaccagctgcacatcgcagatgaggtggagttcaccgtggtgcctgacatgctgagcgcccagaggaaccacgccatccgcatcaagaagctgcccaagggcaccgtgtccttccacagccacagcgaccaccgcttcctgggcaccgtggagaaggaggccaccttcagcaaccccaagaccaccagccccaacaagggcaaggagaaggaggctgaagatggcatcatcgcctatgatgactgtggggtgaagctgaccatcgccttccaggccaaggatgtggagggcagcaccagcccccagattggagacaaggtggagttcagcatcagtgacaagcagaggcctggccagcaggtggccacctgtgtgcggctgctgggcaggaacagcaacagcaagaggctgctgggctacgtggccaccctgaaggacaactttggcttcattgaaacagccaaccacgacaaggagatcttcttccactacagcgagttctctggagatgtggacagcctggagctgggggacatggtggagtacagcctgagcaagggcaagggcaacaaggtgtctgctgagaaggtgaacaagacccacagcgtgaatggcatcacagaggaggccgaccccaccatctacagcggcaaggtgatccggcccctgcggtctgtggaccccacccagacagagtaccagggcatgattgaaattgtggaggagggggacatgaagggggaggtgtaccccttcggcatcgtgggcatggccaacaagggggactgcctgcagaagggggagagcgtgaagttccagctgtgtgtgctgggccagaatgcccagaccatggcctacaacatcacccccctgcggcgggccaccgtggagtgtgtgaaggaccagtttggcttcatcaactatgaggtgggggacagcaagaagctgttcttccacgtgaaggaggtgcaggacggcatcgagctgcaggccggagatgaggtggagttcagcgtcatcctgaaccagaggactggaaaatgttctgcctgcaatgtgtggagggtgtgtgagggccccaaggctgtggccgcccccaggccagaccggctggtgaaccggctgaagaacatcaccctggatgatgccagcgccccccggctgatggtgctgcggcagccccggggccctgacaacagcatgggctttggagctgagaggaagatccggcaggccggcgtgattgattag

SEQ ID NO: 148056 - DNA, 141 bp, synthetic construct
  misc_feature 1..141: note = Description of Artificial Sequence: Synthetic coding sequence
  source 1..141: mol_type = other DNA
atgagctttgaccccaacctgctgcacaacaacggccacaacggctaccccaacggcaccagcgctgccctgcgggagactggagtcatcgagaagctgctgaccagctatggcttcatccagtgcagcgagcggcagtag

SEQ ID NO: 148057 - DNA, 24 bp, synthetic construct
  misc_feature 1..24: note = Description of Artificial Sequence: Synthetic coding sequence
  source 1..24: mol_type = other DNA
atgagctttgaccccaacctgtag

SEQ ID NO: 148058 - DNA, 2007 bp, synthetic construct
  misc_feature 1..2007: note = Description of Artificial Sequence: Synthetic coding sequence
  source 1..2007: mol_type = other DNA
atgaatggccaggaggtgttctacctgacctacaccccagaagatgtggagggcaatgtgcagctggagaccggggacaagatcaacttcgtcatcgacaacaacaagcacactggagctgtgtctgccaggaacatcatgctgctgaagaagaagcaggcccgctgccagggcgtggtgtgtgccatgaaggaggccttcggcttcatcgagagaggagatgtggtgaaggagatcttcttccactacagcgagttcaagggggacctggagaccctgcagcctggagatgatgtggagttcaccatcaaggacagaaatggcaaggaggtggccacagatgtgcggctgctgccccagggcaccgtcatctttgaggacatcagcattgagcactttgagggcaccgtgaccaaggtgatccccaaggtgcccagcaagaaccagaatgaccccctgcccggccgcatcaaggtggactttgtgatccccaaggagctgccctttggagacaaggacaccaagagcaaggtgaccctgctggagggggaccacgtgcgcttcaacatcagcacagaccggcgggacaagctggagcgggccaccaacatcgaggtgctgagcaacaccttccagttcaccaatgaggcccgggagatgggcgtgattgctgccatgagagatggcttcggcttcatcaagtgtgtggacagagatgtgaggatgttcttccacttcagcgagatcctggatggcaaccagctgcacatcgcagatgaggtggagttcaccgtggtgcctgacatgctgagcgcccagaggaaccacgccatccgcatcaagaagctgcccaagggcaccgtgtccttccacagccacagcgaccaccgcttcctgggcaccgtggagaaggaggccaccttcagcaaccccaagaccaccagccccaacaagggcaaggagaaggaggctgaagatggcatcatcgcctatgatgactgtggggtgaagctgaccatcgccttccaggccaaggatgtggagggcagcaccagcccccagattggagacaaggtggagttcagcatcagtgacaagcagaggcctggccagcaggtggccacctgtgtgcggctgctgggcaggaacagcaacagcaagaggctgctgggctacgtggccaccctgaaggacaactttggcttcattgaaacagccaaccacgacaaggagatcttcttccactacagcgagttctctggagatgtggacagcctggagctgggggacatggtggagtacagcctgagcaagggcaagggcaacaaggtgtctgctgagaaggtgaacaagacccacagcgtgaatggcatcacagaggaggccgaccccaccatctacagcggcaaggtgatccggcccctgcggtctgtggaccccacccagacagagtaccagggcatgattgaaattgtggaggagggggacatgaagggggaggtgtaccccttcggcatcgtgggcatggccaacaagggggactgcctgcagaagggggagagcgtgaagttccagctgtgtgtgctgggccagaatgcccagaccatggcctacaacatcacccccctgcggcgggccaccgtggagtgtgtgaaggaccagtttggcttcatcaactatgaggtgggggacagcaagaagctgttcttccacgtgaaggaggtgcaggacggcatcgagctgcaggccggagatgaggtggagttcagcgtcatcctgaaccagaggactggaaaatgttctgcctgcaatgtgtggagggtgtgtgagggccccaaggctgtggccgcccccaggccagaccggctggtgaaccggctgaagaacatcaccctggatgatgccagcgccccccggctgatggtgctgcggcagccccggggccctgacaacagcatgggctttggagctgagaggaagatccggcaggccggcgtgattgattag

SEQ ID NO: 148059 - DNA, 288 bp, synthetic construct
  misc_feature 1..288: note = Description of Artificial Sequence: Synthetic coding sequence
  source 1..288: mol_type = other DNA
atgagctttgaccccaacctgctgcacaacaacggccacaacggctaccccaacggcaccagcgctgccctgcgggagactggagtcatcgagaagctgctgaccagctatggcttcatccagtgcagcgagcggcaggcccggctcttcttccactgcagccagtacaatggaaacctgcaggacctgaaggtgggagatgatgtggagtttgaggtgtccagtgacagaagaacaggcaagcccatcgctgtgaagctggtgaagatcaagcaggagatcctgtag

SEQ ID NO: 148060 - DNA, 2397 bp, synthetic construct; identical to SEQ ID NO: 148053
  misc_feature 1..2397: note = Description of Artificial Sequence: Synthetic coding sequence
  source 1..2397: mol_type = other DNA

SEQ ID NO: 148061 - DNA, 1329 bp, synthetic construct
  misc_feature 1..1329: note = Description of Artificial Sequence: Synthetic coding sequence
  source 1..1329: mol_type = other DNA
atggaggccagccgctgccgcctgagccccagcggggacagcgtcttccacgaggagatgatgaagatgaggcaggccaagctggactaccagaggctgctgctggagaagaggcagaggaagaagaggctggagcccttcatggtgcagcccaaccctgaggcccggctgcggcgggccaagccccgggccagtgatgagcagacccccctggtgaactgccacaccccccacagcaatgtcatcctgcacggcattgatggccctgctgctgtgctgaagccagatgaggtgcacgcccccagcgtgagcagctctgtggtggaggaggatgctgaaaatacagtggacacagccagcaagccaggcctgcaggagcggctgcagaagcatgacatcagcgagagcgtgaactttgatgaggagacagatggcatcagccagagcgcctgcctggagcggcccaacagcgccagcagccagaacagcacagacaccggcaccagcggcagcgccacagctgcccagcctgctgacaacctgctgggggacattgatgacctggaggactttgtgtacagccctgccccccagggcgtgacagtgcgctgccgcatcatccgggacaagaggggcatggaccggggcctcttccccacctactacatgtacctggagaaggaggagaaccagaagatcttcctgctggccgccaggaagaggaagaagagcaagacagccaactacctgatcagcattgatcctgtggacctgagccgggagggggagagctatgtgggcaagctgcggagcaacctgatgggcaccaagttcaccgtgtatgaccggggcatctgccccatgaagggccggggcctggtgggcgccgcccacacccggcaggagctggccgccatctcctatgagaccaacgtgctgggcttcaagggccccaggaagatgtctgtcatcatccctggcatgaccctgaaccacaagcagatcccctaccagccccagaacaaccacgacagcctgctgagccgctggcagaacagaaccatggagaacctggtggagctgcacaacaaggcccctgtgtggaacagcgacacccagagctatgtgctgaacttccggggccgggtgacccaggcctctgtgaagaacttccagatcgtgcacaagaatgaccctgactacatcgtgatgcagtttggccgggtggctgatgatgtgttcaccctggactacaactaccccctgtgtgctgtgcaggccttcggcatcggcctgagcagctttgacagcaagctggcctgtgagtag

SEQ ID NO: 148062 - DNA, 912 bp, synthetic construct
  misc_feature 1..912: note = Description of Artificial Sequence: Synthetic coding sequence
  source 1..912: mol_type = other DNA
atgtctgaggccggggaggccaccaccaccaccaccaccaccctgccccaggcccccacagaggccgctgctgctgccccccaggaccctgcccccaagagccctgtgggcagcggggccccccaggccgccgccccagccccagctgcccacgtggccggcaaccctggaggagatgctgccccagctgccactggaacagctgctgctgccagcctggccacagctgctggctctgaagatgctgagaagaaggtgctggccaccaaggtgctgggcaccgtgaagtggttcaacgtgagaaatggctacggcttcatcaacagaaatgacaccaaggaggatgtgtttgtgcaccagacagccatcaagaagaacaaccccaggaagtacctgcggtctgtgggagatggagagaccgtggagtttgatgtggtggagggggagaagggagctgaggccgccaacgtgacaggcccagatggagtgcctgtggagggcagccgctatgctgctgacagaagacgctaccgccggggctactacggcagaagaagaggccccccaagaaatgctggggagattggagagatgaaggatggagtgcctgagggcgcccagctgcagggccctgtgcacaggaaccccacctaccggccccgctaccgcagccggggccccccccggcccaggcctgccccagctgtgggggaggccgaggacaaggagaaccagcaggccaccagcggccccaaccagcccagcgtgagaagaggctacagaagaccctacaactacagaagaagaccccggcccccaaatgcccccagccaggacggcaaggaggccaaggccggggaggcccccacagaaaatcctgccccacccacccagcagagcagcgctgagtag

SEQ ID NO: 148063 - DNA, 339 bp, synthetic construct
  misc_feature 1..339: note = Description of Artificial Sequence: Synthetic coding sequence
  source 1..339: mol_type = other DNA
atggagaagatcctgatcctgctgctggtggccctgtctgtggcctatgctgcccctggcccccggggcatcatcatcaacctggagaatggagagctgtgcatgaacagcgcccagtgcaagagcaactgctgccagcacagcagcgccctgggcctggcccgctgcacctccatggccagcgagaacagtgaatgttctgtgaagaccctgtatggcatctactacaagtgcccctgtgagcggggcctgacctgtgagggggacaagaccatcgtgggcagcatcaccaacaccaactttggcatctgccatgatgctggccgcagcaagcagtag

SEQ ID NO: 148064 - DNA, 216 bp, synthetic construct
  misc_feature 1..216: note = Description of Artificial Sequence: Synthetic coding sequence
  source 1..216: mol_type = other DNA
atggagaagatcctgatcctgctgctggtggccctgtctgtggcctatgctgcccctggcccccggggcatcatcatcaacctgaccctgtatggcatctactacaagtgcccctgtgagcggggcctgacctgtgagggggacaagaccatcgtgggcagcatcaccaacaccaactttggcatctgccatgatgctggccgcagcaagcagtag

SEQ ID NO: 148065 - DNA, 408 bp, synthetic construct
  misc_feature 1..408: note = Description of Artificial Sequence: Synthetic coding sequence
  source 1..408: mol_type = other DNA
atgcagctgacctgggccagcatcagcctggtgacccgctgctggccccagacccccaccttccaggacctgctggcctgcctgggcgcccgggccctgcccggccccccaggggcccctggaagagatggcagcaagggggagcggggggcccctggcccccggggcagccctggccccccaggcagctttgacttcctgctgctgatgctggccgacatcagaaatgacatcacagagctgcaggagaaggtgtttggccacaggacccacagcagcgctgaggagttccccctgccccaggagttccccagctacccagaggccatggacctgggcagcggagatgaccaccccaggagaacagagacccgggacctgcgggccccccgggacttctacccctag

SEQ ID NO: 148066 - DNA, 1221 bp, synthetic construct
  misc_feature 1..1221: note = Description of Artificial Sequence: Synthetic coding sequence
  source 1..1221: mol_type = other DNA
atggtgcccccaccacccagcagaggaggagctgcccggggccagctgggccgcagcctgggccccctgctgctgctgctggccctgggccacacctggacctaccgggaggagccagaagatggagaccgggagatctgcagcgagagcaagatcgccaccaccaagtacccctgcctgaagagcagtggagagctgaccacctgctacaggaagaagtgctgcaagggctacaagtttgtgctgggccagtgcatccctgaggactatgatgtgtgtgccgaggccccctgtgagcagcagtgcacagacaactttggccgggtgctgtgcacctgctacccaggctaccgctatgaccgggagcggcacaggaagcgggagaagccctactgcctggacattgatgaatgtgccagcagcaatggcaccctgtgtgcccacatctgcatcaacaccctgggcagctaccgctgtgagtgccgggagggctacatccgggaggatgatggcaagacctgcaccaggggggacaagtacccaaatgacaccggccacgagaagtctgagaacatggtgaaggccggcacctgctgtgccacctgcaaggagttctaccagatgaagcagacagtgctgcagctgaagcagaagatcgccctgctgcccaacaatgctgctgacctgggcaagtacatcaccggggacaaggtgctggccagcaacacctacctgcccggccccccaggcctgcccggcggccagggccccccaggcagccctggccccaagggcagccctggcttccctggcatgcctggccccccaggccagcccggcccccggggctccatgggccccatgggccccagcccagacctgagccacatcaagcagggcagaagaggccctgtgggccccccaggggcccctggaagagatggcagcaaaggagagcggggggcccctggcccccggggcagccctggccccccaggcagctttgacttcctgctgctgatgctggccgacatcagaaatgacatcacagagctgcaggagaaggtgtttggccacaggacccacagcagcgctgaggagttccccctgccccaggagttccccagctacccagaggccatggacctgggcagcggagatgaccaccccaggagaacagagacccgggacctgcgggccccccgggacttctacccctag

SEQ ID NO: 148067 - DNA, 699 bp, synthetic construct
  misc_feature 1..699: note = Description of Artificial Sequence: Synthetic coding sequence
  source 1..699: mol_type = other DNA
atgtggcccccaggccgcagcatcaccgtgaagctgcgggagaagacagtgtccaggaagctggagatgaatggccccagcgccttccagggcctcatctgtgggaagtacaacggcatgtgcctgcagggccctgctggggtgcccggcagagatggcagccctggggccaacggcatccctggcaccccaggcatccctggaagagatggcttcaagggggagaagggggagtgcctgcgggagagctttgaggagagctggacccccaactacaagcagtgctcctggagcagcctgaactacggcatcgacctgggcaagattgctgaatgtaccttcaccaagatgaggagcaacagcgccctgcgggtgctcttcagcggcagcctgcggctgaagtgcagaaatgcctgctgccagcgctggtacttcaccttcaacggggctgaatgttctggccccctgcccatcgaggccatcatctacctggaccagggcagccctgagatgaacagcaccatcaacatccacaggaccagctctgtggagggcctgtgtgagggcatcggggccggcctggtggatgtggccatctgggtgggcacctgcagcgactaccccaagggagatgccagcacaggctggaacagcgtgagccgcatcatcatcgaggagctgcccaactacctgttctag

SEQ ID NO: 148068 - DNA, 732 bp, synthetic construct
  misc_feature 1..732: note = Description of Artificial Sequence: Synthetic coding sequence
  source 1..732: mol_type = other DNA
atgaggccccagggccctgctgccagcccccagaggctgcggggcctgctgctgctgctgctgctgcagctgcctgcccccagcagcgccagcgagatccccaagggcaagcagaaggcccagctgcggcagcgggaggtggtggacctgtacaacggcatgtgcctgcagggccctgctggggtgcccggcagagatggcagccctggggccaacggcatccctggcaccccaggcatccctggaagagatggcttcaagggggagaagggggagtgcctgcgggagagctttgaggagagctggacccccaactacaagcagtgctcctggagcagcctgaactacggcatcgacctgggcaagattgctgaatgtaccttcaccaagatgaggagcaacagcgccctgcgggtgctcttcagcggcagcctgcggctgaagtgcagaaatgcctgctgccagcgctggtacttcaccttcaacggggctgaatgttctggccccctgcccatcgaggccatcatctacctggaccagggcagccctgagatgaacagcaccatcaacatccacaggaccagctctgtggagggcctgtgtgagggcatcggggccggcctggtggatgtggccatctgggtgggcacctgcagcgactaccccaagggagatgccagcacaggctggaacagcgtgagccgcatcatcatcgaggagctgcccaagtag

SEQ ID NO: 148069 - DNA, 690 bp, synthetic construct
  misc_feature 1..690: note = Description of Artificial Sequence: Synthetic coding sequence
  source 1..690: mol_type = other DNA
atgtggcccccaggccgcagcatcaccgtgaagctgcgggagaagacagtgtccaggaagctggagatgaatggccccagcgccttccagggcctcatctgtgggaagtacaacggcatgtgcctgcagggccctgctggggtgcccggcagagatggcagccctggggccaacggcatccctggcaccccaggcatccctggaagagatggcttcaagggggagaagggggagtgcctgcgggagagctttgaggagagctggacccccaactacaagcagtgctcctggagcagcctgaactacggcatcgacctgggcaagattgctgaatgtaccttcaccaagatgaggagcaacagcgccctgcgggtgctcttcagcggcagcctgcggctgaagtgcagaaatgcctgctgccagcgctggtacttcaccttcaacggggctgaatgttctggccccctgcccatcgaggccatcatctacctggaccagggcagccctgagatgaacagcaccatcaacatccacaggaccagctctgtggagggcctgtgtgagggcatcggggccggcctggtggatgtggccatctgggtgggcacctgcagcgactaccccaagggagatgccagcacaggctggaacagcgtgagccgcatcatcatcgaggagctgcccaagtag

SEQ ID NO: 148070 - DNA, 5037 bp, synthetic construct
  misc_feature 1..5037: note = Description of Artificial Sequence: Synthetic coding sequence
  source 1..5037: mol_type = other DNA
atgcaccctggcctgtggctgctgctggtgaccctgtgcctgacagaggagctggccgctgctggggagaagagctatggcaagccctgtggcggccaggactgcagcggcagctgccagtgcttccctgagaagggggcccggggccggcccggccccatcggcatccagggccccaccggcccccagggcttcaccggcagcacaggcctgagcggcctgaagggggagcggggcttccctggcctgctgggcccctacggccccaagggggacaagggccccatgggcgtgcccggcttcctgggcatcaatggcatccctggccaccctggccagcccggcccccggggccccccaggcctggatggctgcaatggcacccagggcgctgtgggcttccctggcccagatggctacccaggcctgctgggccccccaggcctgcccggccagaagggcagcaagggggaccctgtgctggcccctggcagcttcaagggcatgaagggggaccccggcctgcccggcctggatggcatcaccggcccccagggcgcccctggcttccctggagctgtgggccctgctggccccccaggcctgcagggccccccaggccccccaggccccctgggcccagatggcaacatgggcctgggcttccagggcgagaagggcgtgaagggagatgtgggcctgcccggccctgctggccccccacccagcactggagagctggagttcatgggcttccccaagggcaagaagggcagcaagggggagcccggccccaagggcttccctggcatcagcggccccccaggcttccctggcctgggcaccactggagagaagggggagaagggggagaagggcatccctggcctgcccggcccccggggccccatgggcagcgagggcgtgcagggccccccaggccagcagggcaagaagggcaccctgggcttccctggcctgaatggcttccagggcatcgagggccagaagggggacatcggcctgcccggcccagatgtgttcattgatattgatggagctgtgatcagcggcaaccctggggaccccggggtgcccggcctgcccggcctgaagggagatgagggcatccagggcctgcggggccccagcggcgtgcccggcctgcctgccctgtctggagtgcctggggccctgggcccccagggcttccctggcctgaagggggaccagggcaaccctggccgcaccaccatcggggccgccggcctgcccggcagagatggcctgcccggccccccaggccccccaggcccccccagccctgagtttgaaacagagaccctgcacaacaaggagagcggcttccctggcctgcggggggagcagggccccaagggcaacctgggcctgaagggcatcaagggggacagcggcttctgtgcctgtgatggcggcgtgcccaacacaggccccccaggagagcccggccccccaggcccctggggcctgattggcctgcccggcctgaagggggcccggggggaccggggcagcggcggggcccagggccctgctggggcccctggcctggtgggccccctgggccccagcggccccaagggcaagaagggggagcccatcctgagcaccatccagggcatgcctggggacagaggagacagcggcagccagggcttccggggcgtgattggagagcccgggaaggatggagtgcccggcctgcccggcctgcccggcctgcctggagatggcggccagggcttccctggagagaagggcctgcccggcctgcccggggagaagggccaccctggccccccaggcctgcctggaaatggcctgcccggcctgcccggcccccggggcctgcccggggacaagggcaaggatggcctgcccggccagcagggcctgcccggcagcaagggcatcaccctgccctgcatcatccctggcagctatggccccagcggcttccctggcaccccaggcttccctggccccaagggcagccggggcctgcccggcaccccaggccagcccggcagcagcggcagcaaaggagagcccggcagccctggcctggtgcacctgcctgagctgcccggcttccctggccccagaggagagaagggcctgcccggcttccctggcctgcccgggaaggatggcctgcccggcatgattggcagccctggcctgcccggcagcaagggggccactggagacatctttggagcagaaaatggagcccctggagagcagggcctgcagggcctgaccggccacaagggcttcctgggggacagcggcctgcccggcctgaagggcgtgcacggcaagccaggcctgctgggccccaagggggagcggggcagccctggcaccccaggccaggtgggccagcccggcaccccaggcagcagcggcccctacggcatcaagggcaagagcggcctgcccggggcccctggcttccctggcatcagcggccaccctgggaagaagggcacccggggcaagaagggccccccaggcagcatcgtgaagaagggcctgcccggcctgaagggcctgcccggcaaccctggcctggtgggcctgaagggcagccctggcagccctggggtggccggcctgcctgccctgagcggccccaagggggagaagggctctgtgggctttgtgggcttccctggcatccctggcctgcccggcatccctggcacccggggcctgaagggcatccctggcagcacaggcaagatgggccccagcggccgggccggcaccccaggagagaagggggaccggggcaaccctggccctgtgggcatccccagcccccggcggcccatgagcaacctgtggctgaagggggacaagggcagccagggcagcgctggcagcaatggcttccctggccccaggggggacaagggggaggccggccggcccggccccccaggcctgcccggggcccctggcctgcccggcatcatcaagggcgtgtctgggaagccaggccccccaggcttcatgggcatccggggcctgcccggcctgaagggcagcagcggcatcaccggcttccctggcatgcctggagagagcggcagccagggcatccggggcagccctggcctgcccggggccagcggcctgcccggcctgaagggggacaatggccagacagtggagatcagcggcagccctggccccaagggccagcccggggagagcggcttcaagggcaccaagggcagagatggcctgattggcaacatcggcttccctggcaacaagggggaggatggcaaggtgggcgtgtctggagatgtgggcctgcccggggcccctggcttccctggggtggccggcatgagaggagagcccggcctgcccggcagcagcggccaccagggcgccatcggccccctgggcagccctggcctgattggccccaagggcttccctggcttccctggcctgcacggcctgaatggcctgcccggcaccaagggcacccacggcaccccaggccccagcatcactggagtgcccggccctgctggcctgcccggccccaagggggagaagggctacccaggcattggaattggagcccctgggaagccaggcctgcggggccagaagggggaccggggcttccctggcctgcagggccctgctggcctgcccggggcccctggcatcagcctgcccagcctgattgctggccagcccggggaccccggccggcccggcctggatggagagcggggccggcccggccctgctggccccccaggccccccaggccccagcagcaaccagggcgacaccggggaccccggcttccctggcatccctggcttcagcggcctgcctggagagctgggcctgaagggcatgagaggagagcccggcttcatgggcaccccaggcaaggtgggccccccaggggaccccggcttccctggcatgaagggcaaggccggcccccggggcagcagcggcctgcagggcgaccccggccagacccccacagctgaggccgtgcaggtgcccccaggccccctgggcctgcccggcattgatggcatccctggcctgactggagaccccggggcccagggccctgtgggcctgcagggcagcaagggcctgcccggcatccctgggaaggatggccccagcggcctgcccggccccccaggggccctgggggaccccggcctgcccggcctgcagggccccccaggctttgaaggagcccctggccagcagggccccttcggcatgcctggcatgcctggccagagcatgagggtgggctacaccctggtgaagcacagccagagcgagcaggtgcccccctgccccatcggcatgagccagctgtgggtgggctacagcctgctgtttgtggagggccaggagaaggcccacaaccaggacctgggctttgctggcagctgcctgccccgcttcagcaccatgcccttcatctactgcaacatcaatgaggtgtgccactacgccaggagaaatgacaagagctactggctgagcaccacagcccccatccccatgatgcctgtgtcccagacccagatcccccagtacatcagccgctgcagcgtgtgtgaggcccccagccaggccatcgctgtgcacagccaggacatcaccatcccccagtgccccctgggctggaggagcctgtggattggctacagcttcctgatgcacacagctgctggagctgagggcggcggccagagcctggtgtccccaggcagctgcctggaggacttccgggccacccccttcatcgagtgcagcggggcccggggcacctgccactactttgccaacaagtacagcttctggctgaccaccgtggaggagcggcagcagtttggagagctgcctgtgtctgagaccctgaaggccggccagctgcacaccagggtgagccgctgccaggtgtgcatgaagagcctgtag

SEQ ID NO: 148071 - DNA, 3087 bp, synthetic construct
  misc_feature 1..3087: note = Description of Artificial Sequence: Synthetic coding sequence
  source 1..3087: mol_type = other DNA
atgagagctgcccgggccctgctgcccctgctgctgcaggcctgctggacagctgcccaggatgagcctgagacccccagggctgtggccttccaggactgccctgtggacctcttctttgtgctggacaccagcgagagcgtggccctgcggctgaagccctatggagccctggtggacaaggtgaagagcttcaccaagcgcttcatcgacaacctgcgggaccgctactaccgctgtgacaggaacctggtgtggaatgctggggccctgcactacagtgatgaggtggagatcatccagggcctgaccaggatgcctgggggcagagatgccctgaagagctctgtggatgctgtgaagtactttgggaagggcacctacacagactgtgccatcaagaagggcctggagcagctgctggtgggcggcagccacctgaaggagaacaagtacctgattgtggtgacagatggccaccccctggagggctacaaggagccctgtggcggcctggaggatgctgtgaatgaggccaagcacctgggcgtgaaggtgttttctgtggccatcaccccagaccacctggagccccggctgagcatcatcgccacagaccacacctacagaagaaacttcaccgctgctgactggggccagagcagagatgctgaggaggccatcagccagaccatcgacaccatcgtggacatgatcaagaacaacgtggagcaggtgtgctgcagctttgagtgccagcctgcccggggccccccaggcctgcggggggaccccggctttgaaggagagcggggcaagccaggcctgcctggagagaagggggaggccggggaccccggccggcctggggacctgggccctgtgggctaccagggcatgaagggggagaagggcagcagaggagagaagggcagccggggccccaagggctacaagggggagaagggcaagaggggcattgatggagtggatggagtgaagggggagatgggctacccaggcctgcccggctgcaagggcagccctggctttgatggcatccagggccccccaggccccaagggggaccccggggccttcggcctgaagggggagaagggggagcccggggctgatggagaggccggccggcccggcagcagcggccccagcggagatgagggccagcctggagagcccggccccccaggagagaagggggaggccggagatgagggcaaccctggcccagatggagcccctggagagcggggcggccctggagagcggggcccccggggcaccccaggcacccggggccccaggggggaccctggagaggccggcccccagggcgaccagggccgggagggccctgtgggcgtgcctggggaccccggggaggccggccccatcggccccaagggctacagaggagatgagggccccccaggcagcgagggcgcccggggggcccctggccctgctggccccccaggggaccccggcctgatgggagagcggggggaggatggccctgctggaaatggaacagagggcttccctggcttccctggctacccaggcaacagaggagcccctggcatcaatggcaccaagggctacccaggcctgaagggagatgaaggagaggccggggaccctggagatgacaacaatgacatcgccccccggggcgtgaagggggccaagggctaccggggccctgagggcccccagggccccccaggccaccagggccccccaggcccagatgaatgtgagatcctggacatcatcatgaagatgtgcagctgctgtgagtgcaagtgtggccccatcgacctgctgtttgtgctggacagcagcgagagcatcggcctgcagaactttgaaattgccaaggactttgtggtgaaggtgattgaccggctgagcagagatgagctggtgaagtttgagcccggccagagctatgctggggtggtgcagtacagccacagccagatgcaggagcacgtgtccctgcggagccccagcatcagaaatgtgcaggagctgaaggaggccatcaagagcctgcagtggatggccggcggcaccttcaccggggaggccctgcagtacacccgggaccagctgctgccccccagccccaacaacagaattgccctggtgatcacagatggccgcagtgacacccagagggacaccacccccctgaatgtgctgtgcagccctggcatccaggtggtgtctgtgggcatcaaggatgtgtttgacttcatccctggcagtgaccagctgaatgtcatcagctgccagggcctggcccccagccagggccggcccggcctgagcctggtgaaggaaaattatgcagagctgctggaggatgccttcctgaagaatgtgacagcccagatctgcatcgacaagaagtgcccagactacacctgccccatcaccttcagcagccctgctgacatcaccatcctgctggatggcagcgcctctgtgggcagccacaactttgacaccaccaagagatttgccaagaggctggccgagcgcttcctgacagctggccgcacagatcctgcccatgatgtgcgggtggccgtggtgcagtacagcggcaccggccagcagaggcctgagcgggccagcctgcagttcctgcagaactacacagccctggccagcgctgtggatgccatggacttcatcaatgatgccacagatgtgaatgatgccctgggctacgtgacccgcttctaccgggaggccagcagcggggccgccaagaagaggctgctgctcttcagtgatggcaacagccagggcgccaccccagctgccatcgagaaggctgtgcaggaggcccagagagctggcatcgagatctttgtggtggtggtgggccggcaggtgaatgagccccacatccgggtgctggtgacaggcaagacagcagaatatgatgtggcctacggggagagccacctgttccgggtgcccagctaccaggccctgctgcggggcgtcttccaccagacagtgtccaggaaggtggccctgggctag

SEQ ID NO: 148072 - DNA, 1770 bp, synthetic construct
  misc_feature 1..1770: note = Description of Artificial Sequence: Synthetic coding sequence
  source 1..1770: mol_type = other DNA
atgagagctgcccgggccctgctgcccctgctgctgcaggcctgctggacagctgcccaggatgagcctgagacccccagggctgtggccttccaggactgccctgtggacctcttctttgtgctggacaccagcgagagcgtggccctgcggctgaagccctatggagccctggtggacaaggtgaagagcttcaccaagcgcttcatcgacaacctgcgggaccgctactaccgctgtgacaggaacctggtgtggaatgctggggccctgcactacagtgatgaggtggagatcatccagggcctgaccaggatgcctgggggcagagatgccctgaagagctctgtggatgctgtgaagtactttgggaagggcacctacacagactgtgccatcaagaagggcctggagcagctgctggtgggcggcagccacctgaaggagaacaagtacctgattgtggtgacagatggccaccccctggagggctacaaggagccctgtggcggcctggaggatgctgtgaatgaggccaagcacctgggcgtgaaggtgttttctgtggccatcaccccagaccacctggagccccggctgagcatcatcgccacagaccacacctacagaagaaacttcaccgctgctgactggggccagagcagagatgctgaggaggccatcagccagaccatcgacaccatcgtggacatgatcaagaacaacgtggagcaggtgtgctgcagctttgagtgccagcctgcccggggccccccaggcctgcggggggaccccggctttgaaggagagcggggcaagccaggcctgcctggagagaagggggaggccggggaccccggccggcctggggacctgggccctgtgggctaccagggcatgaagggggagaagggcagcagaggagagaagggcagccggggccccaagggctacaagggggagaagggcaagaggggcattgatggagtggatggagtgaagggggagatgggctacccaggcctgcccggctgcaagggcagccctggctttgatggcatccagggccccccaggccccaagggggaccccggggccttcggcctgaagggggagaagggggagcccggggctgatggagaggccggccggcccggcagcagcggccccagcggagatgagggccagcctggagagcccggccccccaggagagaagggggaggccggagatgagggcaaccctggcccagatggagcccctggagagcggggcggccctggagagcggggcccccggggcaccccaggcacccggggccccaggggggaccctggagaggccggcccccagggcgaccagggccgggagggccctgtgggcgtgcctggggaccccggggaggccggccccatcggccccaagggctacagaggagatgagggccccccaggcagcgagggcgcccggggggcccctggccctgctggccccccaggggaccccggcctgatgggagagcggggggaggatggccctgctggaaatggaacagagggcttccctggcttccctggctacccaggcaacagaggagcccctggcatcaatggcaccaagggctacccaggcctgaagggagatgaaggagaggccggggaccctggagatgacaacaatgacatcgccccccggctgctgcgggtgctgctggtgacaggcctggacctgggccccacagccctggaggccgctgctgaccagcactag

SEQ ID NO: 148073 - DNA, 324 bp, synthetic construct
  misc_feature 1..324: note = Description of Artificial Sequence: Synthetic coding sequence
  source 1..324: mol_type = other DNA
atgagagctgcccgggccctgctgcccctgctgctgcaggcctgctggacagctgcccaggatgagcctgagacccccagggctgtggccttccaggactgccctgtggacctcttctttgtgctggacaccagcgagagcgtggccctgcggctgaagccctatggagccctggtggacaaggtgaagagcttcaccaagcgcttcatcgacaacctgcgggaccgctactaccgctgtgacaggaacctggtgtggaatgctggggccctgcactacagtgatgaggtggagatcatccagggcctgaccaggatgccctag

SEQ ID NO: 148074 - DNA, 3060 bp, synthetic construct
  misc_feature 1..3060: note = Description of Artificial Sequence: Synthetic coding sequence
  source 1..3060: mol_type = other DNA
atgctgcagggcacctgcagcgtgctgctgctgtggggcatcctgggcgccatccaggcccagcagcaggaggtgatcagcccagacaccacagaaagaaacaacaactgcccagagaagacagactgccccatccacgtgtactttgtgctggacaccagcgagagcgtgaccatgcagagccccacagacatcctgctcttccacatgaagcagtttgtgccccagttcatcagccagctgcagaatgagttctacctggaccaggtggccctgtcctggaggtatggaggcctgcacttcagtgaccaggtggaggtgttcagccccccaggcagtgaccgggccagcttcatcaagaacctgcagggcatcagcagcttcagaagaggcaccttcacagactgtgccctggccaacatgacagagcagatccggcaggacaggagcaaaggaacagtgcactttgctgtggtgatcacagatggccacgtgacaggcagcccctgtggcggcatcaagctgcaggccgagcgggcccgggaggagggcatccggctgtttgctgtggcccccaaccagaacctgaaggagcagggcctgcgggacatcgccagcacccctcatgagctgtacagaaatgactatgccaccatgctgcctgacagcacagaaattgaccaggacaccatcaaccgcatcatcaaggtgatgaagcatgaggcctatggagagtgctacaaggtgtcctgcctggagatccctggccccagcggccccaagggctaccggggccagaagggggccaagggcaacatgggagagcccggggagcccggccagaagggccggcagggcgaccccggcatcgagggccccatcggcttccctggccccaagggcgtgcccggcttcaagggggagaagggggagtttggagcagatggcaggaagggggcccctggcctggccggcaagaatggaacagatggccagaagggcaagctgggcagaattggccccccaggctgcaagggggaccccggcaacagaggaccagatggctacccaggagaggccggcagccctggagagcggggggaccagggcggcaagggggaccccggccggcccggccggcggggccccccaggagaaattggagccaagggcagcaagggctaccagggcaacagcggggcccctggcagccctggggtgaagggggccaagggcggccctggcccccggggccccaagggggagcctggaagaagaggagaccccggcaccaagggcagccctggcagtgatggccccaagggggagaagggggaccccggccctgagggcccccggggcctggccggggaggtgggcaacaagggggccaagggggaccggggcctgcccggcccccggggcccccagggcgccctgggggagcccgggaagcagggcagcagaggagaccctggagatgctggccccaggggggacagcggccagcccggccccaagggggaccccggccggcccggcttctcctacccaggccccaggggggcccctggagagaagggggagcccggcccccggggccctgagggcggccgcggggactttggcctgaagggggagcccggcaggaaaggagagaagggggagcctgctgaccccggccccccaggagagcccggcccccggggcccccggggcgtgcccggccctgagggggagcccggccccccaggggaccccggcctgacagaatgtgatgtgatgacctacgtgcgggagacctgtggctgctgtgactgtgagaagagatgtggggccctggatgtggtgtttgtgattgacagcagcgagagcatcggctacaccaacttcaccctggagaagaactttgtgatcaacgtggtgaaccggctgggcgccatcgccaaggaccccaagtctgagaccggcaccagggtgggcgtggtgcagtacagccatgagggcacctttgaggccatccagctggatgatgaaagaattgacagcctgagcagcttcaaggaggccgtgaagaacctggagtggattgctgggggcacctggaccccatctgccctgaagtttgcctatgacaggctcatcaaggagagccggcggcagaagaccagggtgtttgctgtggtgatcacagatggaagacatgaccccagagatgatgacctgaacctgcgggccctgtgtgacagagatgtgacagtgacagccatcggcattggagacatgttccacgagaagcatgaaagtgagaacctgtacagcatcgcctgtgacaagccccagcaggtgaggaacatgaccctcttcagtgacctggtggccgagaagttcattgatgacatggaggatgtgctgtgcccagacccccagatcgtgtgcccagacctgccctgccagacagagctgtctgtggcccagtgcacccagaggcctgtggacatcgtgttcctgctggatggcagcgagcggctgggggagcagaacttccacaaggccaggagatttgtggagcaggtggcccggcggctgaccctggccaggagagatgatgaccccctgaatgcccgggtggccctgctgcagtttggaggccctggagagcagcaggtggccttccccctgagccacaacctgacagccatccacgaggccctggagaccacccagtacctgaacagcttcagccacgtgggcgccggcgtggtgcacgccatcaatgccatcgtgcgcagcccccggggcggggccaggagacatgctgagctgagctttgtgttcctgacagatggagtgactggaaatgacagcctgcacgagagcgcccacagcatgaggaagcagaatgtggtgcccaccgtgctggccctgggcagtgatgtggacatggatgtgctgaccaccctgagcctgggggacagagctgctgtgttccacgagaaggactatgacagcctggcccagcccggcttctttgaccgcttcatccgctggatctgctag

SEQ ID NO: 148075 - DNA, 2487 bp, synthetic construct
  misc_feature 1..2487: note = Description of Artificial Sequence: Synthetic coding sequence
  source 1..2487: mol_type = other DNA
atgctgcagggcacctgcagcgtgctgctgctgtggggcatcctgggcgccatccaggcccagcagcaggaggtgatcagcccagacaccacagaaagaaacaacaactgcccagagaagacagactgccccatccacgtgtactttgtgctggacaccagcgagagcgtgaccatgcagagccccacagacatcctgctcttccacatgaagcagtttgtgccccagttcatcagccagctgcagaatgagttctacctggaccaggtggccctgtcctggaggtatggaggcctgcacttcagtgaccaggtggaggtgttcagccccccaggcagtgaccgggccagcttcatcaagaacctgcagggcatcagcagcttcagaagaggcaccttcacagactgtgccctggccaacatgacagagcagatccggcaggacaggagcaaaggaacagtgcactttgctgtggtgatcacagatggccacgtgacaggcagcccctgtggcggcatcaagctgcaggccgagcgggcccgggaggagggcatccggctgtttgctgtggcccccaaccagaacctgaaggagcagggcctgcgggacatcgccagcacccctcatgagctgtacagaaatgactatgccaccatgctgcctgacagcacagaaattgaccaggacaccatcaaccgcatcatcaaggtgatgaagcatgaggcctatggagagtgctacaaggtgtcctgcctggagatccctggccccagcggccccaagggctaccggggccagaagggggccaagggcaacatgggagagcccggggagcccggccagaagggccggcagggcgaccccggcatcgagggccccatcggcttccctggccccaagggcgtgcccggcttcaagggggagaagggggagtttggagcagatggcaggaagggggcccctggcctggccggcaagaatggaacagatggccagaagggcaagctgggcagaattggccccccaggctgcaagggggaccccggcaacagaggaccagatggctacccaggagaggccggcagccctggagagcggggggaccagggcggcaagggggaccccggccggcccggccggcggggccccccaggagaaattggagccaagggcagcaagggctaccagggcaacagcggggcccctggcagccctggggtgaagggggccaagggcggccctggcccccggggccccaagggggagcctggaagaagaggagaccccggcaccaagggcagccctggcagtgatggccccaagggggagaagggggaccccggccctgagggcccccggggcctggccggggaggtgggcaacaagggggccaagggggaccggggcctgcccggcccccggggcccccagggcgccctgggggagcccgggaagcagggcagcagaggagaccctggagatgctggccccaggggggacagcggccagcccggccccaagggggaccccggccggcccggcttctcctacccaggccccaggggggcccctggagagaagggggagcccggcccccggggccctgagggcggccgcggggactttggcctgaagggggagcccggcaggaaaggagagaagggggagcctgctgaccccggccccccaggagagcccggcccccggggcccccggggcgtgcccggccctgagggggagcccggccccccaggggaccccggcctgacagaatgtgatgtgatgacctacgtgcgggagacctgtggctgctgtgactgtgagaagagatgtggggccctggatgtggtgtttgtgattgacagcagcgagagcatcggctacaccaacttcaccctggagaagaactttgtgatcaacgtggtgaaccggctgggcgccatcgccaaggaccccaagtctgagaccggcaccagggtgggcgtggtgcagtacagccatgagggcacctttgaggccatccagctggatgatgaaagaattgacagcctgagcagcttcaaggaggccgtgaagaacctggagtggattgctgggggcacctggaccccatctgccctgaagtttgcctatgacaggctcatcaaggagagccggcggcagaagaccagggtgtttgctgtggtgatcacagatggaagacatgaccccagagatgatgacctgaacctgcgggccctgtgtgacagagatgtgacagtgacagccatcggcattggagacatgttccacgagaagcatgaaagtgagaacctgtacagcatcgcctgtgacaagccccagcaggtgaggaacatgaccctcttcagtgacctggtggccgagaagttcattgatgacatggaggatgtgctgtgcccagacccccagatcgtgtgcccagacctgccctgccagacaggcctggatggagctgtgctgtgctag

SEQ ID NO: 148076 - DNA, 2757 bp, synthetic construct
  misc_feature 1..2757: note = Description of Artificial Sequence: Synthetic coding sequence
  source 1..2757: mol_type = other DNA
atgctgcagggcacctgcagcgtgctgctgctgtggggcatcctgggcgccatccaggcccagcagcaggaggtgatcagcccagacaccacagaaagaaacaacaactgcccagagaagacagactgccccatccacgtgtactttgtgctggacaccagcgagagcgtgaccatgcagagccccacagacatcctgctcttccacatgaagcagtttgtgccccagttcatcagccagctgcagaatgagttctacctggaccaggtggccctgtcctggaggtatggaggcctgcacttcagtgaccaggtggaggtgttcagccccccaggcagtgaccgggccagcttcatcaagaacctgcagggcatcagcagcttcagaagaggcaccttcacagactgtgccctggccaacatgacagagcagatccggcaggacaggagcaaaggaacagtgcactttgctgtggtgatcacagatggccacgtgacaggcagcccctgtggcggcatcaagctgcaggccgagcgggcccgggaggagggcatccggctgtttgctgtggcccccaaccagaacctgaaggagcagggcctgcgggacatcgccagcacccctcatgagctgtacagaaatgactatgccaccatgctgcctgacagcacagaaattgaccaggacaccatcaaccgcatcatcaaggtgatgaagcatgaggcctatggagagtgctacaaggtgtcctgcctggagatccctggccccagcggccccaagggctaccggggccagaagggggccaagggcaacatgggagagcccggggagcccggccagaagggccggcagggcgaccccggcatcgagggccccatcggcttccctggccccaagggcgtgcccggcttcaagggggagaagggggagtttggagcagatggcaggaagggggcccctggcctggccggcaagaatggaacagatggccagaagggcaagctgggcagaattggccccccaggctgcaagggggaccccggcaacagaggaccagatggctacccaggagaggccggcagccctggagagcggggggaccagggcggcaagggggaccccggccggcccggccggcggggccccccaggagaaattggagccaagggcagcaagggctaccagggcaacagcggggcccctggcagccctggggtgaagggggccaagggcggccctggcccccggggccccaagggggagcctggaagaagaggagaccccggcaccaagggcagccctggcagtgatggccccaagggggagaagggggaccccggccctgagggcccccggggcctggccggggaggtgggcaacaagggggccaagggggaccggggcctgcccggcccccggggcccccagggcgccctgggggagcccgggaagcagggcagcagaggagaccctggagatgctggccccaggggggacagcggccagcccggccccaagggggaccccggccggcccggcttctcctacccaggccccaggggggcccctggagagaagggggagcccggcccccggggccctgagggcggccgcggggactttggcctgaagggggagcccggcaggaaaggagagaagggggagcctgctgaccccggccccccaggagagcccggcccccggggcccccggggcgtgcccggccctgagggggagcccggccccccaggggaccccggcctgacagaatgtgatgtgatgacctacgtgcgggagacctgtggctgctgtgactgtgagaagagatgtggggccctggatgtggtgtttgtgattgacagcagcgagagcatcggctacaccaacttcaccctggagaagaactttgtgatcaacgtggtgaaccggctgggcgccatcgccaaggaccccaagtctgagaccggcaccagggtgggcgtggtgcagtacagccatgagggcacctttgaggccatccagctggatgatgaaagaattgacagcctgagcagcttcaaggaggccgtgaagaacctggagtggattgctgggggcacctggaccccatctgccctgaagtttgcctatgacaggctcatcaaggagagccggcggcagaagaccagggtgtttgctgtggtgatcacagatggaagacatgaccccagagatgatgacctgaacctgcgggccctgtgtgacagagatgtgacagtgacagccatcggcattggagacatgttccacgagaagcatgaaagtgagaacctgtacagcatcgcctgtgacaagccccagcaggtgaggaacatgaccctcttcagtgacctggtggccgagaagttcattgatgacatggaggatgtgctgtgcccagacccccagatcgtgtgcccagacctgccctgccagacagatgccccctggccaggaggagagccccctgtgaccttcctgaggacagaggagggcccagatgccaccttccccaggaccatccccctcatccagcagctgctgaatgccacagagctgacccaggaccctgctgcctacagccagctggtggccgtgctggtgtacacagctgagcgggccaagtttgccactggagtggagcggcaggactggatggagctgttcatcgacaccttcaagctggtgcaccgggacatcgtgggggaccctgagacagccctggccctgtgctag

SEQ ID NO: 148077 - DNA, 2757 bp, synthetic construct; identical to SEQ ID NO: 148076
  misc_feature 1..2757: note = Description of Artificial Sequence: Synthetic coding sequence
  source 1..2757: mol_type = other DNA

SEQ ID NO: 148078 - DNA, 2487 bp, synthetic construct; identical to SEQ ID NO: 148075
  misc_feature 1..2487: note = Description of Artificial Sequence: Synthetic coding sequence
  source 1..2487: mol_type = other DNA

SEQ ID NO: 148079 - DNA, 543 bp, synthetic construct
  misc_feature 1..543: note = Description of Artificial Sequence: Synthetic coding sequence
  source 1..543: mol_type = other DNA
atgctgcagggcacctgcagcgtgctgctgctgtggggcatcctgggcgccatccaggcccagcagcaggaggtgatcagcccagacaccacagaaagaaacaacaactgcccagagaagacagactgccccatccacgtgtactttgtgctggacaccagcgagagcgtgaccatgcagagccccacagacatcctgctcttccacatgaagcagtttgtgccccagttcatcagccagctgcagaatgagttctacctggaccaggtggccctgtcctggaggtatggaggcctgcacttcagtgaccaggtggaggtgttcagccccccaggcagtgaccgggccagcttcatcaagaacctgcagggcatcagcagcttcagaagaggcaccttcacagactgtgccctggccaacatgacagagcagatccggcaggacaggagcaaaggaacagtgcactttgctgtggtgatcacagatggccacgtgacaggcagcccctgtggcggcatcaagctgcaggccgagcgggcctag

SEQ ID NO: 148080 - DNA, 2235 bp, synthetic construct
  misc_feature 1..2235: note = Description of Artificial Sequence: Synthetic coding sequence
  source 1..2235: mol_type = other DNA
atggctgtgctgcccggccccctgcagctgctgggcgtgctgctgaccatcagcctgagcagcatccgcctcatccaggccggggcctactacggcatcaagcccctgcccccccagatccccccccagatgccaccccagatcccccagtaccagcccctgggccagcaggtgccccacatgcccctggccaaggatggcctggccatgggcaaggagatgccccacctgcagtatggcaaggagtacccccacctgccccagtacatgaaggagatccagcctgcccccaggatgggcaaggaggccgtgcccaagaagggcaaggagatccccctggccagcctgcggggggagcagggccccagaggagagcccggcccccggggccccccaggccccccaggcctgcccggccacggcatccctggcatcaagggcaagccaggcccccagggctacccaggagtgggcaagccaggcatgcctggcatgcctgggaagccaggggccatgggcatgcctggggccaagggggagatcggccagaagggggagatcggccccatgggcatccctggcccccagggccccccaggcccccacggcctgcccggcatcggcaagccaggcggccctggcctgcccggccagcccggccccaagggggaccggggccccaagggcctgcccggcccccagggcctgcggggccccaagggggacaagggcttcggcatgcctggggcccctggggtgaagggccccccaggcatgcacggccccccaggccctgtgggcctgcccggggtgggcaagccaggagtgacaggcttccctggcccccagggccccctgggcaagccaggggcccctggagagcccggcccccagggccccatcggcgtgcctggggtgcagggccccccaggcatccctggcatcggcaagccaggccaggacggcatccctggccagcccggcttccctgggggcaaaggagagcagggcctgcccggcctgcccggccccccaggcctgcccggcatcggcaagccaggcttccctggccccaagggggaccggggcatgggcggcgtgcctggggccctgggccccagaggagagaagggccccatcggggcccctggcattggaggccccccaggagagcccggcctgcccggcatccctggccccatgggccccccaggggccatcggcttccctggccccaagggggagggcggcatcgtgggcccccagggccccccaggccccaagggggagcccggcctgcagggcttccctgggaagccaggcttcctgggggaggtgggccccccaggcatgaggggcctgcccggccccatcggccccaagggggaggccggccagaagggcgtgcccggcctgcccggggtgcccggcctgctgggccccaagggggagcccggcatccctggggaccagggcctgcagggccccccaggcatccctggcatcggcggccccagcggccccatcggccccccaggcatccctggccccaagggggagcccggcctgcccggccccccaggcttccctggcatcggcaagccaggagtggccggcctgcacggccccccaggcaagccaggggccctgggcccccagggccagcccggcctgcccggccccccaggccccccaggccccccaggccccccagctgtgatgccacccaccccaccaccccagggcgagtacctgcctgacatgggcctgggcattgatggagtgaagccccctcatgcctatggagccaagaagggcaagaatggaggccctgcctatgagatgcctgccttcaccgctgagctgacagcccccttcccccctgtgggcgcccctgtgaagttcaacaagctgctgtacaacggccggcagaactacaacccccagacaggcatcttcacctgtgaggtgcctggggtgtactactttgcctaccacgtgcactgcaagggcggcaatgtgtgggtggccctcttcaagaacaatgaacctgtgatgtacacctatgatgagtacaagaagggcttcctggaccaggccagcggcagcgctgtgctgctgctgcggcctggggacagagtcttcctgcagatgcccagcgagcaggccgccggcctgtatgccggccagtatgtgcacagcagcttcagcggctacctgctgtaccccatgtag

SEQ ID NO: 148081 - DNA, 2235 bp, synthetic construct; identical to SEQ ID NO: 148080
  misc_feature 1..2235: note = Description of Artificial Sequence: Synthetic coding sequence
  source 1..2235: mol_type = other DNA

SEQ ID NO: 148082 - DNA, 345 bp, synthetic construct
  misc_feature 1..345: note = Description of Artificial Sequence: Synthetic coding sequence
  source 1..345: mol_type = other DNA
atggctgtgctgcccggccccctgcagctgctgggcgtgctgctgaccatcagcctgagcagcatccgcctcatccaggccggggcctactacggcatcaagcccctgcccccccagatccccccccagatgccaccccagatcccccagtaccagcccctgggccagcaggtgccccacatgcccctggccaaggatggcctggccatgggcaaggagatgccccacctgcagtatggcaaggagtacccccacctgccccagtacatgaaggagatccagcctgcccccaggatgggcaaggaggccgtgcccaagaagggcaaggagatccccctggcctag

SEQ ID NO: 148083 - DNA, 2061 bp, synthetic construct
  misc_feature 1..2061: note = Description of Artificial Sequence: Synthetic coding sequence
  source 1..2061: mol_type = other DNA
atggtggccgagaggacccacaaggccgccgccaccggggcccggggccctggagagctgggcgcccctggcaccgtggccctggtggccgcccgggcagagcggggggcccggctgcccagccctggcagctgtggcctgctgaccctggccctgtgcagcctggccctgagcctgctggcccacttcagaacagctgagctgcaggcccgggtgctgcggctggaggccgagcggggggagcagcagatggagacagccatcctgggccgggtgaaccagctgctggatgagaagtggaagctgcacagcagaagaagaagagaggcccccaagaccagccctggctgcaactgccccccaggccccccaggccccaccggccggcccggcctgcccggggacaagggggccatcggcatgcctggccgggtgggcagccctggagatgctggcctgagcatcatcggcccccggggccccccaggccagcccggcacccggggcttccctggcttccctggccccatcggcctggatggcaagccaggccaccctggccccaagggggacatgggcctgactggacctcctggccagcccggcccccagggccagaagggggagaagggccagtgtggggagtacccccaccggctgctgcccctgctgaacagcgtgcggctggcccctcctcctgtgatcaagaggaggaccttccagggcgagcagagccaggccagcatccagggccccccaggccccccaggccccccaggccccagcggccccctgggccaccctggcctgcccggccccatgggccccccaggcctgcccggccccccaggccccaagggggaccccggcatccagggctaccacggcaggaagggggagcggggcatgcctggcatgcctgggaagcacggggccaagggggcccctggcattgctgtggccggcatgaagggggagcccggcatccctggcaccaagggggagaagggagctgagggcagccctggcctgcccggcctgctgggccagaagggggagaagggagatgctggcaacagcattggaggcggccgcggggagcccggccccccaggcctgcccggccccccaggccccaagggggaggccggcgtggatggccaggtgggccccccaggccagcccggggacaagggggagagaggagctgctggggagcagggcccagatggccccaagggcagcaagggggagcctggaaaaggagagatggtggactacaacggcaacatcaatgaggccctgcaggagatccgcaccctggccctgatgggccccccaggcctgcccggccagatcggccccccaggggcccctggcatccctggccagaagggggagatcggcctgcccggccccccaggccatgatggagagaagggcccccggggcaagccaggggacatgggccccccaggcccccagggccccccaggcaaggatggccccccaggagtgaagggagaaaatggccaccctggcagccctggagagaagggggagaagggggagaccggccaggccggcagccctggagagaagggggaggccggggagaagggcaaccctggagctgaggtgcccggcctgcccggccctgagggccccccaggccccccaggcctgcagggcgtgcccggccccaagggggaggccggcctggatggagccaagggggagaagggcttccagggcgagaagggggaccggggccccctgggcctgcccggcaccccaggccccatcggcgtgcccggccctgctggccccaagggggagcggggcagcaaaggagaccccggcatgacaggccccaccggggctgctggcctgcccggcctgcacggccccccaggggacaagggcaacagaggagagcggggcaagaagggcagccggggccccaagggggacaagggggaccagggcgcccctggcctggatgccccctgccccctgggagaagatggcctgcctgtgcagggctgctggaacaagtag

SEQ ID NO: 148084 - DNA, 1338 bp, synthetic construct
  misc_feature 1..1338: note = Description of Artificial Sequence: Synthetic coding sequence
  source 1..1338: mol_type = other DNA
atgacaggcagcagcttcagcctggcccacctgctgatcatcagcggcctgctgtgctacagcgctggctgcctggccctgcccagcctggaccagaagaagaggggcggccacaaggcctgctgcctgctgaccccacctcctcctcctctcttccccccacccttcttccggggcggccgcagccccctgctgagcccagacatgaagaacctgatgctggagctggagaccagccagagcccctgcatgcagggcagcctgggcagccctggccccccaggcccccagggccccccaggcctgcccgggaagacaggccccaagggggagaagggggagctgggccggcccggcaggaagggccggcccggccccccaggagtgcccggcatgcctggccccatcggctggccaggccctgagggccccagaggagagaagggggacctgggcatgatgggcctgcccggcagccggggccccatgggcagcaagggctacccaggcagcagaggagagaagggcagcagaggagagaagggggacctgggccccaagggggagaagggcttccctggcttccctggcatgctgggccagaagggggagatgggccccaagggggagcccggcattgctggccaccggggccccaccggccggcctgggaagaggggcaagcagggccagaagggggacagcggcgtgatgggccccccaggcaagccaggccccagcggccagcccggccggcccggccccccaggccccccacctgctggccagctgatcatgggccccaagggggagcggggcttccctggccccccaggccgctgcctgtgtggccccaccatgaatgtgaacaaccccagctatggagagagcgtgtatggccccagcagcccccgggtgcctgtgatctttgtggtgaacaaccaggaggagctggagcggctgaacacccagaatgccatcgccttccggcgggaccagaggagcctgtacttcaaggacagcctgggctggctgcccatccagctgacccccttctaccctgtggactacacagctgaccagcacggcacctgtggagatggcctgctgcagcccggggaggagtgtgatgatggcaacagtgatgtgggagatgactgcatccgctgccaccgggcctactgtggagatggccacagacatgaaggagtggaggactgtgatggcagtgactttggctacctgacctgtgagacctacctgcccggcagctatggagacctgcagtgcacccagtactgctacatcgacagcaccccctgccgctacttcacctag

SEQ ID NO: 148085 - DNA, 876 bp, synthetic construct
  misc_feature 1..876: note = Description of Artificial Sequence: Synthetic coding sequence
  source 1..876: mol_type = other DNA
atggtggtgctgaaccccatgaccctgggcatctacctgcagctgttcttcctgagcatcgtgtcccagcccaccttcatcaacagcgtgctgcccatctctgctgccctgcccagcctggaccagaagaagaggggcggccacaaggcctgctgcctgctgaccccacctcctcctcctctcttccccccacccttcttccggggcggccgcagccccctgctgagcccagacatgaagaacctgatgctggagctggagaccagccagagcccctgcatgcagggcagcctgggcagccctggccccccaggcccccagggccccccaggcctgcccgggaagacaggccccaagggggagaagggggagctgggccggcccggcaggaagggccggcccggccccccaggagtgcccggcatgcctggccccatcggctggccaggccctgagggccccagaggagagaagggggacctgggcatgatgggcctgcccggcagccggggccccatgggcagcaagggctacccaggcagcagaggagagaagggcagcagaggagagaagggggacctgggccccaagggggagaagggcttccctggcttccctggcatgctgggccagaagggggagatgggccccaagggggagcccggcattgctggccaccggggccccaccggccggcctgggaagaggggcaagcagagcagcaggaccccctgcaccctgcccaggaggcctcctgtgccctgtggccagggcagccgcagccctgtgacagtggtggccggcaaggagagccaggcctgcctgctgcccaggtttgaggaggactacatcagcagcggcacagagcggggctag

SEQ ID NO: 148086 - DNA, 1266 bp, synthetic construct
  misc_feature 1..1266: note = Description of Artificial Sequence: Synthetic coding sequence
  source 1..1266: mol_type = other DNA
atggtggtgctgaaccccatgaccctgggcatctacctgcagctgttcttcctgagcatcgtgtcccagcccaccttcatcaacagcgtgctgcccatctctgctgccctgcccagcctggaccagaagaagaggggcggccacaaggcctgctgcctgctgaccccacctcctcctcctctcttccccccacccttcttccggggcggccgcagccctggccccccaggcctgcccgggaagacaggccccaagggggagaagggggagctgggccggcccggcaggaagggccggcccggccccccaggagtgcccggcatgcctggccccatcggctggccaggccctgagggccccagaggagagaagggggacctgggcatgatgggcctgcccggcagccggggccccatgggcagcaagggctacccaggcagcagaggagagaagggcagcagaggagagaagggggacctgggccccaagggggagaagggcttccctggcttccctggcatgctgggccagaagggggagatgggccccaagggggagcccggcattgctggccaccggggccccaccggccggcctgggaagaggggcaagcagggccagaagggggacagcggcgtgatgggccccccaggcaagccaggccccagcggccagcccggccggcccggccccccaggccccccacctgctggccagctgatcatgggccccaagggggagcggggcttccctggccccccaggccgctgcctgtgtggccccaccatgaatgtgaacaaccccagctatggagagagcgtgtatggccccagcagcccccgggtgcctgtgatctttgtggtgaacaaccaggaggagctggagcggctgaacacccagaatgccatcgccttccggcgggaccagaggagcctgtacttcaaggacagcctgggctggctgcccatccagctgacccccttctaccctgtggactacacagctgaccagcacggcacctgtggagatggcctgctgcagcccggggaggagtgtgatgatggcaacagtgatgtgggagatgactgcatccgctgccaccgggcctactgtggagatggccacagacatgaaggagtggaggactgtgatggcagtgactttggctacctgacctgtgagacctacctgcccggcagctatggagacctgcagtgcacccagtactgctacatcgacagcaccccctgccgctacttcacctag

SEQ ID NO: 148087 - DNA, 1341 bp, synthetic construct
  misc_feature 1..1341: note = Description of Artificial Sequence: Synthetic coding sequence
  source 1..1341: mol_type = other DNA
atggtggtgctgaaccccatgaccctgggcatctacctgcagctgttcttcctgagcatcgtgtcccagcccaccttcatcaacagcgtgctgcccatctctgctgccctgcccagcctggaccagaagaagaggggcggccacaaggcctgctgcctgctgaccccacctcctcctcctctcttccccccacccttcttccggggcggccgcagccccctgctgagcccagacatgaagaacctgatgctggagctggagaccagccagagcccctgcatgcagggcagcctgggcagccctggccccccaggcccccagggccccccaggcctgcccgggaagacaggccccaagggggagaagggccggcccggccccccaggagtgcccggcatgcctggccccatcggctggccaggccctgagggccccagaggagagaagggggacctgggcatgatgggcctgcccggcagccggggccccatgggcagcaagggctacccaggcagcagaggagagaagggcagcagaggagagaagggggacctgggccccaagggggagaagggcttccctggcttccctggcatgctgggccagaagggggagatgggccccaagggggagcccggcattgctggccaccggggccccaccggccggcctgggaagaggggcaagcagggccagaagggggacagcggcgtgatgggccccccaggcaagccaggccccagcggccagcccggccggcccggccccccaggccccccacctgctggccagctgatcatgggccccaagggggagcggggcttccctggccccccaggccgctgcctgtgtggccccaccatgaatgtgaacaaccccagctatggagagagcgtgtatggccccagcagcccccgggtgcctgtgatctttgtggtgaacaaccaggaggagctggagcggctgaacacccagaatgccatcgccttcagaagagaccagaggagcctgtacttcaaggacagcctgggctggctgcccatccagctgacccccttctaccctgtggactacacagctgaccagcacggcacctgtggagatggcctgctgcagcctggagaggagtgtgatgatggcaacagtgatgtgggagatgactgcatccgctgccaccgggcctactgtggagatggccacagacatgagggcgtggaggactgtgatggcagtgactttggctacctgacctgtgagacctacctgcccggcagctatggagacctgcagtgcacccagtactgctacatcgacagcaccccctgccgctacttcacctag

SEQ ID NO: 148088 - DNA, 1368 bp, synthetic construct
  misc_feature 1..1368: note = Description of Artificial Sequence: Synthetic coding sequence
  source 1..1368: mol_type = other DNA
atggtggtgctgaaccccatgaccctgggcatctacctgcagctgttcttcctgagcatcgtgtcccagcccaccttcatcaacagcgtgctgcccatctctgctgccctgcccagcctggaccagaagaagaggggcggccacaaggcctgctgcctgctgaccccacctcctcctcctctcttccccccacccttcttccggggcggccgcagccccctgctgagcccagacatgaagaacctgatgctggagctggagaccagccagagcccctgcatgcagggcagcctgggcagccctggccccccaggcccccagggccccccaggcctgcccgggaagacaggccccaagggggagaagggggagctgggccggcccggcaggaagggccggcccggccccccaggagtgcccggcatgcctggccccatcggctggccaggccctgagggccccagaggagagaagggggacctgggcatgatgggcctgcccggcagccggggccccatgggcagcaagggctacccaggcagcagaggagagaagggcagcagaggagagaagggggacctgggccccaagggggagaagggcttccctggcttccctggcatgctgggccagaagggggagatgggccccaagggggagcccggcattgctggccaccggggccccaccggccggcctgggaagaggggcaagcagggccagaagggggacagcggcgtgatgggccccccaggcaagccaggccccagcggccagcccggccggcccggccccccaggccccccacctgctggccagctgatcatgggccccaagggggagcggggcttccctggccccccaggccgctgcctgtgtggccccaccatgaatgtgaacaaccccagctatggagagagcgtgtatggccccagcagcccccgggtgcctgtgatctttgtggtgaacaaccaggaggagctggagcggctgaacacccagaatgccatcgccttccggcgggaccagaggagcctgtacttcaaggacagcctgggctggctgcccatccagctgacccccttctaccctgtggactacacagctgaccagcacggcacctgtggagatggcctgctgcagcccggggaggagtgtgatgatggcaacagtgatgtgggagatgactgcatccgctgccaccgggcctactgtggagatggccacagacatgaaggagtggaggactgtgatggcagtgactttggctacctgacctgtgagacctacctgcccggcagctatggagacctgcagtgcacccagtactgctacatcgacagcaccccctgccgctacttcacctag

SEQ ID NO: 148089 - DNA, 1338 bp, synthetic construct; identical to SEQ ID NO: 148084
  misc_feature 1..1338: note = Description of Artificial Sequence: Synthetic coding sequence
  source 1..1338: mol_type = other DNA

SEQ ID NO: 148090 - DNA, 585 bp, synthetic construct
  misc_feature 1..585: note = Description of Artificial Sequence: Synthetic coding sequence
  source 1..585: mol_type = other DNA
atcagcggcctgctgtgctacagcgctggctgcctggccctgcccagcctggaccagaagaagagaggaggccacaaggcctgctgcctgctgaccccacctcctccacccctcttccccccacccttcttccggggcggccgcagccctggccccccaggcctgcccgggaagacaggccccaagggggagaagggggagctgggccggcccggcaggaagggccggcccggccccccaggagtgcccggcatgcctggccccatcggctggccaggccctgagggccccagaggagagaagggggacctgggcatgatgggcctgcccggcagccggggccccatgggcagcaagggctacccaggcagcagaggagagaagggcagcagaggagagaagggggacctgggccccaagggggagaagggcttccctggcttccctggcatgctgggccagaagggggagatgggccccaagggggagcccggcattgctggccaccggggccccaccggccggcctgggaagaggggcaagcagggccagaagggggacagcggcgtgatgggccccccatag

SEQ ID NO: 148091 - DNA, 1338 bp, synthetic construct
  misc_feature 1..1338: note = Description of Artificial Sequence: Synthetic coding sequence
  source 1..1338: mol_type = other DNA
atgacaggcagcagcttcagcctggcccacctgctgatcatcagcggcctgctgtgctacagcgctggctgcctggccctgcccagcctggaccagaagaagaggggcggccacaaggcctgctgcctgctgaccccacctcctcctcctctcttccccccacccttcttccggggcggccgcagccccctgctgagcccagacatgaagaacctgatgctggagctggagaccagccagagcccctgcatgcagggcagcctgggcagccctggccccccaggcccccagggccccccaggcctgcccgggaagacaggccccaagggggagaagggggagctgggccggcccggcaggaagggccggcccggccccccaggagtgcccggcatgcctggccccatcggctggccaggccctgagggccccagaggagagaagggggacctgggcatgatgggcctgcccggcagccggggccccatgggcagcaagggctacccaggcagcagaggagagaagggcagcagaggagagaagggggacctgggccccaagggggagaagtgcaaccccctgctgctgctcttccccagcttccagggcgagatgggccccaagggggagcccggcattgctggccaccggggccccaccggccggcctgggaagaggggcaagcagggccagaagggggacagcggcgtgatgggccccccaggcaagccaggccccagcggccagcccggccggcccggccccccaggccccccacctgctggccagctgatcatgggccccaagggggagcggggcttccctggccccccaggccgctgcctgtgtggccccaccatgaatgtgaacaaccccagctatggagagagcgtgtatggccccagcagcccccgggtgcctgtgatctttgtggtgaacaaccaggaggagctggagcggctgaacacccagaatgccatcgccttccggcgggaccagaggagcctgtacttcaaggacagcctgggctggctgcccatccagctgacccccttctaccctgtggactacacagctgaccagcacggcacctgtggagatggcctgctgcagcccggggaggagtgtgatgatggcaacagtgatgtgggagatgactgcatccgctgccaccgggcctactgtggagatggccacagacatgaaggagtggaggactgtgatggcagtgactttggctacctgacctgtgagacctacctgcccggcagctatggagacctgcagtgcacccagtactgctacatcgacagcaccccctgccgctacttcacctag

SEQ ID NO: 148092 - DNA, 2061 bp, synthetic construct
  misc_feature 1..2061: note = Description of Artificial Sequence: Synthetic coding sequence
  source 1..2061: mol_type = other DNA
atggctgacagaagaagagcctggaacacagaagatgacctgcctgtgtacctggcccggcccggcagcgctgcccagaccccccggcagaagtatggaggcatgtttgctgctgtggagggcgcctatgagaacaagaccatcgactttgatgcctacagcgtgggcagaagaggcagcgcccggacccccaggtctgctggccgcccagatgctgtgggcctgcccggccctgggggcagcgaggacacagccagtgatgtgtctgagcccagcggcagcgctgtgagcagccctggagagagagatgagcggccccccaccctgcgcatccggcggcctgccccccgggacctgcccctgggccgggacaatggccagagcgaccggctgctgatcaagggcggccgcatcatcaatgatgaccagagcctgtatgcagatgtgtacctggaggatggcctcatcaagcagattggagaaaatctcatcgtgcctgggggcgtgaagaccatcgaggccaatggaaggatggtgattcctgggggcattgatgtgaacacctacctgcagaagcccagccagggcatgacagctgctgatgacttcttccagggcaccagggctgccctggtgggcggcaccaccatgatcatcgaccacgtggtgcctgagcccggcagcagcctgctgaccagctttgagaagtggcatgaggccgctgacaccaagagctgctgtgactacagcctgcacgtggacatcacctcctggtatgatggagtgcgggaggagctggaggtgctggtgcaggacaagggcgtgaacagcttccaggtgtacatggcctacaaggatgtgtaccagatgtctgacagccagctgtatgaggccttcaccttcctgaagggcctgggcgctgtgatcctggtgcatgctgaaaatggagacctgattgcccaggagcagaagaggatcctggagatgggcatcaccggccctgagggccacgccctgagcaggcctgaggagctggaggccgaggccgtgttccgggccatcaccatcgccggccgcatcaactgccctgtgtacatcaccaaggtgatgagcaagtctgctgctgacatcatcgccctggccaggaagaagggccccctggtgtttggagagcccatcgccgccagcctgggcacagatggcacccactactggagcaagaactgggccaaggctgctgcctttgtgaccagcccccccctgagcccagaccccaccaccccagactacctgaccagcctgctggcctgtggggacctgcaggtgactggaagtggccactgcccctacagcacagcccagaaggctgtgggcaaggacaacttcaccctcatccctgagggcgtgaatggcatcgaggagaggatgacagtggtgtgggacaaggctgtggccaccgggaagatggatgagaaccagtttgtggccgtgaccagcaccaatgctgccaagatcttcaacctgtaccccaggaagggcagaattgctgtgggcagtgatgctgatgtggtgatctgggaccctgacaagctgaagaccatcacagccaagagccacaagtctgctgtggagtacaacatctttgagggcatggagtgccacggcagccccctggtggtgatcagccagggcaagatcgtgtttgaagatggcaacatcaacgtgaacaagggcatgggccgcttcatccccaggaaggccttccctgagcacctgtaccagagggtgaagatccggaacaaggtgtttggcctgcagggcgtgtcccggggcatgtatgatggccctgtgtatgaggtgcctgccacccccaagtatgccaccccagcccccagcgccaagagcagccccagcaagcaccagcccccacccatccggaacctgcaccagagcaacttcagcctgagcggggcccagattgatgacaacaaccccaggagaacaggccaccgcatcgtggcccctcctgggggccgcagcaacatcaccagcctgggctag

SEQ ID NO: 148093 - DNA, 1719 bp, synthetic construct
  misc_feature 1..1719: note = Description of Artificial Sequence: Synthetic coding sequence
  source 1..1719: mol_type = other DNA
atgagctaccagggcaagaagagcatcccccacatcaccagtgaccggctgctgatcaagggcggccgcatcatcaatgatgaccagagcctgtatgcagatgtgtacctggaggatggcctcatcaagcagattggagaaaatctcatcgtgcctgggggcgtgaagaccatcgaggccaatggaaggatggtgattcctgggggcattgatgtgaacacctacctgcagaagcccagccagggcatgacagctgctgatgacttcttccagggcaccagggctgccctggtgggcggcaccaccatgatcatcgaccacgtggtgcctgagcccggcagcagcctgctgaccagctttgagaagtggcatgaggccgctgacaccaagagctgctgtgactacagcctgcacgtggacatcacctcctggtatgatggagtgcgggaggagctggaggtgctggtgcaggacaagggcgtgaacagcttccaggtgtacatggcctacaaggatgtgtaccagatgtctgacagccagctgtatgaggccttcaccttcctgaagggcctgggcgctgtgatcctggtgcatgctgaaaatggagacctgattgcccaggagcagaagaggatcctggagatgggcatcaccggccctgagggccacgccctgagcaggcctgaggagctggaggccgaggccgtgttccgggccatcaccatcgccggccgcatcaactgccctgtgtacatcaccaaggtgatgagcaagtctgctgctgacatcatcgccctggccaggaagaagggccccctggtgtttggagagcccatcgccgccagcctgggcacagatggcacccactactggagcaagaactgggccaaggctgctgcctttgtgaccagcccccccctgagcccagaccccaccaccccagactacctgaccagcctgctggcctgtggggacctgcaggtgactggaagtggccactgcccctacagcacagcccagaaggctgtgggcaaggacaacttcaccctcatccctgagggcgtgaatggcatcgaggagaggatgacagtggtgtgggacaaggctgtggccaccgggaagatggatgagaaccagtttgtggccgtgaccagcaccaatgctgccaagatcttcaacctgtaccccaggaagggcagaattgctgtgggcagtgatgctgatgtggtgatctgggaccctgacaagctgaagaccatcacagccaagagccacaagtctgctgtggagtacaacatctttgagggcatggagtgccacggcagccccctggtggtgatcagccagggcaagatcgtgtttgaagatggcaacatcaacgtgaacaagggcatgggccgcttcatccccaggaaggccttccctgagcacctgtaccagagggtgaagatccggaacaaggtgtttggcctgcagggcgtgtcccggggcatgtatgatggccctgtgtatgaggtgcctgccacccccaagtatgccaccccagcccccagcgccaagagcagccccagcaagcaccagcccccacccatccggaacctgcaccagagcaacttcagcctgagcggggcccagattgatgacaacaaccccaggagaacaggccaccgcatcgtggcccctcctgggggccgcagcaacatcaccagcctgggctag

SEQ ID NO: 148094 - DNA, 1713 bp, synthetic construct
  misc_feature 1..1713: note = Description of Artificial Sequence: Synthetic coding sequence
  source 1..1713: mol_type = other DNA
atgcagaagatgaacaatgaggtggtggacaagagtgaccggctgctgatcaagggcggccgcatcatcaatgatgaccagagcctgtatgcagatgtgtacctggaggatggcctcatcaagcagattggagaaaatctcatcgtgcctgggggcgtgaagaccatcgaggccaatggaaggatggtgattcctgggggcattgatgtgaacacctacctgcagaagcccagccagggcatgacagctgctgatgacttcttccagggcaccagggctgccctggtgggcggcaccaccatgatcatcgaccacgtggtgcctgagcccggcagcagcctgctgaccagctttgagaagtggcatgaggccgctgacaccaagagctgctgtgactacagcctgcacgtggacatcacctcctggtatgatggagtgcgggaggagctggaggtgctggtgcaggacaagggcgtgaacagcttccaggtgtacatggcctacaaggatgtgtaccagatgtctgacagccagctgtatgaggccttcaccttcctgaagggcctgggcgctgtgatcctggtgcatgctgaaaatggagacctgattgcccaggagcagaagaggatcctggagatgggcatcaccggccctgagggccacgccctgagcaggcctgaggagctggaggccgaggccgtgttccgggccatcaccatcgccggccgcatcaactgccctgtgtacatcaccaaggtgatgagcaagtctgctgctgacatcatcgccctggccaggaagaagggccccctggtgtttggagagcccatcgccgccagcctgggcacagatggcacccactactggagcaagaactgggccaaggctgctgcctttgtgaccagcccccccctgagcccagaccccaccaccccagactacctgaccagcctgctggcctgtggggacctgcaggtgactggaagtggccactgcccctacagcacagcccagaaggctgtgggcaaggacaacttcaccctcatccctgagggcgtgaatggcatcgaggagaggatgacagtggtgtgggacaaggctgtggccaccgggaagatggatgagaaccagtttgtggccgtgaccagcaccaatgctgccaagatcttcaacctgtaccccaggaagggcagaattgctgtgggcagtgatgctgatgtggtgatctgggaccctgacaagctgaagaccatcacagccaagagccacaagtctgctgtggagtacaacatctttgagggcatggagtgccacggcagccccctggtggtgatcagccagggcaagatcgtgtttgaagatggcaacatcaacgtgaacaagggcatgggccgcttcatccccaggaaggccttccctgagcacctgtaccagagggtgaagatccggaacaaggtgtttggcctgcagggcgtgtcccggggcatgtatgatggccctgtgtatgaggtgcctgccacccccaagtatgccaccccagcccccagcgccaagagcagccccagcaagcaccagcccccacccatccggaacctgcaccagagcaacttcagcctgagcggggcccagattgatgacaacaaccccaggagaacaggccaccgcatcgtggcccctcctgggggccgcagcaacatcaccagcctgggctag

SEQ ID NO: 148095 - DNA, 1719 bp, synthetic construct; identical to SEQ ID NO: 148093
  misc_feature 1..1719: note = Description of Artificial Sequence: Synthetic coding sequence
  source 1..1719: mol_type = other DNA

SEQ ID NO: 148096 - DNA, 834 bp, synthetic construct
  misc_feature 1..834: note = Description of Artificial Sequence: Synthetic coding sequence
  source 1..834: mol_type = other DNA
atgaatggatttgccagcctgctgcggaggaaccagttcatcctgctggtgctcttcctgctgcagatccagagcctgggcctggacatcgacagccggcccacagctgaggtgtgtgccacccacaccatcagccctggccccaagggagatgatggagagaagggggaccccggggaggagggcaagcacggcaaggtgggccgcatgggccccaagggcatcaagggggagctgggggacatgggagaccagggcaacatcggcaagacaggccccatcggcaagaagggggacaagggggagaagggcctgctgggcatccctggagagaagggcaaggccggcaccgtgtgtgactgtggccgctacaggaagtttgtgggccagctggacatcagcatcgcccggctgaagacctccatgaagtttgtgaagaatgtgattgctggcatccgggagacagaggagaagttctactacatcgtgcaggaggagaagaactaccgggagagcctgacccactgccgcatccggggcggcatgctggccatgcccaaggatgaggccgccaacaccctgattgctgactatgtggccaagagcggcttcttccgggtcttcatcggcgtgaatgacctggagcgggagggccagtacatgttcacagacaacacccccctgcagaactacagcaactggaatgaaggagagcccagcgacccctacggccacgaggactgtgtggagatgctgagcagcggccgctggaatgacacagagtgccacctgaccatgtactttgtgtgtgagttcatcaagaagaagaagtag

SEQ ID NO: 148097 - DNA, 807 bp, synthetic construct
  misc_feature 1..807: note = Description of Artificial Sequence: Synthetic coding sequence
  source 1..807: mol_type = other DNA
atgaccccagccctgtgccgcagcagcagcctggccagcaagggcatgagggagcggcgggagaccaaggcccccccagatggcctggaggagagcgccccccgggagaagaagcagagccagcctgtggtgacagccagtgacatcagcaagaggaagtgcaccagcagctttgtggagatgggcagccagggcgacatgggagacaagggccagaagggctctgtgggcagacatggcaagattggccccatcggcagcaagggggagaagggggacagcggggacatcggccccccaggccccaatggagagcccggcctgccctgtgaatgttcccagctgaggaaggccatcggggagatggacaaccaggtgtcccagctgaccagcgagctgaagttcatcaagaatgctgtggccggcgtgcgggagacagagagcaagatctacctgctggtgaaggaggagaagagatatgcagatgcccagctgagctgccagggccggggcggcaccctgtccatgcccaaggatgaagctgccaacggcctgatggccgcctacctggcccaggccggcctggcccgggtcttcatcggcatcaatgacctggagaaggagggcgcctttgtgtacagcgaccacagccccatgaggaccttcaacaagtggaggtctggagagcccaacaatgcctatgatgaggaggactgtgtggagatggtggccagcggcggctggaatgatgtggcctgccacaccaccatgtacttcatgtgtgaatttgacaaggagaacatgtag

SEQ ID NO: 148098 - DNA, 816 bp, synthetic construct
  misc_feature 1..816: note = Description of Artificial Sequence: Synthetic coding sequence
  source 1..816: mol_type = other DNA
atgaggggcaacctggccctggtgggcgtgctgatcagcctggccttcctgagcctgctgcccagcggccacccccagcctgctggagatgatgcctgcagcgtgcagatcctggtgcccggcctgaagggagatgctggggagaagggggacaagggggcccctggccggcccggccgggtgggccccaccggggagaagggggacatgggagacaagggccagaagggctctgtgggccgccacggcaagattggccccatcggcagcaaaggagagaagggggacagcggggacatcggccccccaggccccaacggggagcccggcctgccctgtgagtgcagccagctgaggaaggccatcggggagatggacaaccaggtgtcccagctgaccagcgagctgaagttcatcaagaatgctgtggccggcgtgcgggagacagagagcaagatctacctgctggtgaaggaggagaagagatatgcagatgcccagctgagctgccagggccggggcggcaccctgtccatgcccaaggatgaggccgccaacggcctgatggccgcctacctggcccaggccggcctggcccgggtcttcatcggcatcaatgacctggagaaggagggcgcctttgtgtacagcgaccacagccccatgaggaccttcaacaagtggaggtctggagagcccaacaatgcctatgatgaggaggactgtgtggagatggtggccagcggcggctggaatgatgtggcctgccacaccaccatgtacttcatgtgtgaatttgacaaggagaacatgtag

SEQ ID NO: 148099 - DNA, 744 bp, synthetic construct
  misc_feature 1..744: note = Description of Artificial Sequence: Synthetic coding sequence
  source 1..744: mol_type = other DNA
atgaggggcaacctggccctggtgggcgtgctgatcagcctggccttcctgagcctgctgcccagcggccacccccagcctgctggagatgatgcctgcagcgtgcagatcctggtgcccggcctgaagggagatgctggggagaagggggacaagggggcccctggccggcccggccgggtgggccccaccggggagaagggggagaagggggacagcggggacatcggccccccaggccccaacggggagcccggcctgccctgtgagtgcagccagctgaggaaggccatcggggagatggacaaccaggtgtcccagctgaccagcgagctgaagttcatcaagaatgctgtggccggcgtgcgggagacagagagcaagatctacctgctggtgaaggaggagaagagatatgcagatgcccagctgagctgccagggccggggcggcaccctgtccatgcccaaggatgaggccgccaacggcctgatggccgcctacctggcccaggccggcctggcccgggtcttcatcggcatcaatgacctggagaaggagggcgcctttgtgtacagcgaccacagccccatgaggaccttcaacaagtggaggtctggagagcccaacaatgcctatgatgaggaggactgtgtggagatggtggccagcggcggctggaatgatgtggcctgccacaccaccatgtacttcatgtgtgaatttgacaaggagaacatgtag

SEQ ID NO: 148100 - DNA, 858 bp, synthetic construct
  misc_feature 1..858: note = Description of Artificial Sequence: Synthetic coding sequence
  source 1..858: mol_type = other DNA
atgaagaagcagaggggcgtgggcgtgctgcctgccctgaggatgaggggcaacctggccctggtgggcgtgctgatcagcctggccttcctgagcctgctgcccagcggccacccccagcctgctggagatgatgcctgcagcgtgcagatcctggtgcccggcctgaagggagatgctggggagaagggggacaagggggcccctggccggcccggccgggtgggccccaccggggagaagggggacatgggagacaagggccagaagggctctgtgggccgccacggcaagattggccccatcggcagcaaaggagagaagggggacagcggggacatcggccccccaggccccaacggggagcccggcctgccctgtgagtgcagccagctgaggaaggccatcggggagatggacaaccaggtgtcccagctgaccagcgagctgaagttcatcaagaatgctgtggccggcgtgcgggagacagagagcaagatctacctgctggtgaaggaggagaagagatatgcagatgcccagctgagctgccagggccggggcggcaccctgtccatgcccaaggatgaggccgccaacggcctgatggccgcctacctggcccaggccggcctggcccgggtcttcatcggcatcaatgacctggagaaggagggcgcctttgtgtacagcgaccacagccccatgaggaccttcaacaagtggaggtctggagagcccaacaatgcctatgatgaggaggactgtgtggagatggtggccagcggcggctggaatgatgtggcctgccacaccaccatgtacttcatgtgtgaatttgacaaggagaacatgtag

SEQ ID NO: 148101 - DNA, 666 bp, synthetic construct
  misc_feature 1..666: note = Description of Artificial Sequence: Synthetic coding sequence
  source 1..666: mol_type = other DNA
atgtggtgggtgccccccagcccctacggctgcctgccctgtgccctgcccggggacatgggagacaagggccagaagggctctgtgggccgccacggcaagattggccccatcggcagcaaaggagagaagggggacagcggggacatcggccccccaggccccaacggggagcccggcctgccctgtgagtgcagccagctgaggaaggccatcggggagatggacaaccaggtgtcccagctgaccagcgagctgaagttcatcaagaatgctgtggccggcgtgcgggagacagagagcaagatctacctgctggtgaaggaggagaagagatatgcagatgcccagctgagctgccagggccggggcggcaccctgtccatgcccaaggatgaggccgccaacggcctgatggccgcctacctggcccaggccggcctggcccgggtcttcatcggcatcaatgacctggagaaggagggcgcctttgtgtacagcgaccacagccccatgaggaccttcaacaagtggaggtctggagagcccaacaatgcctatgatgaggaggactgtgtggagatggtggccagcggcggctggaatgatgtggcctgccacaccaccatgtacttcatgtgtgaatttgacaaggagaacatgtag

SEQ ID NO: 148102 - DNA, 666 bp, synthetic construct
  misc_feature 1..666: note = Description of Artificial Sequence: Synthetic coding sequence
  source 1..666: mol_type = other DNA
atgtggtgggtgccccccagcccctacggctgcctgccctgtgccctgcctggagatgctggggagaagggggacaagggggcccctggccggcccggccgggtgggccccaccggggagaagggggagaagggggacagcggggacatcggccccccaggccccaacggggagcccggcctgccctgtgagtgcagccagctgaggaaggccatcggggagatggacaaccaggtgtcccagctgaccagcgagctgaagttcatcaagaatgctgtggccggcgtgcgggagacagagagcaagatctacctgctggtgaaggaggagaagagatatgcagatgcccagctgagctgccagggccggggcggcaccctgtccatgcccaaggatgaggccgccaacggcctgatggccgcctacctggcccaggccggcctggcccgggtcttcatcggcatcaatgacctggagaaggagggcgcctttgtgtacagcgaccacagccccatgaggaccttcaacaagtggaggtctggagagcccaacaatgcctatgatgaggaggactgtgtggagatggtggccagcggcggctggaatgatgtggcctgccacaccaccatgtacttcatgtgtgaatttgacaaggagaacatgtag

SEQ ID NO: 148103 - DNA, 594 bp, synthetic construct
  misc_feature 1..594: note = Description of Artificial Sequence: Synthetic coding sequence
  source 1..594: mol_type = other DNA
atgtggtgggtgccccccagcccctacggctgcctgccctgtgccctgcctggagagaagggggacagcggggacatcggccccccaggccccaacggggagcccggcctgccctgtgagtgcagccagctgaggaaggccatcggggagatggacaaccaggtgtcccagctgaccagcgagctgaagttcatcaagaatgctgtggccggcgtgcgggagacagagagcaagatctacctgctggtgaaggaggagaagagatatgcagatgcccagctgagctgccagggccggggcggcaccctgtccatgcccaaggatgaggccgccaacggcctgatggccgcctacctggcccaggccggcctggcccgggtcttcatcggcatcaatgacctggagaaggagggcgcctttgtgtacagcgaccacagccccatgaggaccttcaacaagtggaggtctggagagcccaacaatgcctatgatgaggaggactgtgtggagatggtggccagcggcggctggaatgatgtggcctgccacaccaccatgtacttcatgtgtgaatttgacaaggagaacatgtag

SEQ ID NO: 148104 - DNA, 2229 bp, synthetic construct
  misc_feature 1..2229: note = Description of Artificial Sequence: Synthetic coding sequence
  source 1..2229: mol_type = other DNA
atgaaggatgactttgctgaggaggaggaggtgcagagctttggctacaagagatttggcatccaggagggcacccagtgcaccaagtgcaagaacaactgggccctgaagttcagcatcatcctgctgtacatcctgtgtgccctgctgaccatcaccgtggccatcctgggctacaaggtggtggagaagatggacaacgtgactggaggcatggagaccagccggcagacctatgatgacaagctgacagctgtggagagtgacctgaagaagctgggggaccagacaggcaagaaggccatcagcaccaacagcgagctgagcaccttcagaagtgacatcctggacctgcggcagcagctgcgggagatcacagagaagaccagcaagaacaaggacaccctggagaagctgcaggccagcggagatgccctggtggaccggcagagccagctgaaggagaccctggagaacaacagcttcctgatcaccaccgtgaacaagaccctgcaggcctacaacggctacgtgaccaacctgcagcaggacacctctgtgctgcagggcaacctgcagaaccagatgtacagccacaacgtggtgatcatgaacctgaacaacctgaacctgacccaggtgcagcagaggaacctgatcaccaacctgcagaggtctgtggatgacaccagccaggccatccagaggatcaagaatgacttccagaacctgcagcaggtgttcctgcaggccaagaaggacacagactggctgaaggagaaggtgcagagcctgcagaccctggccgccaacaacagcgccctggccaaggccaacaatgacaccctggaggacatgaacagccagctgaacagcttcaccggccagatggagaacatcaccaccatcagccaggccaatgagcagaacctgaaggacctgcaggacctgcacaaggatgctgagaacagaacagccatcaagttcaaccagctggaggagcgcttccagctgtttgaaacagacatcgtgaacatcatcagcaacatctcctacacagcccaccacctgcggaccctgaccagcaacctgaatgaggtgaggaccacctgcacagacaccctgaccaagcacacagatgacctgaccagcctgaacaacaccctggccaacatccggctggacagcgtgtccctgaggatgcagcaggacctgatgaggagccggctggacacagaggtggccaacctgagcgtcatcatggaggagatgaagctggtggacagcaagcacggccagctgatcaagaacttcaccatcctgcagggccccccaggcccccggggccccaggggggaccggggcagccagggccccccaggccccactggaaacaagggccagaagggggagaagggggagcccggccccccaggccctgctggggagcggggccccatcggccctgctggccccccaggagagcggggcggcaagggcagcaagggcagccagggccccaagggcagccggggcagccctgggaagccaggcccccagggcagcagcggggaccccggccccccaggccccccaggcaaggagggcctgcccggcccccagggccccccaggcttccagggcctgcagggcaccgtgggggagcccggggtgcccggcccccggggcctgcccggcctgcccggggtgcccggcatgcctggccccaagggccccccaggccccccaggccccagcggggctgtggtgcccctggccctgcagaatgagcccaccccagccccagaagataatggctgccccccccactggaagaacttcacagacaagtgctactacttctctgtggagaaggagatctttgaagatgccaagctgttctgtgaggacaagagcagccacctggtgttcatcaacacccgggaggagcagcagtggatcaagaagcagatggtgggccgggagagccactggattggcctgacagattctgagcgggagaatgagtggaagtggctggatggcaccagcccagactacaagaactggaaggccggccagcctgacaactggggccacggccacggccctggagaggactgtgccggcctcatctatgccggccagtggaatgacttccagtgtgaagatgtgaacaacttcatctgtgagaaggaccgggagaccgtgctgagcagcgccctgtag

SEQ ID NO: 148105 - DNA, 2919 bp, synthetic construct
  misc_feature 1..2919: note = Description of Artificial Sequence: Synthetic coding sequence
  source 1..2919: mol_type = other DNA
atgggccctggggtgctgctgctgctgctggtggccacagcctggcacggccagggcatccctgtgattgagcccagcgtgcctgagctggtggtgaagccaggggccaccgtgaccctgcgctgtgtgggcaatggatctgtggagtgggatggcccccccagcccccactggaccctgtacagtgatggcagcagcagcatcctgagcaccaacaatgccaccttccagaacacaggcacctaccgctgcacagagcccggggaccccctgggcggcagcgctgccatccacctgtatgtgaaggaccctgcccggccctggaatgtgctggcccaggaggtggtggtgtttgaggaccaggatgccctgctgccctgcctgctgacagatcctgtgctggaggccggcgtgtccctggtgcgggtgcggggccggcccctgatgaggcacaccaactacagcttcagcccctggcacggcttcaccatccaccgggccaagttcatccagagccaggactaccagtgcagcgccctgatgggcggcaggaaggtgatgagcatcagcatccggctgaaggtgcagaaggtgattcctggccccccagccctgaccctggtgcctgctgagctggtgcgcatccggggggaggccgcccagatcgtgtgcagcgccagctctgtggatgtgaactttgatgtgttcctgcagcacaacaacaccaagctggccatcccccagcagagcgacttccacaacaaccgctaccagaaggtgctgaccctgaacctggaccaggtggacttccagcacgccggcaactacagctgtgtggccagcaatgtgcagggcaagcacagcacctccatgttcttccgggtggtggagagcgcctacctgaacctgagcagcgagcagaacctgatccaggaggtgacagtgggggagggcctgaacctgaaggtgatggtggaggcctacccaggcctgcagggcttcaactggacctacctgggccccttcagtgaccaccagcctgagcccaagctggccaatgccaccaccaaggacacctaccgccacaccttcaccctgagcctgccccggctgaagcccagcgaggccggccgctacagcttcctggccaggaaccctgggggctggagggccctgacctttgagctgaccctgcgctacccacctgaggtgtctgtcatctggaccttcatcaatggcagcggcaccctgctgtgtgccgccagcggctacccccagcccaacgtgacctggctgcagtgcagcggccacacagacagatgtgatgaggcccaggtgctgcaggtgtgggatgacccctacccagaggtgctgagccaggagcccttccacaaggtgacagtgcagagcctgctgactgtggagaccctggagcacaaccagacctatgagtgccgggcccacaacagcgtgggcagcggctcctgggccttcatccccatctctgctggggcccacacccaccccccagatgagttcctgttcacccctgtggtggtggcctgcatgagcatcatggccctgctgctgctgctgctgctgctgctgctgtacaagtacaagcagaagcccaagtaccaggtgcgctggaagatcatcgagagctatgagggcaacagctacaccttcatcgaccccacccagctgccctacaatgagaagtgggagttccccaggaacaacctgcagtttgggaagaccctgggcgctggggccttcggcaaggtggtggaggccacagccttcggcctgggcaaggaggatgctgtgctgaaggtggccgtgaagatgctgaagagcacagcccacgcagatgagaaggaggccctgatgtctgagctgaagatcatgagccacctgggccagcacgagaacatcgtgaacctgctgggcgcctgcacccatggaggccctgtgctggtgatcacagagtactgctgctacggggacctgctgaacttcctgcggaggaaggccgaggccatgctgggccccagcctgagccctggccaggaccctgagggcggcgtggactacaagaacatccacctggagaagaagtatgtgcggcgggacagcggcttcagcagccagggcgtggacacctacgtggagatgaggcctgtgtccaccagcagcaatgacagcttcagcgagcaggacctggacaaggaggatggccggcccctggagctgcgggacctgctgcacttcagcagccaggtggcccagggcatggccttcctggccagcaagaactgcatccacagagatgtggccgccagaaatgtgctgctgaccaacggccacgtggccaagatcggggactttggcctggcccgggacatcatgaatgacagcaactacatcgtgaagggaaatgcccggctgcctgtgaagtggatggcccctgagagcatctttgactgtgtgtacacagtgcagagtgatgtgtggagctatggcatcctgctgtgggagatcttcagcctgggcctgaacccctacccaggcatcctggtgaacagcaagttctacaagctggtgaaggatggctaccagatggcccagcctgcctttgcccccaagaacatctacagcatcatgcaggcctgctgggccctggagcccacccaccggcccaccttccagcagatctgcagcttcctgcaggagcaggcccaggaggaccggcgggagcgggactacaccaacctgcccagcagcagccgcagcggcggcagcggcagcagcagcagcgagctggaggaggagagcagcagcgagcacctgacctgctgtgagcagggcgacatcgcccagcccctgctgcagcccaacaactaccagttctgctag

SEQ ID NO: 148106 - DNA, 1506 bp, synthetic construct
  misc_feature 1..1506: note = Description of Artificial Sequence: Synthetic coding sequence
  source 1..1506: mol_type = other DNA
atgaggcacaccaactacagcttcagcccctggcacggcttcaccatccaccgggccaagttcatccagagccaggactaccagtgcagcgccctgatgggcggcaggaaggtgatgagcatcagcatccggctgaaggtgcagaaggtgattcctggccccccagccctgaccctggtgcctgctgagctggtgcgcatccggggggaggccgcccagatcgtgtgcagcgccagctctgtggatgtgaactttgatgtgttcctgcagcacaacaacaccaagctggccatcccccagcagagcgacttccacaacaaccgctaccagaaggtgctgaccctgaacctggaccaggtggacttccagcacgccggcaactacagctgtgtggccagcaatgtgcagggcaagcacagcacctccatgttcttccgggtggtggagagcgcctacctgaacctgagcagcgagcagaacctgatccaggaggtgacagtgggggagggcctgaacctgaaggtgatggtggaggcctacccaggcctgcagggcttcaactggacctacctgggccccttcagtgaccaccagcctgagcccaagctggccaatgccaccaccaaggacacctaccgccacaccttcaccctgagcctgccccggctgaagcccagcgaggccggccgctacagcttcctggccaggaaccctgggggctggagggccctgacctttgagctgaccctgcgctacccacctgaggtgtctgtcatctggaccttcatcaatggcagcggcaccctgctgtgtgccgccagcggctacccccagcccaacgtgacctggctgcagtgcagcggccacacagacagatgtgatgaggcccaggtgctgcaggtgtgggatgacccctacccagaggtgctgagccaggagcccttccacaaggtgacagtgcagagcctgctgactgtggagaccctggagcacaaccagacctatgagtgccgggcccacaacagcgtgggcagcggctcctgggccttcatccccatctctgctggggcccacacccaccccccagatgagttcctgttcacccctgtggtggtggcctgcatgagcatcatggccctgctgctgctgctgctgctgctgctgctgtacaagtacaagcagaagcccaagtaccaggtgcgctggaagatcatcgagagctatgagggcaacagctacaccttcatcgaccccacccagctgccctacaatgagaagtgggagttccccaggaacaacctgcagtttgggaagaccctgggcgctggggccttcggcaaggtggtggaggccacagccttcggcctgggcaaggaggatgctgtgctgaaggtggccgtgaagatgctgaagagcacagcccacgcagatgagaaggaggccagcggcctgtaccagagcgctgagcagcagcagaagcgctggcagaggcagcagcagcagtag

SEQ ID NO: 148107 - DNA, 2016 bp, synthetic construct
  misc_feature 1..2016: note = Description of Artificial Sequence: Synthetic coding sequence
  source 1..2016: mol_type = other DNA
atgggccctggggtgctgctgctgctgctggtggccacagcctggcacggccagggcatccctgtgattgagcccagcgtgcctgagctggtggtgaagccaggggccaccgtgaccctgcgctgtgtgggcaatggatctgtggagtgggatggcccccccagcccccactggaccctgtacagtgatggcagcagcagcatcctgagcaccaacaatgccaccttccagaacacaggcacctaccgctgcacagagcccggggaccccctgggcggcagcgctgccatccacctgtatgtgaaggaccctgcccggccctggaatgtgctggcccaggaggtggtggtgtttgaggaccaggatgccctgctgccctgcctgctgacagatcctgtgctggaggccggcgtgtccctggtgcgggtgcggggccggcccctgatgaggcacaccaactacagcttcagcccctggcacggcttcaccatccaccgggccaagttcatccagagccaggactaccagtgcagcgccctgatgggcggcaggaaggtgatgagcatcagcatccggctgaaggtgcagaaggtgattcctggccccccagccctgaccctggtgcctgctgagctggtgcgcatccggggggaggccgcccagatcgtgtgcagcgccagctctgtggatgtgaactttgatgtgttcctgcagcacaacaacaccaagctggccatcccccagcagagcgacttccacaacaaccgctaccagaaggtgctgaccctgaacctggaccaggtggacttccagcacgccggcaactacagctgtgtggccagcaatgtgcagggcaagcacagcacctccatgttcttccgggtggtggagagcgcctacctgaacctgagcagcgagcagaacctgatccaggaggtgacagtgggggagggcctgaacctgaaggtgatggtggaggcctacccaggcctgcagggcttcaactggacctacctgggccccttcagtgaccaccagcctgagcccaagctggccaatgccaccaccaaggacacctaccgccacaccttcaccctgagcctgccccggctgaagcccagcgaggccggccgctacagcttcctggccaggaaccctgggggctggagggccctgacctttgagctgaccctgcgctacccacctgaggtgtctgtcatctggaccttcatcaatggcagcggcaccctgctgtgtgccgccagcggctacccccagcccaacgtgacctggctgcagtgcagcggccacacagacagatgtgatgaggcccaggtgctgcaggtgtgggatgacccctacccagaggtgctgagccaggagcccttccacaaggtgacagtgcagagcctgctgactgtggagaccctggagcacaaccagacctatgagtgccgggcccacaacagcgtgggcagcggctcctgggccttcatccccatctctgctggggcccacacccaccccccagatgagttcctgttcacccctgtggtggtggcctgcatgagcatcatggccctgctgctgctgctgctgctgctgctgctgtacaagtacaagcagaagcccaagtaccaggtgcgctggaagatcatcgagagctatgagggcaacagctacaccttcatcgaccccacccagctgccctacaatgagaagtgggagttccccaggaacaacctgcagtttgggaagaccctgggcgctggggccttcggcaaggtggtggaggccacagccttcggcctgggcaaggaggatgctgtgctgaaggtggccgtgaagatgctgaagagcacagcccacgcagatgagaaggaggccctgatgtctgagctgaagatcatgagccacctgggccagcacgagaacatcgtgaacctgctgggcgcctgcacccatggaggcaccgtggccagccctgcccgggtgtggacccccatgtggaggtag

SEQ ID NO: 148108 - DNA, 921 bp, synthetic construct
  misc_feature 1..921: note = Description of Artificial Sequence: Synthetic coding sequence
  source 1..921: mol_type = other DNA
atgggccctggggtgctgctgctgctgctggtggccacagcctggcacggccagggcatccctgtgattgagcccagcgtgcctgagctggtggtgaagccaggggccaccgtgaccctgcgctgtgtgggcaatggatctgtggagtgggatggcccccccagcccccactggaccctgtacagtgatggcagcagcagcatcctgagcaccaacaatgccaccttccagaacacaggcacctaccgctgcacagagcccggggaccccctgggcggcagcgctgccatccacctgtatgtgaaggaccctgcccggccctggaatgtgctggcccaggaggtggtggtgtttgaggaccaggatgccctgctgccctgcctgctgacagatcctgtgctggaggccggcgtgtccctggtgcgggtgcggggccggcccctgatgaggcacaccaactacagcttcagcccctggcacggcttcaccatccaccgggccaagttcatccagagccaggactaccagtgcagcgccctgatgggcggcaggaaggtgatgagcatcagcatccggctgaaggtgcagaaggtgattcctggccccccagccctgaccctggtgcctgctgagctggtgcgcatccggggggaggccgcccagatcgtgtgcagcgccagctctgtggatgtgaactttgatgtgttcctgcagcacaacaacaccaagctggccatcccccagcagagcgacttccacaacaaccgctaccagaaggtgctgaccctgaacctggaccaggtggacttccagcacgccggcaactacagctgtgtggccagcaatgtgcagggcaagcacagcacctccatgttcttccgggtggtgggcacccccagccccagcctgtgcccagcctag

SEQ ID NO: 148109 - DNA, 1134 bp, synthetic construct
  misc_feature 1..1134: note = Description of Artificial Sequence: Synthetic coding sequence
  source 1..1134: mol_type = other DNA
atgctgctgctggtgaccagcctgctgctgtgtgagctgccccacccagccttcctgctgatccctgagaagagtgacctgaggacagtggccccagccagcagcctgaatgtgcgctttgacagcaggaccatgaacctgtcctgggactgccaggagaacaccaccttcagcaagtgcttcctgacagacaagaagaacagagtggtggagccccggctgagcaacaatgaatgtagctgcaccttccgggagatctgcctgcatgaaggagtgacctttgaggtgcacgtgaacaccagccagaggggcttccagcagaagctgctgtaccccaacagcggccgggagggcacagctgcccagaacttcagctgcttcatctacaatgctgacctgatgaactgcacctgggcccggggccccacagcccccagagatgtgcagtacttcctgtacatccggaacagcaagagaagaagagagatccgctgcccctactacatccaggacagcggcacccacgtgggctgccacctggacaacctgagcggcctgaccagcaggaactacttcctggtgaatggcaccagccgggagatcggcatccagttctttgacagcctgctggacaccaagaagattgagcgcttcaacccccccagcaatgtgacagtgcgctgcaacaccacccactgcctggtgcgctggaagcagcccaggacctaccagaagctgagctacctggacttccagtaccagctggatgtgcacaggaagaacacccagcccggcacagagaacctgctgatcaacgtgtctggggacctggagaaccgctacaacttccccagcagcgagccccgggccaagcacagcgtgaagatccgggctgctgatgtgcgcatcctgaactggagctcctggagcgaggccattgaatttgaccacctgggcggcatccacccccggggccgggagcggctgccccggcggggcctggaccgggagggcaactacctgcggccccggggctgcagaaatggcatggacatcagcgccagcgccacccggggcaactgcttcctggatgatgctgtgaacctgtacatcatcttctacgtgttcatctag

SEQ ID NO: 148110 - DNA, 702 bp, synthetic construct
  misc_feature 1..702: note = Description of Artificial Sequence: Synthetic coding sequence
  source 1..702: mol_type = other DNA
atgctgctgctggtgaccagcctgctgctgtgtgagctgccccacccagccttcctgctgatccctgagaagagtgacctgaggacagtggccccagccagcagcctgaatgtgcgctttgacagcaggaccatgaacctgtcctgggactgccaggagaacaccaccttcagcaagtgcttcctgacagacaagaagaacagagtggtggagccccggctgagcaacaatgaatgtagctgcaccttccgggagatctgcctgcatgaaggagtgacctttgaggtgcacgtgaacaccagccagaggggcttccagcagaagctgctgtaccccaacagcggccgggagggcacagctgcccagaacttcagctgcttcatctacaatgctgacctgatgaactgcacctgggcccggggccccacagcccccagagatgtgcagtacttcctgtacatccggaacagcaagagaagaagagagatccgctgcccctactacatccaggacagcggcacccacgtgggctgccacctggacaacctgagcggcctgaccagcaggaactacttcctggtgaatggcaccagccgggagatcggcatccagttctttgacagcctgctggacaccaagaagattggcagcctgggctacagcggctgcagccggcagttccacaggagcaagaccaactag

SEQ ID NO: 148111 - DNA, 1002 bp, synthetic construct
  misc_feature 1..1002: note = Description of Artificial Sequence: Synthetic coding sequence
  source 1..1002: mol_type = other DNA
atgctgctgctggtgaccagcctgctgctgtgtgagctgccccacccagccttcctgctgatccctgagaagagtgacctgaggacagtggccccagccagcagcctgaatgtgcgctttgacagcaggaccatgaacctgtcctgggactgccaggagaacaccaccttcagcaagtgcttcctgacagacaagaagaacagagtggtggagccccggctgagcaacaatgaatgtagctgcaccttccgggagatctgcctgcatgaaggagtgacctttgaggtgcacgtgaacaccagccagaggggcttccagcagaagctgctgtaccccaacagcggccgggagggcacagctgcccagaacttcagctgcttcatctacaatgctgacctgatgaactgcacctgggcccggggccccacagcccccagagatgtgcagtacttcctgtacatccggaacagcaagagaagaagagagatccgctgcccctactacatccaggacagcggcacccacgtgggctgccacctggacaacctgagcggcctgaccagcaggaactacttcctggtgaatggcaccagccgggagatcggcatccagttctttgacagcctgctggacaccaagaagattgagcgcttcaacccccccagcaatgtgacagtgcgctgcaacaccacccactgcctggtgcgctggaagcagcccaggacctaccagaagctgagctacctggacttccagtaccagctggatgtgcacaggaagaacacccagcccggcacagagaacctgctgatcaacgtgtctggggacctggagaaccgctacaacttccccagcagcgagccccgggccaagcacagcgtgaagatccgggctgctgatgtgcgcatcctgaactggagctcctggagcgaggccattgaatttggcagcctgggctacagcggctgcagccggcagttccacaggagcaagaccaactag

SEQ ID NO: 148112 - DNA, 1002 bp, synthetic construct; identical to SEQ ID NO: 148111
  misc_feature 1..1002: note = Description of Artificial Sequence: Synthetic coding sequence
  source 1..1002: mol_type = other DNA

SEQ ID NO: 148113 - DNA, 861 bp, synthetic construct
  misc_feature 1..861: note = Description of Artificial Sequence: Synthetic coding sequence
  source 1..861: mol_type = other DNA
atgctgctgctggtgaccagcctgctgctgtgtgagctgccccacccagccttcctgctgatccctgagaagagtgacctgaggacagtggccccagccagcagcctgaatgtgcgctttgacagcaggaccatgaacctgtcctgggactgccaggagaacaccaccttcagcaagtgcttcctgacagacaagaagaacagagtggtggagccccggctgagcaacaatgaatgtagctgcaccttccgggagatctgcctgcatgaaggagtgacctttgaggtgcacgtgaacaccagccagaggggcttccagcagaagctgctgtaccccaacagcggccgggagggcacagctgcccagaacttcagctgcttcatctacaatgctgacctgatgaactgcacctgggcccggggccccacagcccccagagatgtgcagtacttcctgtacatccggaacagcaagagaagaagagagatccgctgcccctactacatccaggacagcggcacccacgtgggctgccacctggacaacctgagcggcctgaccagcaggaactacttcctggtgaatggcaccagccgggagatcggcatccagttctttgacagcctgctggacaccaagaagattgagcgcttcaacccccccagcaatgtgacagtgcgctgcaacaccacccactgcctggtgcgctggaagcagcccaggacctaccagaagctgagctacctggacttccagtaccagctggatgtgcacaggaagaacacccagcccggcacagagaacctgctggtggtgctgaccaccggcaccagcgccctgtgcaccttcatgtgcagctag

SEQ ID NO: 148114 - DNA, 1233 bp, synthetic construct
  misc_feature 1..1233: note = Description of Artificial Sequence: Synthetic coding sequence
  source 1..1233: mol_type = other DNA
atgctgctgctggtgaccagcctgctgctgtgtgagctgccccacccagccttcctgctgatccctgagaagagtgacctgaggacagtggccccagccagcagcctgaatgtgcgctttgacagcaggaccatgaacctgtcctgggactgccaggagaacaccaccttcagcaagtgcttcctgacagacaagaagaacagagtggtggagccccggctgagcaacaatgaatgtagctgcaccttccgggagatctgcctgcatgaaggagtgacctttgaggtgcacgtgaacaccagccagaggggcttccagcagaagctgctgtaccccaacagcggccgggagggcacagctgcccagaacttcagctgcttcatctacaatgctgacctgatgaactgcacctgggcccggggccccacagcccccagagatgtgcagtacttcctgtacatccggaacagcaagagaagaagagagatccgctgcccctactacatccaggacagcggcacccacgtgggctgccacctggacaacctgagcggcctgaccagcaggaactacttcctggtgaatggcaccagccgggagatcggcatccagttctttgacagcctgctggacaccaagaagattgagcgcttcaacccccccagcaatgtgacagtgcgctgcaacaccacccactgcctggtgcgctggaagcagcccaggacctaccagaagctgagctacctggacttccagtaccagctggatgtgcacaggaagaacacccagcccggcacagagaacctgctgatcaacgtgtctggggacctggagaaccgctacaacttccccagcagcgagccccgggccaagcacagcgtgaagatccgggctgctgatgtgcgcatcctgaactggagctcctggagcgaggccattgaatttggaagtgatgatggcaacctgggctctgtgtacatctacgtgctgctgattgtgggcaccctggtgtgtggcatcgtgctgggcttcctgttcaagcgcttcctgcgcatccagaggctcttcccccctgtgccccagatcaaggacaagctgaatgacaaccacgaggtggaggatgagatgggcccccagaggcaccaccgctgtggctggaacctgtaccccaccccaggccccagccctggcagcggcagcagcccccggctgggcagcgagagcagcctgtag

SEQ ID NO: 148115 - DNA, 1203 bp, synthetic construct
  misc_feature 1..1203: note = Description of Artificial Sequence: Synthetic coding sequence
  source 1..1203: mol_type = other DNA
atgctgctgctggtgaccagcctgctgctgtgtgagctgccccacccagccttcctgctgatccctgagaagagtgacctgaggacagtggccccagccagcagcctgaatgtgcgctttgacagcaggaccatgaacctgtcctgggactgccaggagaacaccaccttcagcaagtgcttcctgacagacaagaagaacagagtggtggagccccggctgagcaacaatgaatgtagctgcaccttccgggagatctgcctgcatgaaggagtgacctttgaggtgcacgtgaacaccagccagaggggcttccagcagaagctgctgtaccccaacagcggccgggagggcacagctgcccagaacttcagctgcttcatctacaatgctgacctgatgaactgcacctgggcccggggccccacagcccccagagatgtgcagtacttcctgtacatccggaacagcaagagaagaagagagatccgctgcccctactacatccaggacagcggcacccacgtgggctgccacctggacaacctgagcggcctgaccagcaggaactacttcctggtgaatggcaccagccgggagatcggcatccagttctttgacagcctgctggacaccaagaagattgagcgcttcaacccccccagcaatgtgacagtgcgctgcaacaccacccactgcctggtgcgctggaagcagcccaggacctaccagaagctgagctacctggacttccagtaccagctggatgtgcacaggaagaacacccagcccggcacagagaacctgctgatcaacgtgtctggggacctggagaaccgctacaacttccccagcagcgagccccgggccaagcacagcgtgaagatccgggctgctgatgtgcgcatcctgaactggagctcctggagcgaggccattgaatttggaagtgatgatggcaacctgggctctgtgtacatctacgtgctgctgattgtgggcaccctggtgtgtggcatcgtgctgggcttcctgttcaagcgcttcctgcgcatccagaggctcttcccccctgtgccccagatcaaggacaagctgaatgacaaccacgaggtggaggatgagatcatctgggaggagttcaccccagaggagggcaagggctaccgggaggaggtgctgactgtgaaggagatcacctag

SEQ ID NO: 148116 - DNA, 1203 bp, synthetic construct; identical to SEQ ID NO: 148115
  misc_feature 1..1203: note = Description of Artificial Sequence: Synthetic coding sequence
  source 1..1203: mol_type = other DNA

SEQ ID NO: 148117 - DNA, 717 bp, synthetic construct
  misc_feature 1..717: note = Description of Artificial Sequence: Synthetic coding sequence
  source 1..717: mol_type = other DNA
atgctgctgctggtgaccagcctgctgctgtgtgagctgccccacccagccttcctgctgatccctgagaagagtgacctgaggacagtggccccagccagcagcctgaatgtgcgctttgacagcaggaccatgaacctgtcctgggactgccaggagaacaccaccttcagcaagtgcttcctgacagacaagaagaacagagtggtggagccccggctgagcaacaatgaatgtagctgcaccttccgggagatctgcctgcatgaaggagtgacctttgaggtgcacgtgaacaccagccagaggggcttccagcagaagctgctgtaccccaacagcggccgggagggcacagctgcccagaacttcagctgcttcatctacaatgctgacctgatgaactgcacctgggcccggggccccacagcccccagagatgtgcagtacttcctgtacatccggaacagcaagagaagaagagagatccgctgcccctactacatccaggacagcggcacccacgtgggctgccacctggacaacctgagcggcctgaccagcaggaactacttcctggtgaatggcaccagccgggagatcggcatccagttctttgacagcctgctggacaccaagaagattgagcgcttcaacccccccagcaatgtgacagtgcgctgcaacaccacccactgcctggtgcgctggaagtag

SEQ ID NO: 148118 - DNA, 1305 bp, synthetic construct
  misc_feature 1..1305: note = Description of Artificial Sequence: Synthetic coding sequence
  source 1..1305: mol_type = other DNA
atgctgctgctggtgaccagcctgctgctgtgtgagctgccccacccagccttcctgctgatccctgagaagagtgacctgaggacagtggccccagccagcagcctgaatgtgcgctttgacagcaggaccatgaacctgtcctgggactgccaggagaacaccaccttcagcaagtgcttcctgacagacaagaagaacagagtggtggagccccggctgagcaacaatgaatgtagctgcaccttccgggagatctgcctgcatgaaggagtgacctttgaggtgcacgtgaacaccagccagaggggcttccagcagaagctgctgtaccccaacagcggccgggagggcacagctgcccagaacttcagctgcttcatctacaatgctgacctgatgaactgcacctgggcccggggccccacagcccccagagatgtgcagtacttcctgtacatccggaacagcaagagaagaagagagatccgctgcccctactacatccaggacagcggcacccacgtgggctgccacctggacaacctgagcggcctgaccagcaggaactacttcctggtgaatggcaccagccgggagatcggcatccagttctttgacagcctgctggacaccaagaagattgagcgcttcaacccccccagcaatgtgacagtgcgctgcaacaccacccactgcctggtgcgctggaagcagcccaggacctaccagaagctgagctacctggacttccagtaccagctggatgtgcacaggaagaacacccagcccggcacagagaacctgctgatcaacgtgtctggggacctggagaaccgctacaacttccccagcagcgagccccgggccaagcacagcgtgaagatccgggctgctgatgtgcgcatcctgaactggagctcctggagcgaggccattgaatttggcagccacagcgtgacccaggccggcgtgcagtggcacaacctgggcagcctgcagccccccagcccccggctgaagcgcttcagctgcctgcggctgcccggcagtgatgatggcaacctgggctctgtgtacatctacgtgctgctgattgtgggcaccctggtgtgtggcatcgtgctgggcttcctgttcaagcgcttcctgcgcatccagaggctcttcccccctgtgccccagatcaaggacaagctgaatgacaaccacgaggtggaggatgagatcatctgggaggagttcaccccagaggagggcaagggctaccgggaggaggtgctgactgtgaaggagatcacctag

SEQ ID NO: 148119 - DNA, 567 bp, synthetic construct
  misc_feature 1..567: note = Description of Artificial Sequence: Synthetic coding sequence
  source 1..567: mol_type = other DNA
atgctgctgctggtgaccagcctgctgctgtgtgagctgccccacccagccttcctgctgatccctgagaagagtgacctgaggacagtggccccagccagcagcctgaatgtgcgctttgacagcaggaccatgaacctgtcctgggactgccaggagaacaccaccttcagcaagtgcttcctgacagacaagaagaacagagtggtggagccccggctgagcaacaatgaatgtagctgcaccttccgggagatctgcctgcatgaaggagtgacctttgaggtgcacgtgaacaccagccagaggggcttccagcagaagctgctgtaccccaacagcggccgggagggcacagctgcccagaacttcagctgcttcatctacaatgctgacctgatgaactgcacctgggcccggggccccacagcccccagagatgtgcagtacttcctgtacatccggaacagcaagagaagaagagagatccgctgcccctactacatccaggacagcggcacccacgtgggctgccacctggacaacctgagcggcctgaccagctag

SEQ ID NO: 148120 - DNA, 1203 bp, synthetic construct; identical to SEQ ID NO: 148115
  misc_feature 1..1203: note = Description of Artificial Sequence: Synthetic coding sequence
  source 1..1203: mol_type = other DNA

SEQ ID NO: 148121 - DNA, 804 bp, synthetic construct
  misc_feature 1..804: note = Description of Artificial Sequence: Synthetic coding sequence
  source 1..804: mol_type = other DNA
atgaactgcacctgggcccggggccccacagcccccagagatgtgcagtacttcctgtacatccggaacagcaagagaagaagagagatccgctgcccctactacatccaggacagcggcacccacgtgggctgccacctggacaacctgagcggcctgaccagcaggaactacttcctggtgaatggcaccagccgggagatcggcatccagttctttgacagcctgctggacaccaagaagattgagcgcttcaacccccccagcaatgtgacagtgcgctgcaacaccacccactgcctggtgcgctggaagcagcccaggacctaccagaagctgagctacctggacttccagtaccagctggatgtgcacaggaagaacacccagcctggaacagagaacctgctgatcaacgtgtctggggacctggagaaccgctacaacttccccagcagcgagccccgggccaagcacagcgtgaagatccgggcagcagatgtgcgcatcctgaactggagctcctggagcgaggccatcgagtttggaagtgatgatggcaacctgggctctgtgtacatctacgtgctgctgattgtgggcaccctggtgtgtggcatcgtgctgggcttcctgttcaagcgcttcctgcgcatccagaggctcttcccccctgtgccccagatcaaggacaagctgaatgacaaccacgaggtggaggatgagatcatctgggaggagttcaccccagaggagggcaagggctaccgggaggaggtgctgactgtgaaggagatcacctag

SEQ ID NO: 148122 - DNA, 2712 bp, synthetic construct
  misc_feature 1..2712: note = Description of Artificial Sequence: Synthetic coding sequence
  source 1..2712: mol_type = other DNA
atggtgctggcccagggcctgctgtccatggccctgctggccctgtgctgggagaggagcctggccggggctgaggagaccatccccctgcagaccctgcgctgctacaatgactacaccagccacatcacctgccgctgggccgacacccaggatgcccagaggctggtgaatgtgaccctcatcagaagagtgaatgaagacctgctggagcctgtgtcctgtgacctgagtgatgacatgccctggagcgcctgcccccacccccgctgtgtgccccggcgctgcgtcatcccctgccagagctttgtggtgacagatgtggactacttctccttccagcctgaccggcccctgggcacccggctgactgtgaccctgacccagcacgtgcagcccccagagccccgggacctgcagatcagcacagaccaggaccacttcctgctgacctggagcgtggccctgggcagcccccagagccactggctgagccctggggacctggagtttgaggtggtgtacaagaggctgcaggacagctgggaggatgctgccatcctgctgagcaacaccagccaggccaccctgggccctgagcacctgatgcccagcagcacctacgtggcccgggtgaggacccggctggcccctggcagccggctgagcggccggcccagcaagtggagccctgaggtgtgctgggacagccagcctggagatgaggcccagccccagaacctggagtgcttctttgatggagctgctgtgctgagctgctcctgggaggtgaggaaggaggtggccagctctgtgtcctttggcctcttctacaagcccagcccagatgctggcagcgctgtgctgctgcgggaggaggagtgcagccctgtgctgcgggagggcctgggcagcctgcacaccaggcaccactgccagatccctgtgcctgaccctgccacccacggccagtacatcgtgtctgtgcagccccggcgggcagagaagcacatcaagagctctgtgaacatccagatggccccacccagcctgaatgtgaccaaggatggagacagctacagcctgcgctgggagaccatgaagatgagatatgagcacatcgaccacacctttgagatccagtacaggaaggacacagccacctggaaggacagcaagacagagaccctgcagaatgcccacagcatggccctgcctgccctggagcccagcacccgctactgggcccgggtgcgggtgaggaccagcaggacaggctacaacggcatctggagcgagtggagcgaggcccgctcctgggacacagagagcgtgctgcccatgtgggtgctggccctgattgtcatcttcctgaccatcgctgtgctgctggccctgcgcttctgtggcatctacggctaccgcctgcggaggaagtgggaggagaagatccccaaccccagcaagagccacctgttccagaatggatctgctgagctgtggcccccaggctccatgtctgccttcaccagcggcagccccccccaccagggcccctggggcagccgcttccctgagctggagggcgtcttccctgtgggctttggagacagcgaggtgagccccctgaccatcgaggaccccaagcacgtgtgtgacccccccagcggccctgacaccaccccagctgccagtgacctgcccacagagcagccccccagcccccagcccggccccccagctgccagccacaccccagagaagcaggccagcagctttgacttcaacggcccctacctgggccccccccacagccgcagcctgcctgacatcctgggccagcctgagcccccccaggagggcggcagccagaagagccccccacctggcagcctggagtacctgtgcctgcctgctgggggccaggtgcagctggtgcccctggcccaggccatgggccctggccaggccgtggaggtggagcggcggcccagccagggcgctgctggcagccccagcctggagagcggcggcggccctgcccccccagccctgggcccccgggtgggcggccaggaccagaaggacagccctgtggccatccccatgagcagcggggacacagaagatcctggggtggccagcggctacgtgagcagcgctgacctggtgttcacccccaacagcggggccagctctgtgtccctggtgcccagcctgggcctgcccagcgaccagacccccagcctgtgccccggcctggccagcggccccccaggggcccctggccctgtgaagagcggctttgagggctacgtggagctgccccccatcgagggccgcagccccaggagccccaggaacaaccctgtgcccccagaggccaagagccctgtgctgaaccctggagagaggcctgcagatgtgagccccaccagcccccagcctgagggcctgctggtgctgcagcaggtgggggactactgcttcctgcccggcctgggccctggccccctgagcctgcggagcaagcccagcagccctggccctggccctgagatcaagaacctggaccaggccttccaggtgaagaagcccccaggccaggccgtgccccaggtgcctgtgatccagctgttcaaggccctgaagcagcaggactacctgagcctgcccccctgggaggtgaacaagccaggagaggtgtgctag

SEQ ID NO: 148123 - DNA, 2694 bp, synthetic construct
  misc_feature 1..2694: note = Description of Artificial Sequence: Synthetic coding sequence
  source 1..2694: mol_type = other DNA
atggtgctggcccagggcctgctgtccatggccctgctggccctgtgctgggagaggagcctggccggggctgaggagaccatccccctgcagaccctgcgctgctacaatgactacaccagccacatcacctgccgctgggccgacacccaggatgcccagaggctggtgaatgtgaccctcatcagaagagtgaatgaagacctgctggagcctgtgtcctgtgacctgagtgatgacatgccctggagcgcctgcccccacccccgctgtgtgccccggcgctgcgtcatcccctgccagagctttgtggtgacagatgtggactacttctccttccagcctgaccggcccctgggcacccggctgactgtgaccctgacccagcacgtgcagcccccagagccccgggacctgcagatcagcacagaccaggaccacttcctgctgacctggagcgtggccctgggcagcccccagagccactggctgagccctggggacctggagtttgaggtggtgtacaagaggctgcaggacagctgggaggatgctgccatcctgctgagcaacaccagccaggccaccctgggccctgagcacctgatgcccagcagcacctacgtggcccgggtgaggacccggctggcccctggcagccggctgagcggccggcccagcaagtggagccctgaggtgtgctgggacagccagcctggagatgaggcccagccccagaacctggagtgcttctttgatggagctgctgtgctgagctgctcctgggaggtgaggaaggaggtggccagctctgtgtcctttggcctcttctacaagcccagcccagatgctggggaggaggagtgcagccctgtgctgcgggagggcctgggcagcctgcacaccaggcaccactgccagatccctgtgcctgaccctgccacccacggccagtacatcgtgtctgtgcagccccggcgggcagagaagcacatcaagagctctgtgaacatccagatggccccacccagcctgaatgtgaccaaggatggagacagctacagcctgcgctgggagaccatgaagatgagatatgagcacatcgaccacacctttgagatccagtacaggaaggacacagccacctggaaggacagcaagacagagaccctgcagaatgcccacagcatggccctgcctgccctggagcccagcacccgctactgggcccgggtgcgggtgaggaccagcaggacaggctacaacggcatctggagcgagtggagcgaggcccgctcctgggacacagagagcgtgctgcccatgtgggtgctggccctgattgtcatcttcctgaccatcgctgtgctgctggccctgcgcttctgtggcatctacggctaccgcctgcggaggaagtgggaggagaagatccccaaccccagcaagagccacctgttccagaatggatctgctgagctgtggcccccaggctccatgtctgccttcaccagcggcagccccccccaccagggcccctggggcagccgcttccctgagctggagggcgtcttccctgtgggctttggagacagcgaggtgagccccctgaccatcgaggaccccaagcacgtgtgtgacccccccagcggccctgacaccaccccagctgccagtgacctgcccacagagcagccccccagcccccagcccggccccccagctgccagccacaccccagagaagcaggccagcagctttgacttcaacggcccctacctgggccccccccacagccgcagcctgcctgacatcctgggccagcctgagcccccccaggagggcggcagccagaagagccccccacctggcagcctggagtacctgtgcctgcctgctgggggccaggtgcagctggtgcccctggcccaggccatgggccctggccaggccgtggaggtggagcggcggcccagccagggcgctgctggcagccccagcctggagagcggcggcggccctgcccccccagccctgggcccccgggtgggcggccaggaccagaaggacagccctgtggccatccccatgagcagcggggacacagaagatcctggggtggccagcggctacgtgagcagcgctgacctggtgttcacccccaacagcggggccagctctgtgtccctggtgcccagcctgggcctgcccagcgaccagacccccagcctgtgccccggcctggccagcggccccccaggggcccctggccctgtgaagagcggctttgagggctacgtggagctgccccccatcgagggccgcagccccaggagccccaggaacaaccctgtgcccccagaggccaagagccctgtgctgaaccctggagagaggcctgcagatgtgagccccaccagcccccagcctgagggcctgctggtgctgcagcaggtgggggactactgcttcctgcccggcctgggccctggccccctgagcctgcggagcaagcccagcagccctggccctggccctgagatcaagaacctggaccaggccttccaggtgaagaagcccccaggccaggccgtgccccaggtgcctgtgatccagctgttcaaggccctgaagcagcaggactacctgagcctgcccccctgggaggtgaacaagccaggagaggtgtgctag

SEQ ID NO: 148124 - DNA, 690 bp, synthetic construct
  misc_feature 1..690: note = Description of Artificial Sequence: Synthetic coding sequence
  source 1..690: mol_type = other DNA
atgccctggagcgcctgcccccacccccgctgtgtgccccggcgctgcgtcatcccctgccagagctttgtggtgacagatgtggactacttctccttccagcctgaccggcccctgggcacccggctgactgtgaccctgacccagcacgtgcagcccccagagccccgggacctgcagatcagcacagaccaggaccacttcctgctgacctggagcgtggccctgggcagcccccagagccactggctgagccctggggacctggagtttgaggtggtgtacaagaggctgcaggacagctgggaggatgctgccatcctgctgagcaacaccagccaggccaccctgggccctgagcacctgatgcccagcagcacctacgtggcccgggtgaggacccggctggcccctggcagccggctgagcggccggcccagcaagtggagccctgaggtgtgctgggacagccagcctggagatgaggcccagccccagaacctggagtgcttctttgatggagctgctgtgctgagctgctcctgggaggtgaggaaggaggtggccagctctgtgtcctttggcctcttctacaagcccagcccagatgctggggaggaggagtgcagccctgtgctgcgggagggcctgggcagcctgcacaccaggcaccactgccagatcccctag

SEQ ID NO: 148125 - DNA, 2535 bp, synthetic construct
  misc_feature 1..2535: note = Description of Artificial Sequence: Synthetic coding sequence
  source 1..2535: mol_type = other DNA
atgggcaagctgcggccctggagggacctgctggagcctgtgtcctgtgacctgagtgatgacatgccctggagcgcctgcccccacccccgctgtgtgccccggcgctgtgtgatcccctgccagagctttgtggtgacagatgtggactacttctccttccagcctgaccggcccctgggcacccggctgactgtgaccctgacccagcacgtgcagcccccagagccccgggacctgcagatcagcacagaccaggaccacttcctgctgacctggagcgtggccctgggcagcccccagagccactggctgagccctggggacctggagtttgaggtggtgtacaagaggctgcaggacagctgggaggatgctgccatcctgctgagcaacaccagccaggccaccctgggccctgagcacctgatgcccagcagcacctacgtggcccgggtgaggacccggctggcccctggcagccggctgagcggccggcccagcaagtggagccctgaggtgtgctgggacagccagcctggagatgaggcccagccccagaacctggagtgcttctttgatggagctgctgtgctgagctgctcctgggaggtgaggaaggaggtggccagctctgtgtcctttggcctcttctacaagcccagcccagatgctggcagcgctgtgctgctgcgggaggaggagtgcagccctgtgctgcgggagggcctgggcagcctgcacaccaggcaccactgccagatccctgtgcctgaccctgccacccacggccagtacatcgtgtctgtgcagcccaggagagctgagaagcacatcaagagctctgtgaacatccagatggccccacccagcctgaatgtgaccaaggatggagacagctacagcctgcgctgggagaccatgaagatgagatatgagcacatcgaccacacctttgagatccagtacaggaaggacacagccacctggaaggacagcaagacagagaccctgcagaatgcccacagcatggccctgcctgccctggagcccagcacccgctactgggcccgggtgcgggtgaggaccagcaggacaggctacaacggcatctggagcgagtggagcgaggcccgctcctgggacacagaatctgtgctgcccatgtgggtgctggccctgattgtcatcttcctgaccatcgctgtgctgctggccctgcgcttctgtggcatctacggctaccgcctgcggaggaagtgggaggagaagatccccaaccccagcaagagccacctgttccagaatggcagcgctgagctgtggcccccaggctccatgtctgccttcaccagcggcagccccccccaccagggcccctggggcagccgcttccctgagctggagggcgtcttccctgtgggctttggagacagcgaggtgagccccctgaccatcgaggaccccaagcacgtgtgtgaccccccatctggccctgacaccaccccagctgccagtgacctgcccacagagcagccccccagcccccagcccggccccccagctgccagccacaccccagagaagcaggccagcagctttgacttcaacggcccctacctgggccccccccacagccgcagcctgcctgacatcctgggccagcctgagcccccccaggagggcggcagccagaagagccccccacctggcagcctggagtacctgtgcctgcctgctgggggccaggtgcagctggtgcccctggcccaggccatgggccctggccaggccgtggaggtggagcggcggcccagccagggcgccgccggcagccccagcctggagagcggcggcggccctgcccccccagccctgggcccccgggtgggcggccaggaccagaaggacagccctgtggccatccccatgagcagcggggacacagaggaccccggggtggccagcggctacgtgtcctctgctgacctggtgttcacccccaacagcggggccagctctgtgtccctggtgcccagcctgggcctgcccagcgaccagacccccagcctgtgccccggcctggccagcggccccccaggggcccctggccctgtgaagagcggctttgagggctacgtggagctgccccccatcgagggccgcagccccaggagccccaggaacaaccctgtgcccccagaggccaagagccctgtgctgaaccctggagagaggcctgcagatgtgagccccaccagcccccagcctgagggcctgctggtgctgcagcaggtgggggactactgcttcctgcccggcctgggccctggccccctgagcctgcggagcaagcccagcagccctggccctggccctgagatcaagaacctggaccaggccttccaggtgaagaagcccccaggccaggccgtgccccaggtgcctgtgatccagctgttcaaggccctgaagcagcaggactacctgagcctgcccccctgggaggtgaacaagccaggagaggtgtgctag

SEQ ID NO: 148126 - DNA, 2670 bp, synthetic construct
  misc_feature 1..2670: note = Description of Artificial Sequence: Synthetic coding sequence
  source 1..2670: mol_type = other DNA
atggtgctggcccagggcctgctgtccatggccctgctggccctgtgctgggagaggagcctggccggggctgaggagaccatccccctgcagaccctgcgctgctacaatgactacaccagccacatcacctgccgctgggccgacacccaggatgcccagaggctggtgaatgtgaccctcatcagaagagtgaatgaagacctgctggagcctgtgtcctgtgacctgagtgatgacatgccctggagcgcctgcccccacccccgctgtgtgccccggcgctgcgtcatcccctgccagagctttgtggtgacagatgtggactacttctccttccagcctgaccggcccctgggcacccggctgactgtgaccctgacccagcacgtgcagcccccagagccccgggacctgcagatcagcacagaccaggaccacttcctgctgacctggagcgtggccctgggcagcccccagagccactggctgagccctggggacctggagtttgaggtggtgtacaagaggctgcaggacagctgggaggatgctgccatcctgctgagcaacaccagccaggccaccctgggccctgagcacctgatgcccagcagcacctacgtggcccgggtgaggacccggctggcccctggcagccggctgagcggccggcccagcaagtggagccctgaggtgtgctgggacagccagcctggagatgaggcccagccccagaacctggagtgcttctttgatggagctgctgtgctgagctgctcctgggaggtgaggaaggaggtggccagctctgtgtcctttggcctcttctacaagcccagcccagatgctggggaggaggagtgcagccctgtgctgcgggagggcctgggcagcctgcacaccaggcaccactgccagatccctgtgcctgaccctgccacccacggccagtacatcgtgtctgtgcagccccggcgggcagagaagcacatcaagagctctgtgaacatccagatggccccacccagcctgaatgtgaccaaggatggagacagctacagcctgcgctgggagaccatgaagatgagatatgagcacatcgaccacacctttgagatccagtacaggaaggacacagccacctggaaggacagcaagacagagaccctgcagaatgcccacagcatggccctgcctgccctggagcccagcacccgctactgggcccgggtgcgggtgaggaccagcaggacaggctacaacggcatctggagcgagtggagcgaggcccgctcctgggacacagagagcgtgctgcccatgtgggtgctggccctgattgtcatcttcctgaccatcgctgtgctgctggccctgcgcttctgtggcatctacggctaccgcctgcggaggaagtgggaggagaagatccccaaccccagcaagagccacctgttccagaatggatctgctgagctgtggcccccaggctccatgtctgccttcaccagcggcagccccccccaccagggcccctggggcagccgcttccctgagctggagggcgtcttccctgtgggctttggagacagcgaggtgagccccctgaccatcgaggaccccaagcacgtgtgtgacccccccagcggccctgacaccaccccagctgccagtgacctgcccacagagcagccccccagcccccagcccggccccccagctgccagccacaccccagagaagcaggccagcagctttgacttcaacggcccctacctgggccccccccacagccgcagcctgcctgacatcctgggccagcctgagcccccccaggagggcggcagccagaagagccccccacctggcagcctggagtacctgtgcctgcctgctgggggccaggtgcagctggtgcccctggcccaggccatgggccctggccaggccgtggaggtggagcggcggcccagccagggcgctgctggcagccccagcctggagagcggcggcggccctgcccccccagccctgggcccccgggtgggcggccaggaccagaaggacagccctgtggccatccccatgagcagcggggacacagaagatcctggggtggccagcggctacgtgagcagcgctgacctggtgttcacccccaacagcggggccagctctgtgtccctggtgcccagcctgggcctgcccagcgaccagacccccagcctgtgccccggcctggccagcggccccccaggggcccctggccctgtgaagagcggctttgagggctacgtggagctgccccccatcgagggccgcagccccaggagccccaggaacaaccctgtgcccccagaggccaagagccctgtgctgaaccctggagagaggcctgcagatgtgagccccaccagcccccagcctgagggcctgctggtgctgcagcaggtgggggactactgcttcctgcccggcctgggccctggccccctgagcctgcggagcaagcccagcagccctggccctggccctgagatcaagaacctggaccaggccttccaggtgaagaagcccccaggccaggccgtgccccaggtgcctgtgatccagctgttcaaggccctggtggtgtctgtgatgtctgtgggcccccctgtgccctag

SEQ ID NO: 148127 - DNA, 2352 bp, synthetic construct
  misc_feature 1..2352: note = Description of Artificial Sequence: Synthetic coding sequence
  source 1..2352: mol_type = other DNA
atggcccggctgggcaactgcagcctgacctgggccgccctgatcatcctgctgctgcccggcagcctggaggagtgtggccacatctctgtgtctgcccccatcgtgcacctgggggaccccatcacagccagctgcatcatcaagcagaactgcagccacctggaccctgagccccagatcctgtggaggctgggcgctgagctgcagcccggcggccggcagcagaggctgagtgatggcacccaggagagcatcatcaccctgccccacctgaaccacacccaggccttcctgagctgctgcctgaactggggcaacagcctgcagatcctggaccaggtggagctgcgggccggctaccccccagccatcccccacaacctgagctgcctgatgaacctgaccaccagcagcctcatctgccagtgggagcccggccctgagacccacctgcccaccagcttcaccctgaagagcttcaagagccggggcaactgccagacccagggcgacagcatcctggactgtgtgcccaaggatggccagagccactgctgcatccccaggaagcacctgctgctgtaccagaacatgggcatctgggtgcaggccgagaatgccctgggcacctccatgagcccccagctgtgcctggaccccatggatgtggtgaagctggagccccccatgctgcggaccatggaccccagccctgaggccgccccaccccaggccggctgcctgcagctgtgctgggagccctggcagcccggcctgcacatcaaccagaagtgtgagctgcggcacaagccccagagaggagaggcctcctgggccctggtgggccccctgcccctggaggccctgcagtatgagctgtgtggcctgctgcctgccacagcctacaccctgcagatccgctgcatccgctggcccctgcccggccactggagcgactggagccccagcctggagctgcggaccacagagcgggcccccaccgtgcggctggacacctggtggaggcagaggcagctggaccccaggacagtgcagctgttctggaagcctgtgcccctggaggaggacagcggccgcatccagggctacgtggtgtcctggaggcccagcggccaggccggggccatcctgcccctgtgcaacaccacagagctgagctgcaccttccacctgcccagcgaggcccaggaggtggccctggtggcctacaacagcgctggcaccagccggcccacccctgtggtgttttctgagagccggggccctgccctgacccggctgcacgccatggcccgggacccccacagcctgtgggtgggctgggagccccccaacccctggccccagggctacgtgattgagtggggcctgggccccccatctgccagcaacagcaacaagacctggaggatggagcagaatggccgggccaccggcttcctgctgaaggagaacatccggcccttccagctgtatgagatcatcgtgacccccctgtaccaggacaccatgggccccagccagcacgtgtatgcctacagccaggagatggcccccagccacgcccctgagctgcacctgaagcacatcggcaagacctgggcccagctggagtgggtgcctgagcccccagagctgggcaagagccccctgacccactacaccatcttctggaccaatgcccagaaccagagcttcagcgccatcctgaatgccagcagccggggctttgtgctgcacggcctggagcccgccagcctgtaccacatccacctgatggccgccagccaggccggggccaccaacagcacagtgctgaccctgatgaccctgaccccagagggcagcgagctgcacatcatcctgggcctgtttggcctgctgctgctgctgacctgcctgtgtggcacagcctggctgtgctgcagccccaacaggaagaaccccctgtggcccagcgtgcctgaccctgcccacagcagcctgggctcctgggtgcccaccatcatggaggaggatgccttccagctgcccggcctgggcaccccacccatcaccaagctgactgtgctggaggaggatgagaagaagcctgtgccctgggagagccacaacagcagcgagacctgtggcctgcccaccctggtgcagacctacgtgctgcagggcgaccccagggctgtgtccacccagccccagagccagagcggcaccagtgaccaggccggccccccccggcgcagcgcctacttcaaggaccagatcatgctgcacccagcccccccaaatggcctgctgtgcctcttccccatcacctctgtgctgtag

SEQ ID NO: 148128 - DNA, 2310 bp, synthetic construct
  misc_feature 1..2310: note = Description of Artificial Sequence: Synthetic coding sequence
  source 1..2310: mol_type = other DNA
atggcccggctgggcaactgcagcctgacctgggccgccctgatcatcctgctgctgcccggcagcctggaggagtgtggccacatctctgtgtctgcccccatcgtgcacctgggggaccccatcacagccagctgcatcatcaagcagaactgcagccacctggaccctgagccccagatcctgtggaggctgggcgctgagctgcagcccggcggccggcagcagaggctgagtgatggcacccaggagagcatcatcaccctgccccacctgaaccacacccaggccttcctgagctgctgcctgaactggggcaacagcctgcagatcctggaccaggtggagctgcgggccggctaccccccagccatcccccacaacctgagctgcctgatgaacctgaccaccagcagcctcatctgccagtgggagcccggccctgagacccacctgcccaccagcttcaccctgaagagcttcaagagccggggcaactgccagacccagggcgacagcatcctggactgtgtgcccaaggatggccagagccactgctgcatccccaggaagcacctgctgctgtaccagaacatgggcatctgggtgcaggccgagaatgccctgggcacctccatgagcccccagctgtgcctggaccccatggatgtggtgaagctggagccccccatgctgcggaccatggaccccagccctgaggccgccccaccccaggccggctgcctgcagctgtgctgggagccctggcagcccggcctgcacatcaaccagaagtgtgagctgcggcacaagccccagagaggagaggcctcctgggccctggtgggccccctgcccctggaggccctgcagtatgagctgtgtggcctgctgcctgccacagcctacaccctgcagatccgctgcatccgctggcccctgcccggccactggagcgactggagccccagcctggagctgcggaccacagagcgggcccccaccgtgcggctggacacctggtggaggcagaggcagctggaccccaggacagtgcagctgttctggaagcctgtgcccctggaggaggacagcggccgcatccagggctacgtggtgtcctggaggcccagcggccaggccggggccatcctgcccctgtgcaacaccacagagctgagctgcaccttccacctgcccagcgaggcccaggaggtggccctggtggcctacaacagcgctggcaccagccggcccacccctgtggtgttttctgagagccggggccctgccctgacccggctgcacgccatggcccgggacccccacagcctgtgggtgggctgggagccccccaacccctggccccagggctacgtgattgagtggggcctgggccccccatctgccagcaacagcaacaagacctggaggatggagcagaatggccgggccaccggcttcctgctgaaggagaacatccggcccttccagctgtatgagatcatcgtgacccccctgtaccaggacaccatgggccccagccagcacgtgtatgcctacagccaggagatggcccccagccacgcccctgagctgcacctgaagcacatcggcaagacctgggcccagctggagtgggtgcctgagcccccagagctgggcaagagccccctgacccactacaccatcttctggaccaatgcccagaaccagagcttcagcgccatcctgaatgccagcagccggggctttgtgctgcacggcctggagcccgccagcctgtaccacatccacctgatggccgccagccaggccggggccaccaacagcacagtgctgaccctgatgaccctgaccccagctggccgcatccccagcggccaggtgtcccagacccagctgacagctgcctgggcccctggctgcccccagagctggaggaggatgcccagcagctgcccagccctggcccggcaccccagccccagcagccagtgctggaggaggatgaagaggagccgctgccccggcagccccatcacagcccagaggcctgtggccagccccctgtggagccggcccatgtgcagccggggcacccaggagcagttcccccccagccccaaccccagcctggccccagccatccgctccttcatgggcagctgctgggccgccccccaggcccagggccagggcaccatctctgctgtgacccccctgagccccagctggagggccagccccccagcccccagccccatgaggaccagcggcagcaggcctgccccctggggcccctggtag

SEQ ID NO: 148129 - DNA, 2511 bp, synthetic construct
  misc_feature 1..2511: note = Description of Artificial Sequence: Synthetic coding sequence
  source 1..2511: mol_type = other DNA
atggcccggctgggcaactgcagcctgacctgggccgccctgatcatcctgctgctgcccggcagcctggaggagtgtggccacatctctgtgtctgcccccatcgtgcacctgggggaccccatcacagccagctgcatcatcaagcagaactgcagccacctggaccctgagccccagatcctgtggaggctgggcgctgagctgcagcccggcggccggcagcagaggctgagtgatggcacccaggagagcatcatcaccctgccccacctgaaccacacccaggccttcctgagctgctgcctgaactggggcaacagcctgcagatcctggaccaggtggagctgcgggccggctaccccccagccatcccccacaacctgagctgcctgatgaacctgaccaccagcagcctcatctgccagtgggagcccggccctgagacccacctgcccaccagcttcaccctgaagagcttcaagagccggggcaactgccagacccagggcgacagcatcctggactgtgtgcccaaggatggccagagccactgctgcatccccaggaagcacctgctgctgtaccagaacatgggcatctgggtgcaggccgagaatgccctgggcacctccatgagcccccagctgtgcctggaccccatggatgtggtgaagctggagccccccatgctgcggaccatggaccccagccctgaggccgccccaccccaggccggctgcctgcagctgtgctgggagccctggcagcccggcctgcacatcaaccagaagtgtgagctgcggcacaagccccagagaggagaggcctcctgggccctggtgggccccctgcccctggaggccctgcagtatgagctgtgtggcctgctgcctgccacagcctacaccctgcagatccgctgcatccgctggcccctgcccggccactggagcgactggagccccagcctggagctgcggaccacagagcgggcccccaccgtgcggctggacacctggtggaggcagaggcagctggaccccaggacagtgcagctgttctggaagcctgtgcccctggaggaggacagcggccgcatccagggctacgtggtgtcctggaggcccagcggccaggccggggccatcctgcccctgtgcaacaccacagagctgagctgcaccttccacctgcccagcgaggcccaggaggtggccctggtggcctacaacagcgctggcaccagccggcccacccctgtggtgttttctgagagccggggccctgccctgacccggctgcacgccatggcccgggacccccacagcctgtgggtgggctgggagccccccaacccctggccccagggctacgtgattgagtggggcctgggccccccatctgccagcaacagcaacaagacctggaggatggagcagaatggccgggccaccggcttcctgctgaaggagaacatccggcccttccagctgtatgagatcatcgtgacccccctgtaccaggacaccatgggccccagccagcacgtgtatgcctacagccaggagatggcccccagccacgcccctgagctgcacctgaagcacatcggcaagacctgggcccagctggagtgggtgcctgagcccccagagctgggcaagagccccctgacccactacaccatcttctggaccaatgcccagaaccagagcttcagcgccatcctgaatgccagcagccggggctttgtgctgcacggcctggagcccgccagcctgtaccacatccacctgatggccgccagccaggccggggccaccaacagcacagtgctgaccctgatgaccctgaccccagagggcagcgagctgcacatcatcctgggcctgtttggcctgctgctgctgctgacctgcctgtgtggcacagcctggctgtgctgcagccccaacaggaagaaccccctgtggcccagcgtgcctgaccctgcccacagcagcctgggctcctgggtgcccaccatcatggaggaggatgccttccagctgcccggcctgggcaccccacccatcaccaagctgactgtgctggaggaggatgagaagaagcctgtgccctgggagagccacaacagcagcgagacctgtggcctgcccaccctggtgcagacctacgtgctgcagggcgaccccagggctgtgtccacccagccccagagccagagcggcaccagtgaccaggtgctgtatggccagctgctgggcagccccaccagccctggccctggccactacctgcgctgtgacagcacccagcccctgctggccggcctgacccccagccccaagagctatgagaacctgtggttccaggccagccccctgggcaccctggtgaccccagcccccagccaggaggatgactgtgtgtttggccccctgctgaacttccccctgctgcagggcatccgggtgcacggcatggaggccctgggcagcttctag

SEQ ID NO: 148130 - DNA, 2592 bp, synthetic construct
  misc_feature 1..2592: note = Description of Artificial Sequence: Synthetic coding sequence
  source 1..2592: mol_type = other DNA
atggcccggctgggcaactgcagcctgacctgggccgccctgatcatcctgctgctgcccggcagcctggaggagtgtggccacatctctgtgtctgcccccatcgtgcacctgggggaccccatcacagccagctgcatcatcaagcagaactgcagccacctggaccctgagccccagatcctgtggaggctgggcgctgagctgcagcccggcggccggcagcagaggctgagtgatggcacccaggagagcatcatcaccctgccccacctgaaccacacccaggccttcctgagctgctgcctgaactggggcaacagcctgcagatcctggaccaggtggagctgcgggccggctaccccccagccatcccccacaacctgagctgcctgatgaacctgaccaccagcagcctcatctgccagtgggagcccggccctgagacccacctgcccaccagcttcaccctgaagagcttcaagagccggggcaactgccagacccagggcgacagcatcctggactgtgtgcccaaggatggccagagccactgctgcatccccaggaagcacctgctgctgtaccagaacatgggcatctgggtgcaggccgagaatgccctgggcacctccatgagcccccagctgtgcctggaccccatggatgtggtgaagctggagccccccatgctgcggaccatggaccccagccctgaggccgccccaccccaggccggctgcctgcagctgtgctgggagccctggcagcccggcctgcacatcaaccagaagtgtgagctgcggcacaagccccagagaggagaggcctcctgggccctggtgggccccctgcccctggaggccctgcagtatgagctgtgtggcctgctgcctgccacagcctacaccctgcagatccgctgcatccgctggcccctgcccggccactggagcgactggagccccagcctggagctgcggaccacagagcgggcccccaccgtgcggctggacacctggtggaggcagaggcagctggaccccaggacagtgcagctgttctggaagcctgtgcccctggaggaggacagcggccgcatccagggctacgtggtgtcctggaggcccagcggccaggccggggccatcctgcccctgtgcaacaccacagagctgagctgcaccttccacctgcccagcgaggcccaggaggtggccctggtggcctacaacagcgctggcaccagccggcccacccctgtggtgttttctgagagccggggccctgccctgacccggctgcacgccatggcccgggacccccacagcctgtgggtgggctgggagccccccaacccctggccccagggctacgtgattgagtggggcctgggccccccatctgccagcaacagcaacaagacctggaggatggagcagaatggccgggccaccggcttcctgctgaaggagaacatccggcccttccagctgtatgagatcatcgtgacccccctgtaccaggacaccatgggccccagccagcacgtgtatgcctacagccaggagatggcccccagccacgcccctgagctgcacctgaagcacatcggcaagacctgggcccagctggagtgggtgcctgagcccccagagctgggcaagagccccctgacccactacaccatcttctggaccaatgcccagaaccagagcttcagcgccatcctgaatgccagcagccggggctttgtgctgcacggcctggagcccgccagcctgtaccacatccacctgatggccgccagccaggccggggccaccaacagcacagtgctgaccctgatgaccctgaccccagagggcagcgagctgcacatcatcctgggcctgtttggcctgctgctgctgctgacctgcctgtgtggcacagcctggctgtgctgcagccccaacaggaagaaccccctgtggcccagcgtgcctgaccctgcccacagcagcctgggctcctgggtgcccaccatcatggaggagctgcccggcccccggcagggccagtggctgggccagaccagcgagatgagccgggccctgaccccccacccctgtgtgcaggatgccttccagctgcccggcctgggcaccccacccatcaccaagctgactgtgctggaggaggatgagaagaagcctgtgccctgggagagccacaacagcagcgagacctgtggcctgcccaccctggtgcagacctacgtgctgcagggcgaccccagggctgtgtccacccagccccagagccagagcggcaccagtgaccaggtgctgtatggccagctgctgggcagccccaccagccctggccctggccactacctgcgctgtgacagcacccagcccctgctggccggcctgacccccagccccaagagctatgagaacctgtggttccaggccagccccctgggcaccctggtgaccccagcccccagccaggaggatgactgtgtgtttggccccctgctgaacttccccctgctgcagggcatccgggtgcacggcatggaggccctgggcagcttctag

SEQ ID NO: 148131 - DNA, 2352 bp, synthetic construct; identical to SEQ ID NO: 148127
  misc_feature 1..2352: note = Description of Artificial Sequence: Synthetic coding sequence
  source 1..2352: mol_type = other DNA

SEQ ID NO: 148132 - DNA, 2511 bp, synthetic construct; identical to SEQ ID NO: 148129
  misc_feature 1..2511: note = Description of Artificial Sequence: Synthetic coding sequence
  source 1..2511: mol_type = other DNA

SEQ ID NO: 148133 - DNA, 2511 bp, synthetic construct; identical to SEQ ID NO: 148129
  misc_feature 1..2511: note = Description of Artificial Sequence: Synthetic coding sequence
  source 1..2511: mol_type = other DNA

SEQ ID NO: 148134 - DNA, 2592 bp, synthetic construct; identical to SEQ ID NO: 148130
  misc_feature 1..2592: note = Description of Artificial Sequence: Synthetic coding sequence
  source 1..2592: mol_type = other DNA

SEQ ID NO: 148135 - DNA, 1167 bp, synthetic construct
  misc_feature 1..1167: note = Description of Artificial Sequence: Synthetic coding sequence
  source 1..1167: mol_type = other DNA
tgaaccagccggcccacccctgtggtgttttctgagagccggggccctgccctgacccggctgcacgccatggcccgggacccccacagcctgtgggtgggctgggagccccccaacccctggccccagggctacgtgattgagtggggcctgggccccccatctgccagcaacagcaacaagacctggaggatggagcagaatggccgggccaccggcttcctgctgaaggcccccagccacgcccctgagctgcacctgaagcacatcggcaagacctgggcccagctggagtgggtgcctgagcccccagagctgggcaagagccccctgacccactacaccatcttctggaccaatgcccagaaccagagcttcagcgccatcctgaatgccagcagccggggctttgtgctgcacggcctggagcccgccagcctgtaccacatccacctgatggccgccagccaggccggggccaccaacagcacagtgctgaccctgatgaccctgaccccagagggcagcgagctgcacatcatcctgggcctgtttggcctgctgctgctgctgacctgcctgtgtggcacagcctggctgtgctgcagccccaacaggaagaaccccctgtggcccagcgtgcctgaccctgcccacagcagcctgggctcctgggtgcccaccatcatggaggaggatgccttccagctgcccggcctgggcaccccacccatcaccaagctgactgtgctggaggaggatgagaagaagcctgtgccctgggagagccacaacagcagcgagacctgtggcctgcccaccctggtgcagacctacgtgctgcagggcgaccccagggctgtgtccacccagccccagagccagagcggcaccagtgaccaggtgctgtatggccagctgctgggcagccccaccagccctggccctggccactacctgcgctgtgacagcacccagcccctgctggccggcctgacccccagccccaagagctatgagaacctgtggttccaggccagccccctgggcaccctggtgaccccagcccccagccaggaggatgactgtgtgtttggccccctgctgaacttccccctgctgcagggcatccgggtgcacggcatggaggccctgggcagcttctag

SEQ ID NO: 148136 - DNA, 66 bp, synthetic construct
  misc_feature 1..66: note = Description of Artificial Sequence: Synthetic coding sequence
  source 1..66: mol_type = other DNA
atggcccggctgggcaactgcagcctgacctgggccgccctgatcatcctgctgctgcccggctag

SEQ ID NO: 148137 - DNA, 675 bp, synthetic construct
  misc_feature 1..675: note = Description of Artificial Sequence: Synthetic coding sequence
  source 1..675: mol_type = other DNA
atgtctgctgtgggcgccgccaccccctacctgcaccaccctggggacagccacagcggccgggtgtccttcctgggcgcccagctgcccccagaggtggccgccatggcccggctgctgggggacctggacaggagcaccttcaggaagctgctgaagtttgtggtgagcagcctgcagggcgaggactgccgggaggccgtgcagaggctgggcgtgtctgccaacctgcctgaggagcagctgggcgccctgctggccggcatgcacaccctgctgcagcaggccctgcggctgccccccaccagcctgaagccagacaccttccgggaccagctgcaggagctgtgcatcccccaggacctggtgggggacctggcctctgtggtgtttggcagccagaggcccctgctggacagcgtggcccagcagcagggcgcctggctgccccacgtggccgacttccgctggagggtggatgtggccatcagcaccagcgccctggcccggagcctgcagcccagcgtgctgatgcagctgaagctgagtgatggcagcgcctacagatttgaggtgcccacagccaagttccaggagctgcgctacagcgtggccctggtgctgaaggagatggctgacctggagaagagatgtgagcggcggctgcaggactag

SEQ ID NO: 148138 - DNA, 675 bp, synthetic construct; identical to SEQ ID NO: 148137
  misc_feature 1..675: note = Description of Artificial Sequence: Synthetic coding sequence
  source 1..675: mol_type = other DNA

SEQ ID NO: 148139 - DNA, 675 bp, synthetic construct; identical to SEQ ID NO: 148137
  misc_feature 1..675: note = Description of Artificial Sequence: Synthetic coding sequence
  source 1..675: mol_type = other DNA

SEQ ID NO: 148140 - DNA, 297 bp, synthetic construct
  misc_feature 1..297: note = Description of Artificial Sequence: Synthetic coding sequence
  source 1..297: mol_type = other DNA
atggaggccagcagcgagccccccctggatgccaagagtgatgtgaccaaccagctggtggacttccagtggaagctgggcatggctgtgtccagtgacacctgccgcagcctgaagtacccctacgtggccgtgatgctgaaggtggccgaccacagcggccaggtgaagaccaagtgctttgagatgaccatcccccagttccagccccagctgctggccaccagcagcctgctgagcgccagcaacttctaccggcagttcaaggagattgctgctgtgattgaaacagtgtag

SEQ ID NO: 148141 - DNA, 258 bp, synthetic construct
  misc_feature 1..258: note = Description of Artificial Sequence: Synthetic coding sequence
  source 1..258: mol_type = other DNA
atggaggccagcagcgagccccccctggatgccaagagtgatgtgaccaaccagctggtggacttccagtggaagctgggcatggctgtgtccagtgacacctgccgcagcctgaagtacccctacgtggccgtgatgctgaaggtggccgaccacagcggccaggtgaagaccaagtgctttgagatgaccatcccccagttccagaacttctaccggcagttcaaggagattgctgctgtgattgagaccgtgtag

SEQ ID NO: 148142 - DNA, 258 bp, synthetic construct; identical to SEQ ID NO: 148141
  misc_feature 1..258: note = Description of Artificial Sequence: Synthetic coding sequence
  source 1..258: mol_type = other DNA

SEQ ID NO: 148143 - DNA, 7470 bp, synthetic construct
  misc_feature 1..7470: note = Description of Artificial Sequence: Synthetic coding sequence
  source 1..7470: mol_type = other DNA
atgggcgccagcagccccaggagccctgagcctgtgggccccccagcccctggcctgcccttctgctgcggcggcagcctgctggccgtggtggtgctgctggccctgcctgtggcctggggccagtgcaatgcccctgagtggctgccctttgcccggcccaccaacctgacagatgaatttgagttccccatcggcacctacctgaactatgagtgcaggcctggctacagcggccggcccttcagcatcatctgcctgaagaacagcgtgtggacaggagccaaggaccgctgcaggaggaagagctgcagaaatcctccagaccctgtgaatggcatggtgcacgtgatcaagggcatccagtttggcagccagatcaagtacagctgcaccaagggctaccgcctcatcggcagcagcagcgccacctgcatcatcagcggggacaccgtcatctgggacaatgagacccccatctgtgaccgcatcccctgtggcctgccccccaccatcaccaacggggacttcatcagcaccaaccgggagaacttccactacggctctgtggtgacctaccgctgcaaccctggcagcggcggcaggaaggtgtttgagctggtgggggagcccagcatctactgcaccagcaatgatgaccaggtgggcatctggagcggccctgccccccagtgcatcatccccaacaagtgcaccccacccaacgtggagaatggcatcctggtgtctgacaacagaagcctcttcagcctgaatgaggtggtggagttccgctgccagcccggctttgtgatgaagggcccccggcgggtgaagtgccaggccctgaacaagtgggagcctgagctgcccagctgcagccgggtgtgccagcccccaccagatgtgctgcacgccgagaggacccagagggacaaggacaacttcagccctggccaggaggtgttctacagctgtgagcccggctatgacctgcggggagctgcctccatgcgctgcaccccccagggcgactggagccctgctgcccccacctgtgaggtgaagagctgtgatgacttcatgggccagctgctgaatggccgggtgctcttccctgtgaacctgcagctgggcgccaaggtggactttgtgtgtgatgagggcttccagctgaagggcagcagcgccagctactgtgtgctggccggcatggagagcctgtggaacagctctgtgcctgtgtgtgagcagatcttctgccccagcccccctgtgatccccaacggccgccacacaggcaagcccctggaggtgttcccctttgggaagacagtgaactacacctgtgacccccacccagaccggggcaccagctttgacctgattggagagagcaccatccgctgcaccagtgacccccagggcaatggagtgtggagcagccctgccccccgctgtggcatcctgggccactgccaggccccagaccacttcctgtttgccaagctgaagacccagaccaatgccagtgacttccccatcggcaccagcctgaagtatgagtgcaggcctgagtactacggccggcccttcagcatcacctgcctggacaacctggtgtggagcagccccaaggatgtgtgcaagaggaagagctgcaagaccccaccagaccctgtgaatggcatggtgcacgtgatcacagacatccaggtgggcagccgcatcaactacagctgcaccaccggccacaggctcatcggccacagcagcgctgagtgcatcctgtctggaaatgctgcccactggagcaccaagccacccatctgccagaggatcccctgtggcctgccccccaccatcgccaacggggacttcatcagcaccaaccgggagaacttccactacggctctgtggtgacctaccgctgcaaccctggcagcggcggcaggaaggtgtttgagctggtgggggagcccagcatctactgcaccagcaatgatgaccaggtgggcatctggagcggccctgccccccagtgcatcatccccaacaagtgcaccccacccaacgtggagaatggcatcctggtgtctgacaacagaagcctcttcagcctgaatgaggtggtggagttccgctgccagcccggctttgtgatgaagggcccccggcgggtgaagtgccaggccctgaacaagtgggagcctgagctgcccagctgcagccgggtgtgccagcccccaccagatgtgctgcacgccgagaggacccagagggacaaggacaacttcagccctggccaggaggtgttctacagctgtgagcccggctatgacctgcggggagctgcctccatgcgctgcaccccccagggcgactggagccctgctgcccccacctgtgaggtgaagagctgtgatgacttcatgggccagctgctgaatggccgggtgctcttccctgtgaacctgcagctgggcgccaaggtggactttgtgtgtgatgagggcttccagctgaagggcagcagcgccagctactgtgtgctggccggcatggagagcctgtggaacagctctgtgcctgtgtgtgagcagatcttctgccccagcccccctgtgatccccaacggccgccacacaggcaagcccctggaggtgttcccctttgggaagacagtgaactacacctgtgacccccacccagaccggggcaccagctttgacctgattggagagagcaccatccgctgcaccagtgacccccagggcaatggagtgtggagcagccctgccccccgctgtggcatcctgggccactgccaggccccagaccacttcctgtttgccaagctgaagacccagaccaatgccagtgacttccccatcggcaccagcctgaagtatgagtgcaggcctgagtactacggccggcccttcagcatcacctgcctggacaacctggtgtggagcagccccaaggatgtgtgcaagaggaagagctgcaagaccccaccagaccctgtgaatggcatggtgcacgtgatcacagacatccaggtgggcagccgcatcaactacagctgcaccaccggccacaggctcatcggccacagcagcgctgagtgcatcctgtctggaaatgctgcccactggagcaccaagccacccatctgccagaggatcccctgtggcctgccccccaccatcgccaacggggacttcatcagcaccaaccgggagaacttccactacggctctgtggtgacctaccgctgcaaccctggcagcggcggcaggaaggtgtttgagctggtgggggagcccagcatctactgcaccagcaatgatgaccaggtgggcatctggagcggccctgccccccagtgcatcatccccaacaagtgcaccccacccaacgtggagaatggcatcctggtgtctgacaacagaagcctcttcagcctgaatgaggtggtggagttccgctgccagcccggctttgtgatgaagggcccccggcgggtgaagtgccaggccctgaacaagtgggagcctgagctgcccagctgcagccgggtgtgccagcccccaccagatgtgctgcacgccgagaggacccagagggacaaggacaacttcagccctggccaggaggtgttctacagctgtgagcccggctatgacctgcggggagctgcctccatgcgctgcaccccccagggcgactggagccctgctgcccccacctgtgaggtgaagagctgtgatgacttcatgggccagctgctgaatggccgggtgctcttccctgtgaacctgcagctgggcgccaaggtggactttgtgtgtgatgagggcttccagctgaagggcagcagcgccagctactgtgtgctggccggcatggagagcctgtggaacagctctgtgcctgtgtgtgagcagatcttctgccccagcccccctgtgatccccaacggccgccacacaggcaagcccctggaggtgttcccctttgggaaggctgtgaactacacctgtgacccccacccagaccggggcaccagctttgacctgattggagagagcaccatccgctgcaccagtgacccccagggcaatggagtgtggagcagccctgccccccgctgtggcatcctgggccactgccaggccccagaccacttcctgtttgccaagctgaagacccagaccaatgccagtgacttccccatcggcaccagcctgaagtatgagtgcaggcctgagtactacggccggcccttcagcatcacctgcctggacaacctggtgtggagcagccccaaggatgtgtgcaagaggaagagctgcaagaccccaccagaccctgtgaatggcatggtgcacgtgatcacagacatccaggtgggcagccgcatcaactacagctgcaccaccggccacaggctcatcggccacagcagcgctgagtgcatcctgagcggcaacacagcccactggagcaccaagccacccatctgccagaggatcccctgtggcctgccccccaccatcgccaacggggacttcatcagcaccaaccgggagaacttccactacggctctgtggtgacctaccgctgcaacctgggcagccggggcaggaaggtgtttgagctggtgggggagcccagcatctactgcaccagcaatgatgaccaggtgggcatctggagcggccctgccccccagtgcatcatccccaacaagtgcaccccacccaacgtggagaatggcatcctggtgtctgacaacagaagcctcttcagcctgaatgaggtggtggagttccgctgccagcccggctttgtgatgaagggcccccggcgggtgaagtgccaggccctgaacaagtgggagcctgagctgcccagctgcagccgggtgtgccagcccccacctgagatcctgcatggagagcacacccccagccaccaggacaacttcagccctggccaggaggtgttctacagctgtgagcccggctatgacctgcggggagctgccagcctgcactgcaccccccagggcgactggagccctgaggccccccgctgtgctgtgaagagctgtgatgacttcctgggccagctgccccacggccgggtgctcttccccctgaacctgcagctgggcgccaaggtgtcctttgtgtgtgatgagggcttccggctgaagggcagctctgtgagccactgtgtgctggtgggcatgaggagcctgtggaacaacagcgtgcctgtgtgtgagcacatcttctgccccaaccccccagccatcctgaatggccgccacacaggcaccccatctggggacatcccctacggcaaggagatctcctacacctgtgacccccacccagaccggggcatgaccttcaacctgattggagagagcaccatccgctgcaccagtgacccccatggaaatggagtgtggagcagccctgccccccgctgtgagctgtctgtgcgggccggccactgcaagaccccagagcagttcccctttgccagccccaccatccccatcaatgactttgagttccctgtgggcaccagcctgaactatgaatgtcggcccggctactttgggaagatgttcagcatcagctgcctggagaacctggtgtggagctctgtggaggacaactgcaggaggaagagctgtggccccccacctgagcccttcaacggcatggtgcacatcaacacagacacccagtttggcagcacagtgaactacagctgcaatgaaggcttccggctgattggcagccccagcaccacctgcctggtgtctggcaacaacgtgacctgggacaagaaggcccccatctgtgagatcatcagctgtgagcccccacccaccatcagcaatggagacttctacagcaacaacagaaccagcttccacaacggcaccgtggtgacctaccagtgccacacaggcccagatggagagcagctgtttgagctggtgggggagaggagcatctactgcaccagcaaggatgaccaggtgggcgtgtggagcagccccccaccccgctgcatcagcaccaacaagtgcacagcccctgaggtggagaatgccatccgggtgcccggcaacagaagcttcttcaccctgacagagatcatccgcttccgctgccagcccggctttgtgatggtgggcagccacacagtgcagtgccagaccaacggccgctggggccccaagctgccccactgcagccgggtgtgccagcccccacctgagatcctgcacggggagcacaccctgagccaccaggacaacttcagccctggccaggaggtgttctacagctgtgagcccagctatgacctgcggggggccgccagcctgcactgcaccccccagggcgactggagccctgaggccccccgctgcaccgtgaagagctgtgatgacttcctgggccagctgccccacggccgggtgctgctgcccctgaacctgcagctgggcgccaaggtgtcctttgtgtgtgatgagggcttccggctgaagggccgcagcgccagccactgtgtgctggccggcatgaaggccctgtggaacagctctgtgcctgtgtgtgagcagatcttctgccccaaccccccagccatcctgaatggccgccacacaggcaccccatttggagacatcccctacggcaaggagatctcctatgcctgtgacacccacccagaccggggcatgaccttcaacctgattggagagagcagcatccgctgcaccagtgacccccagggcaatggagtgtggagcagccctgccccccgctgtgagctgtctgtgcctgctgcctgcccccacccccccaagatccagaatggccactacatcggcggccacgtgtccctgtacctgcccggcatgaccatctcctacatctgtgaccccggctacctgctggtgggcaagggcttcatcttctgcacagaccagggcatctggagccagctggaccactactgcaaggaggtgaactgcagcttccccctcttcatgaatggcatcagcaaggagctggagatgaagaaggtgtaccactacggggactatgtgaccctgaagtgtgaagatggctacaccctggagggcagcccctggagccagtgccaggctgatgaccgctgggacccccccctggccaagtgcaccagcaggacccatgatgccctgattgtgggcaccctgagcggcaccatcttcttcatcctgctgatcatcttcctgtcctggatcatcctgaagcacaggaagggcaacaatgcccacgagaaccccaaggaggtggccatccacctgcacagccagggcggcagctctgtgcaccccaggaccctgcagaccaatgaggagaacagccgggtgctgccctag

SEQ ID NO: 148144 - DNA, 6120 bp, synthetic construct
  misc_feature 1..6120: note = Description of Artificial Sequence: Synthetic coding sequence
  source 1..6120: mol_type = other DNA
atgggcgccagcagccccaggagccctgagcctgtgggccccccagcccctggcctgcccttctgctgcggcggcagcctgctggccgtggtggtgctgctggccctgcctgtggcctggggccagtgcaatgcccctgagtggctgccctttgcccggcccaccaacctgacagatgaatttgagttccccatcggcacctacctgaactatgagtgcaggcctggctacagcggccggcccttcagcatcatctgcctgaagaacagcgtgtggacaggagccaaggaccgctgcaggaggaagagctgcagaaatcctccagaccctgtgaatggcatggtgcacgtgatcaagggcatccagtttggcagccagatcaagtacagctgcaccaagggctaccgcctcatcggcagcagcagcgccacctgcatcatcagcggggacaccgtcatctgggacaatgagacccccatctgtgaccgcatcccctgtggcctgccccccaccatcgccaacggggacttcatcagcaccaaccgggagaacttccactacggctctgtggtgacctaccgctgcaaccctggcagcggcggcaggaaggtgtttgagctggtgggggagcccagcatctactgcaccagcaatgatgaccaggtgggcatctggagcggccctgccccccagtgcatcatccccaacaagtgcaccccacccaacgtggagaatggcatcctggtgtctgacaacagaagcctcttcagcctgaatgaggtggtggagttccgctgccagcccggctttgtgatgaagggcccccggcgggtgaagtgccaggccctgaacaagtgggagcctgagctgcccagctgcagccgggtgtgccagcccccaccagatgtgctgcacgccgagaggacccagagggacaaggacaacttcagccctggccaggaggtgttctacagctgtgagcccggctatgacctgcggggagctgcctccatgcgctgcaccccccagggcgactggagccctgctgcccccacctgtgaggtgaagagctgtgatgacttcatgggccagctgctgaatggccgggtgctcttccctgtgaacctgcagctgggcgccaaggtggactttgtgtgtgatgagggcttccagctgaagggcagcagcgccagctactgtgtgctggccggcatggagagcctgtggaacagctctgtgcctgtgtgtgagcagatcttctgccccagcccccctgtgatccccaacggccgccacacaggcaagcccctggaggtgttcccctttgggaagacagtgaactacacctgtgacccccacccagaccggggcaccagctttgacctgattggagagagcaccatccgctgcaccagtgacccccagggcaatggagtgtggagcagccctgccccccgctgtggcatcctgggccactgccaggccccagaccacttcctgtttgccaagctgaagacccagaccaatgccagtgacttccccatcggcaccagcctgaagtatgagtgcaggcctgagtactacggccggcccttcagcatcacctgcctggacaacctggtgtggagcagccccaaggatgtgtgcaagaggaagagctgcaagaccccaccagaccctgtgaatggcatggtgcacgtgatcacagacatccaggtgggcagccgcatcaactacagctgcaccaccggccacaggctcatcggccacagcagcgctgagtgcatcctgtctggaaatgctgcccactggagcaccaagccacccatctgccagaggatcccctgtggcctgccccccaccatcgccaacggggacttcatcagcaccaaccgggagaacttccactacggctctgtggtgacctaccgctgcaaccctggcagcggcggcaggaaggtgtttgagctggtgggggagcccagcatctactgcaccagcaatgatgaccaggtgggcatctggagcggccctgccccccagtgcatcatccccaacaagtgcaccccacccaacgtggagaatggcatcctggtgtctgacaacagaagcctcttcagcctgaatgaggtggtggagttccgctgccagcccggctttgtgatgaagggcccccggcgggtgaagtgccaggccctgaacaagtgggagcctgagctgcccagctgcagccgggtgtgccagcccccaccagatgtgctgcacgccgagaggacccagagggacaaggacaacttcagccctggccaggaggtgttctacagctgtgagcccggctatgacctgcggggagctgcctccatgcgctgcaccccccagggcgactggagccctgctgcccccacctgtgaggtgaagagctgtgatgacttcatgggccagctgctgaatggccgggtgctcttccctgtgaacctgcagctgggcgccaaggtggactttgtgtgtgatgagggcttccagctgaagggcagcagcgccagctactgtgtgctggccggcatggagagcctgtggaacagctctgtgcctgtgtgtgagcagatcttctgccccagcccccctgtgatccccaacggccgccacacaggcaagcccctggaggtgttcccctttgggaaggctgtgaactacacctgtgacccccacccagaccggggcaccagctttgacctgattggagagagcaccatccgctgcaccagtgacccccagggcaatggagtgtggagcagccctgccccccgctgtggcatcctgggccactgccaggccccagaccacttcctgtttgccaagctgaagacccagaccaatgccagtgacttccccatcggcaccagcctgaagtatgagtgcaggcctgagtactacggccggcccttcagcatcacctgcctggacaacctggtgtggagcagccccaaggatgtgtgcaagaggaagagctgcaagaccccaccagaccctgtgaatggcatggtgcacgtgatcacagacatccaggtgggcagccgcatcaactacagctgcaccaccggccacaggctcatcggccacagcagcgctgagtgcatcctgagcggcaacacagcccactggagcaccaagccacccatctgccagaggatcccctgtggcctgccccccaccatcgccaacggggacttcatcagcaccaaccgggagaacttccactacggctctgtggtgacctaccgctgcaacctgggcagccggggcaggaaggtgtttgagctggtgggggagcccagcatctactgcaccagcaatgatgaccaggtgggcatctggagcggccctgccccccagtgcatcatccccaacaagtgcaccccacccaacgtggagaatggcatcctggtgtctgacaacagaagcctcttcagcctgaatgaggtggtggagttccgctgccagcccggctttgtgatgaagggcccccggcgggtgaagtgccaggccctgaacaagtgggagcctgagctgcccagctgcagccgggtgtgccagcccccacctgagatcctgcatggagagcacacccccagccaccaggacaacttcagccctggccaggaggtgttctacagctgtgagcccggctatgacctgcggggagctgccagcctgcactgcaccccccagggcgactggagccctgaggccccccgctgtgctgtgaagagctgtgatgacttcctgggccagctgccccacggccgggtgctcttccccctgaacctgcagctgggcgccaaggtgtcctttgtgtgtgatgagggcttccggctgaagggcagctctgtgagccactgtgtgctggtgggcatgaggagcctgtggaacaacagcgtgcctgtgtgtgagcacatcttctgccccaaccccccagccatcctgaatggccgccacacaggcaccccatctggggacatcccctacggcaaggagatctcctacacctgtgacccccacccagaccggggcatgaccttcaacctgattggagagagcaccatccgctgcaccagtgacccccatggaaatggagtgtggagcagccctgccccccgctgtgagctgtctgtgcgggccggccactgcaagaccccagagcagttcccctttgccagccccaccatccccatcaatgactttgagttccctgtgggcaccagcctgaactatgaatgtcggcccggctactttgggaagatgttcagcatcagctgcctggagaacctggtgtggagctctgtggaggacaactgcaggaggaagagctgtggccccccacctgagcccttcaacggcatggtgcacatcaacacagacacccagtttggcagcacagtgaactacagctgcaatgaaggcttccggctgattggcagccccagcaccacctgcctggtgtctggcaacaacgtgacctgggacaagaaggcccccatctgtgagatcatcagctgtgagcccccacccaccatcagcaatggagacttctacagcaacaacagaaccagcttccacaacggcaccgtggtgacctaccagtgccacacaggcccagatggagagcagctgtttgagctggtgggggagaggagcatctactgcaccagcaaggatgaccaggtgggcgtgtggagcagccccccaccccgctgcatcagcaccaacaagtgcacagcccctgaggtggagaatgccatccgggtgcccggcaacagaagcttcttcaccctgacagagatcatccgcttccgctgccagcccggctttgtgatggtgggcagccacacagtgcagtgccagaccaacggccgctggggccccaagctgccccactgcagccgggtgtgccagcccccacctgagatcctgcacggggagcacaccctgagccaccaggacaacttcagccctggccaggaggtgttctacagctgtgagcccagctatgacctgcggggggccgccagcctgcactgcaccccccagggcgactggagccctgaggccccccgctgcaccgtgaagagctgtgatgacttcctgggccagctgccccacggccgggtgctgctgcccctgaacctgcagctgggcgccaaggtgtcctttgtgtgtgatgagggcttccggctgaagggccgcagcgccagccactgtgtgctggccggcatgaaggccctgtggaacagctctgtgcctgtgtgtgagcagatcttctgccccaaccccccagccatcctgaatggccgccacacaggcaccccatttggagacatcccctacggcaaggagatctcctatgcctgtgacacccacccagaccggggcatgaccttcaacctgattggagagagcagcatccgctgcaccagtgacccccagggcaatggagtgtggagcagccctgccccccgctgtgagctgtctgtgcctgctgcctgcccccacccccccaagatccagaatggccactacatcggcggccacgtgtccctgtacctgcccggcatgaccatctcctacatctgtgaccccggctacctgctggtgggcaagggcttcatcttctgcacagaccagggcatctggagccagctggaccactactgcaaggaggtgaactgcagcttccccctcttcatgaatggcatcagcaaggagctggagatgaagaaggtgtaccactacggggactatgtgaccctgaagtgtgaagatggctacaccctggagggcagcccctggagccagtgccaggctgatgaccgctgggacccccccctggccaagtgcaccagcaggacccatgatgccctgattgtgggcaccctgagcggcaccatcttcttcatcctgctgatcatcttcctgtcctggatcatcctgaagcacaggaagggcaacaatgcccacgagaaccccaaggaggtggccatccacctgcacagccagggcggcagctctgtgcaccccaggaccctgcagaccaatgaggagaacagccgggtgctgccctag

SEQ ID NO: 148145 - DNA, 6120 bp, synthetic construct
  misc_feature 1..6120: note = Description of Artificial Sequence: Synthetic coding sequence
  source 1..6120: mol_type = other DNA
atgggcgccagcagccccaggagccctgagcctgtgggccccccagcccctggcctgcccttctgctgcggcggcagcctgctggccgtggtggtgctgctggccctgcctgtggcctggggccagtgcaatgcccctgagtggctgccctttgcccggcccaccaacctgacagatgaatttgagttccccatcggcacctacctgaactatgagtgcaggcctggctacagcggccggcccttcagcatcatctgcctgaagaacagcgtgtggacaggagccaaggaccgctgcaggaggaagagctgcagaaatcctccagaccctgtgaatggcatggtgcacgtgatcaagggcatccagtttggcagccagatcaagtacagctgcaccaagggctaccgcctcatcggcagcagcagcgccacctgcatcatcagcggggacaccgtcatctgggacaatgagacccccatctgtgaccgcatcccctgtggcctgccccccaccatcaccaacggggacttcatcagcaccaaccgggagaacttccactacggctctgtggtgacctaccgctgcaaccctggcagcggcggcaggaaggtgtttgagctggtgggggagcccagcatctactgcaccagcaatgatgaccaggtgggcatctggagcggccctgccccccagtgcatcatccccaacaagtgcaccccacccaacgtggagaatggcatcctggtgtctgacaacagaagcctcttcagcctgaatgaggtggtggagttccgctgccagcccggctttgtgatgaagggcccccggcgggtgaagtgccaggccctgaacaagtgggagcctgagctgcccagctgcagccgggtgtgccagcccccaccagatgtgctgcacgccgagaggacccagagggacaaggacaacttcagccctggccaggaggtgttctacagctgtgagcccggctatgacctgcggggagctgcctccatgcgctgcaccccccagggcgactggagccctgctgcccccacctgtgaggtgaagagctgtgatgacttcatgggccagctgctgaatggccgggtgctcttccctgtgaacctgcagctgggcgccaaggtggactttgtgtgtgatgagggcttccagctgaagggcagcagcgccagctactgtgtgctggccggcatggagagcctgtggaacagctctgtgcctgtgtgtgagcagatcttctgccccagcccccctgtgatccccaacggccgccacacaggcaagcccctggaggtgttcccctttgggaagacagtgaactacacctgtgacccccacccagaccggggcaccagctttgacctgattggagagagcaccatccgctgcaccagtgacccccagggcaatggagtgtggagcagccctgccccccgctgtggcatcctgggccactgccaggccccagaccacttcctgtttgccaagctgaagacccagaccaatgccagtgacttccccatcggcaccagcctgaagtatgagtgcaggcctgagtactacggccggcccttcagcatcacctgcctggacaacctggtgtggagcagccccaaggatgtgtgcaagaggaagagctgcaagaccccaccagaccctgtgaatggcatggtgcacgtgatcacagacatccaggtgggcagccgcatcaactacagctgcaccaccggccacaggctcatcggccacagcagcgctgagtgcatcctgtctggaaatgctgcccactggagcaccaagccacccatctgccagaggatcccctgtggcctgccccccaccatcgccaacggggacttcatcagcaccaaccgggagaacttccactacggctctgtggtgacctaccgctgcaaccctggcagcggcggcaggaaggtgtttgagctggtgggggagcccagcatctactgcaccagcaatgatgaccaggtgggcatctggagcggccctgccccccagtgcatcatccccaacaagtgcaccccacccaacgtggagaatggcatcctggtgtctgacaacagaagcctcttcagcctgaatgaggtggtggagttccgctgccagcccggctttgtgatgaagggcccccggcgggtgaagtgccaggccctgaacaagtgggagcctgagctgcccagctgcagccgggtgtgccagcccccaccagatgtgctgcacgccgagaggacccagagggacaaggacaacttcagccctggccaggaggtgttctacagctgtgagcccggctatgacctgcggggagctgcctccatgcgctgcaccccccagggcgactggagccctgctgcccccacctgtgaggtgaagagctgtgatgacttcatgggccagctgctgaatggccgggtgctcttccctgtgaacctgcagctgggcgccaaggtggactttgtgtgtgatgagggcttccagctgaagggcagcagcgccagctactgtgtgctggccggcatggagagcctgtggaacagctctgtgcctgtgtgtgagcagatcttctgccccagcccccctgtgatccccaacggccgccacacaggcaagcccctggaggtgttcccctttgggaagacagtgaactacacctgtgacccccacccagaccggggcaccagctttgacctgattggagagagcaccatccgctgcaccagtgacccccagggcaatggagtgtggagcagccctgccccccgctgtggcatcctgggccactgccaggccccagaccacttcctgtttgccaagctgaagacccagaccaatgccagtgacttccccatcggcaccagcctgaagtatgagtgcaggcctgagtactacggccggcccttcagcatcacctgcctggacaacctggtgtggagcagccccaaggatgtgtgcaagaggaagagctgcaagaccccaccagaccctgtgaatggcatggtgcacgtgatcacagacatccaggtgggcagccgcatcaactacagctgcaccaccggccacaggctcatcggccacagcagcgctgagtgcatcctgagcggcaacacagcccactggagcaccaagccacccatctgccagaggatcccctgtggcctgccccccaccatcgccaacggggacttcatcagcaccaaccgggagaacttccactacggctctgtggtgacctaccgctgcaacctgggcagccggggcaggaaggtgtttgagctggtgggggagcccagcatctactgcaccagcaatgatgaccaggtgggcatctggagcggccctgccccccagtgcatcatccccaacaagtgcaccccacccaacgtggagaatggcatcctggtgtctgacaacagaagcctcttcagcctgaatgaggtggtggagttccgctgccagcccggctttgtgatgaagggcccccggcgggtgaagtgccaggccctgaacaagtgggagcctgagctgcccagctgcagccgggtgtgccagcccccacctgagatcctgcatggagagcacacccccagccaccaggacaacttcagccctggccaggaggtgttctacagctgtgagcccggctatgacctgcggggagctgccagcctgcactgcaccccccagggcgactggagccctgaggccccccgctgtgctgtgaagagctgtgatgacttcctgggccagctgccccacggccgggtgctcttccccctgaacctgcagctgggcgccaaggtgtcctttgtgtgtgatgagggcttccggctgaagggcagctctgtgagccactgtgtgctggtgggcatgaggagcctgtggaacaacagcgtgcctgtgtgtgagcacatcttctgccccaaccccccagccatcctgaatggccgccacacaggcaccccatctggggacatcccctacggcaaggagatctcctacacctgtgacccccacccagaccggggcatgaccttcaacctgattggagagagcaccatccgctgcaccagtgacccccatggaaatggagtgtggagcagccctgccccccgctgtgagctgtctgtgcgggccggccactgcaagaccccagagcagttcccctttgccagccccaccatccccatcaatgactttgagttccctgtgggcaccagcctgaactatgaatgtcggcccggctactttgggaagatgttcagcatcagctgcctggagaacctggtgtggagctctgtggaggacaactgcaggaggaagagctgtggccccccacctgagcccttcaacggcatggtgcacatcaacacagacacccagtttggcagcacagtgaactacagctgcaatgaaggcttccggctgattggcagccccagcaccacctgcctggtgtctggcaacaacgtgacctgggacaagaaggcccccatctgtgagatcatcagctgtgagcccccacccaccatcagcaatggagacttctacagcaacaacagaaccagcttccacaacggcaccgtggtgacctaccagtgccacacaggcccagatggagagcagctgtttgagctggtgggggagaggagcatctactgcaccagcaaggatgaccaggtgggcgtgtggagcagccccccaccccgctgcatcagcaccaacaagtgcacagcccctgaggtggagaatgccatccgggtgcccggcaacagaagcttcttcaccctgacagagatcatccgcttccgctgccagcccggctttgtgatggtgggcagccacacagtgcagtgccagaccaacggccgctggggccccaagctgccccactgcagccgggtgtgccagcccccacctgagatcctgcacggggagcacaccctgagccaccaggacaacttcagccctggccaggaggtgttctacagctgtgagcccagctatgacctgcggggggccgccagcctgcactgcaccccccagggcgactggagccctgaggccccccgctgcaccgtgaagagctgtgatgacttcctgggccagctgccccacggccgggtgctgctgcccctgaacctgcagctgggcgccaaggtgtcctttgtgtgtgatgagggcttccggctgaagggccgcagcgccagccactgtgtgctggccggcatgaaggccctgtggaacagctctgtgcctgtgtgtgagcagatcttctgccccaaccccccagccatcctgaatggccgccacacaggcaccccatttggagacatcccctacggcaaggagatctcctatgcctgtgacacccacccagaccggggcatgaccttcaacctgattggagagagcagcatccgctgcaccagtgacccccagggcaatggagtgtggagcagccctgccccccgctgtgagctgtctgtgcctgctgcctgcccccacccccccaagatccagaatggccactacatcggcggccacgtgtccctgtacctgcccggcatgaccatctcctacatctgtgaccccggctacctgctggtgggcaagggcttcatcttctgcacagaccagggcatctggagccagctggaccactactgcaaggaggtgaactgcagcttccccctcttcatgaatggcatcagcaaggagctggagatgaagaaggtgtaccactacggggactatgtgaccctgaagtgtgaagatggctacaccctggagggcagcccctggagccagtgccaggctgatgaccgctgggacccccccctggccaagtgcaccagcaggacccatgatgccctgattgtgggcaccctgagcggcaccatcttcttcatcctgctgatcatcttcctgtcctggatcatcctgaagcacaggaagggcaacaatgcccacgagaaccccaaggaggtggccatccacctgcacagccagggcggcagctctgtgcaccccaggaccctgcagaccaatgaggagaacagccgggtgctgccctag

SEQ ID NO: 148146 - DNA, 6120 bp, synthetic construct
  misc_feature 1..6120: note = Description of Artificial Sequence: Synthetic coding sequence
  source 1..6120: mol_type = other DNA
atgggcgccagcagccccaggagccctgagcctgtgggccccccagcccctggcctgcccttctgctgcggcggcagcctgctggccgtggtggtgctgctggccctgcctgtggcctggggccagtgcaatgcccctgagtggctgccctttgcccggcccaccaacctgacagatgaatttgagttccccatcggcacctacctgaactatgagtgcaggcctggctacagcggccggcccttcagcatcatctgcctgaagaacagcgtgtggacaggagccaaggaccgctgcaggaggaagagctgcagaaatcctccagaccctgtgaatggcatggtgcacgtgatcaagggcatccagtttggcagccagatcaagtacagctgcaccaagggctaccgcctcatcggcagcagcagcgccacctgcatcatcagcggggacaccgtcatctgggacaatgagacccccatctgtgaccgcatcccctgtggcctgccccccaccatcaccaacggggacttcatcagcaccaaccgggagaacttccactacggctctgtggtgacctaccgctgcaaccctggcagcggcggcaggaaggtgtttgagctggtgggggagcccagcatctactgcaccagcaatgatgaccaggtgggcatctggagcggccctgccccccagtgcatcatccccaacaagtgcaccccacccaacgtggagaatggcatcctggtgtctgacaacagaagcctcttcagcctgaatgaggtggtggagttccgctgccagcccggctttgtgatgaagggcccccggcgggtgaagtgccaggccctgaacaagtgggagcctgagctgcccagctgcagccgggtgtgccagcccccaccagatgtgctgcacgccgagaggacccagagggacaaggacaacttcagccctggccaggaggtgttctacagctgtgagcccggctatgacctgcggggagctgcctccatgcgctgcaccccccagggcgactggagccctgctgcccccacctgtgaggtgaagagctgtgatgacttcatgggccagctgctgaatggccgggtgctcttccctgtgaacctgcagctgggcgccaaggtggactttgtgtgtgatgagggcttccagctgaagggcagcagcgccagctactgtgtgctggccggcatggagagcctgtggaacagctctgtgcctgtgtgtgagcagatcttctgccccagcccccctgtgatccccaacggccgccacacaggcaagcccctggaggtgttcccctttgggaagacagtgaactacacctgtgacccccacccagaccggggcaccagctttgacctgattggagagagcaccatccgctgcaccagtgacccccagggcaatggagtgtggagcagccctgccccccgctgtggcatcctgggccactgccaggccccagaccacttcctgtttgccaagctgaagacccagaccaatgccagtgacttccccatcggcaccagcctgaagtatgagtgcaggcctgagtactacggccggcccttcagcatcacctgcctggacaacctggtgtggagcagccccaaggatgtgtgcaagaggaagagctgcaagaccccaccagaccctgtgaatggcatggtgcacgtgatcacagacatccaggtgggcagccgcatcaactacagctgcaccaccggccacaggctcatcggccacagcagcgctgagtgcatcctgtctggaaatgctgcccactggagcaccaagccacccatctgccagaggatcccctgtggcctgccccccaccatcgccaacggggacttcatcagcaccaaccgggagaacttccactacggctctgtggtgacctaccgctgcaaccctggcagcggcggcaggaaggtgtttgagctggtgggggagcccagcatctactgcaccagcaatgatgaccaggtgggcatctggagcggccctgccccccagtgcatcatccccaacaagtgcaccccacccaacgtggagaatggcatcctggtgtctgacaacagaagcctcttcagcctgaatgaggtggtggagttccgctgccagcccggctttgtgatgaagggcccccggcgggtgaagtgccaggccctgaacaagtgggagcctgagctgcccagctgcagccgggtgtgccagcccccaccagatgtgctgcacgccgagaggacccagagggacaaggacaacttcagccctggccaggaggtgttctacagctgtgagcccggctatgacctgcggggagctgcctccatgcgctgcaccccccagggcgactggagccctgctgcccccacctgtgaggtgaagagctgtgatgacttcatgggccagctgctgaatggccgggtgctcttccctgtgaacctgcagctgggcgccaaggtggactttgtgtgtgatgagggcttccagctgaagggcagcagcgccagctactgtgtgctggccggcatggagagcctgtggaacagctctgtgcctgtgtgtgagcagatcttctgccccagcccccctgtgatccccaacggccgccacacaggcaagcccctggaggtgttcccctttgggaaggctgtgaactacacctgtgacccccacccagaccggggcaccagctttgacctgattggagagagcaccatccgctgcaccagtgacccccagggcaatggagtgtggagcagccctgccccccgctgtggcatcctgggccactgccaggccccagaccacttcctgtttgccaagctgaagacccagaccaatgccagtgacttccccatcggcaccagcctgaagtatgagtgcaggcctgagtactacggccggcccttcagcatcacctgcctggacaacctggtgtggagcagccccaaggatgtgtgcaagaggaagagctgcaagaccccaccagaccctgtgaatggcatggtgcacgtgatcacagacatccaggtgggcagccgcatcaactacagctgcaccaccggccacaggctcatcggccacagcagcgctgagtgcatcctgagcggcaacacagcccactggagcaccaagccacccatctgccagaggatcccctgtggcctgccccccaccatcgccaacggggacttcatcagcaccaaccgggagaacttccactacggctctgtggtgacctaccgctgcaacctgggcagccggggcaggaaggtgtttgagctggtgggggagcccagcatctactgcaccagcaatgatgaccaggtgggcatctggagcggccctgccccccagtgcatcatccccaacaagtgcaccccacccaacgtggagaatggcatcctggtgtctgacaacagaagcctcttcagcctgaatgaggtggtggagttccgctgccagcccggctttgtgatgaagggcccccggcgggtgaagtgccaggccctgaacaagtgggagcctgagctgcccagctgcagccgggtgtgccagcccccacctgagatcctgcatggagagcacacccccagccaccaggacaacttcagccctggccaggaggtgttctacagctgtgagcccggctatgacctgcggggagctgccagcctgcactgcaccccccagggcgactggagccctgaggccccccgctgtgctgtgaagagctgtgatgacttcctgggccagctgccccacggccgggtgctcttccccctgaacctgcagctgggcgccaaggtgtcctttgtgtgtgatgagggcttccggctgaagggcagctctgtgagccactgtgtgctggtgggcatgaggagcctgtggaacaacagcgtgcctgtgtgtgagcacatcttctgccccaaccccccagccatcctgaatggccgccacacaggcaccccatctggggacatcccctacggcaaggagatctcctacacctgtgacccccacccagaccggggcatgaccttcaacctgattggagagagcaccatccgctgcaccagtgacccccatggaaatggagtgtggagcagccctgccccccgctgtgagctgtctgtgcgggccggccactgcaagaccccagagcagttcccctttgccagccccaccatccccatcaatgactttgagttccctgtgggcaccagcctgaactatgaatgtcggcccggctactttgggaagatgttcagcatcagctgcctggagaacctggtgtggagctctgtggaggacaactgcaggaggaagagctgtggccccccacctgagcccttcaacggcatggtgcacatcaacacagacacccagtttggcagcacagtgaactacagctgcaatgaaggcttccggctgattggcagccccagcaccacctgcctggtgtctggcaacaacgtgacctgggacaagaaggcccccatctgtgagatcatcagctgtgagcccccacccaccatcagcaatggagacttctacagcaacaacagaaccagcttccacaacggcaccgtggtgacctaccagtgccacacaggcccagatggagagcagctgtttgagctggtgggggagaggagcatctactgcaccagcaaggatgaccaggtgggcgtgtggagcagccccccaccccgctgcatcagcaccaacaagtgcacagcccctgaggtggagaatgccatccgggtgcccggcaacagaagcttcttcaccctgacagagatcatccgcttccgctgccagcccggctttgtgatggtgggcagccacacagtgcagtgccagaccaacggccgctggggccccaagctgccccactgcagccgggtgtgccagcccccacctgagatcctgcacggggagcacaccctgagccaccaggacaacttcagccctggccaggaggtgttctacagctgtgagcccagctatgacctgcggggggccgccagcctgcactgcaccccccagggcgactggagccctgaggccccccgctgcaccgtgaagagctgtgatgacttcctgggccagctgccccacggccgggtgctgctgcccctgaacctgcagctgggcgccaaggtgtcctttgtgtgtgatgagggcttccggctgaagggccgcagcgccagccactgtgtgctggccggcatgaaggccctgtggaacagctctgtgcctgtgtgtgagcagatcttctgccccaaccccccagccatcctgaatggccgccacacaggcaccccatttggagacatcccctacggcaaggagatctcctatgcctgtgacacccacccagaccggggcatgaccttcaacctgattggagagagcagcatccgctgcaccagtgacccccagggcaatggagtgtggagcagccctgccccccgctgtgagctgtctgtgcctgctgcctgcccccacccccccaagatccagaatggccactacatcggcggccacgtgtccctgtacctgcccggcatgaccatctcctacatctgtgaccccggctacctgctggtgggcaagggcttcatcttctgcacagaccagggcatctggagccagctggaccactactgcaaggaggtgaactgcagcttccccctcttcatgaatggcatcagcaaggagctggagatgaagaaggtgtaccactacggggactatgtgaccctgaagtgtgaagatggctacaccctggagggcagcccctggagccagtgccaggctgatgaccgctgggacccccccctggccaagtgcaccagcaggacccatgatgccctgattgtgggcaccctgagcggcaccatcttcttcatcctgctgatcatcttcctgtcctggatcatcctgaagcacaggaagggcaacaatgcccacgagaaccccaaggaggtggccatccacctgcacagccagggcggcagctctgtgcaccccaggaccctgcagaccaatgaggagaacagccgggtgctgccctag

SEQ ID NO: 148147 - DNA, 6120 bp, synthetic construct; identical to SEQ ID NO: 148146
  misc_feature 1..6120: note = Description of Artificial Sequence: Synthetic coding sequence
  source 1..6120: mol_type = other DNA

SEQ ID NO: 148148 - DNA, 1755 bp, synthetic construct
  misc_feature 1..1755: note = Description of Artificial Sequence: Synthetic coding sequence
  source 1..1755: mol_type = other DNA
ggccactgccaggccccagaccacttcctgtttgccaagctgaagacccagaccaatgccagtgacttccccatcggcaccagcctgaagtatgagtgcaggcctgagtactacggccggcccttcagcatcacctgcctggacaacctggtgtggagcagccccaaggatgtgtgcaagaggaagagctgcaagaccccaccagaccctgtgaatggcatggtgcacgtgatcacagacatccaggtgggcagccgcatcaactacagctgcaccaccggccacaggctcatcggccacagcagcgctgagtgcatcctgtctggaaatgctgcccactggagcaccaagccacccatctgccagaggatcccctgtggcctgccccccaccatcgccaacggggacttcatcagcaccaaccgggagaacttccactacggctctgtggtgacctaccgctgcaaccctggcagcggcggcaggaaggtgtttgagctggtgggggagcccagcatctactgcaccagcaatgatgaccaggtgggcatctggagcggccctgccccccagtgcatcatccccaacaagtgcaccccacccaacgtggagaatggcatcctggtgtctgacaacagaagcctcttcagcctgaatgaggtggtggagttccgctgccagcccggctttgtgatgaagggcccccggcgggtgaagtgccaggccctgaacaagtgggagcctgagctgcccagctgcagccgggtgtgccagcccccaccagatgtgctgcacgccgagaggacccagagggacaaggacaacttcagccctggccaggaggtgttctacagctgtgagcccggctatgacctgcggggagctgcctccatgcgctgcaccccccagggcgactggagccctgctgcccccacctgtgaggtgaagagctgtgatgacttcatgggccagctgctgaatggccgggtgctcttccctgtgaacctgcagctgggcgccaaggtggactttgtgtgtgatgagggcttccagctgaagggcagcagcgccagctactgtgtgctggccggcatggagagcctgtggaacagctctgtgcctgtgtgtgagcagatcttctgccccagcccccctgtgatccccaacggccgccacacaggcaagcccctggaggtgttcccctttgggaagacagtgaactacacctgtgacccccacccagaccggggcaccagctttgacctgattggagagagcaccatccgctgcaccagtgacccccagggcaatggagtgtggagcagccctgccccccgctgtggcatcctgggccactgccaggccccagaccacttcctgtttgccaagctgaagacccagaccaatgccagtgacttccccatcggcaccagcctgaagtatgagtgcaggcctgagtactacggccggcccttcagcatcacctgcctggacaacctggtgtggagcagccccaaggatgtgtgcaagaggaagagctgcaagaccccaccagaccctgtgaatggcatggtgcacgtgatcacagacatccaggtgggcagccgcatcaactacagctgcaccaccggccacaggctcatcggccacagcagcgctgagtgcatcctgtctggaaatgctgcccactggagcaccaagccacccatctgccagaggagctgccacctgccctgtgagctgtttggccgctag

SEQ ID NO: 148149 - DNA, 1335 bp, synthetic construct
  misc_feature 1..1335: note = Description of Artificial Sequence: Synthetic coding sequence
  source 1..1335: mol_type = other DNA
atggcccctcctgtgcggctggagcggcccttccccagccgccgcttccctggcctgctgctggccgccctggtgctgctgctgagcagcttcagtgaccagtgcaatgtgcctgagtggctgccctttgcccggcccaccaacctgacagatgactttgagttccccatcggcacctacctgaactatgagtgcaggcctggctacagcggccggcccttcagcatcatctgcctgaagaacagcgtgtggaccagcgccaaggacaagtgcaagaggaagagctgcagaaatcctccagaccctgtgaatggcatggcccacgtgatcaaggacatccagttccgcagccagatcaagtacagctgccccaagggctaccgcctcatcggcagcagcagcgccacctgcatcatcagcggcaacacagtcatctgggacaacaagacccctgtgtgtgaccgcatcatctgtggcctgccccccaccatcgccaacggggacttcaccagcatcagccgggagtacttccactacggctctgtggtgacctaccactgcaacctgggcagccggggcaagaaggtgtttgagctggtgggggagcccagcatctactgcaccagcaaggatgaccaggtgggcatctggagcggccctgccccccagtgcatcatccccaacaagtgcaccccacccaacgtggagaatggcatcctggtgtctgacaacagaagcctcttcagcctgaatgaggtggtggagttccgctgccagcccggcttcggcatgaagggccccagccacgtgaagtgccaggccctgaacaagtgggagcctgagctgcccagctgcagccgggtgtgccagcccccaccagatgtgctgcacgccgagaggacccagagggacaaggacaacttcagccctggccaggaggtgttctacagctgtgagcccggctatgacctgcggggcagcacctacctgcactgcaccccccagggcgactggagccctgctgccccccgctgtgaggtgaagagctgtgatgacttcctgggccagctgcccaatggacatgtgctcttccccctgaacctgcagctgggcgccaaggtggactttgtgtgtgatgagggcttccagctgaagggcagcagcgccagctactgtgtgctggccggcatggagagcctgtggaacagctctgtgcctgtgtgtgagaggaagagctgtgagaccccacctgtgcctgtgaatggcatggtgcacgtgatcacagacatccacgtgggcagccgcatcaactacagctgcaccaccggcttctag

SEQ ID NO: 148150 - DNA, 1710 bp, synthetic construct
  misc_feature 1..1710: note = Description of Artificial Sequence: Synthetic coding sequence
  source 1..1710: mol_type = other DNA
atggcccctcctgtgcggctggagcggcccttccccagccgccgcttccctggcctgctgctggccgccctggtgctgctgctgagcagcttcagtgaccagtgcaatgtgcctgagtggctgccctttgcccggcccaccaacctgacagatgactttgagttccccatcggcacctacctgaactatgagtgcaggcctggctacagcggccggcccttcagcatcatctgcctgaagaacagcgtgtggaccagcgccaaggacaagtgcaagaggaagagctgcagaaatcctccagaccctgtgaatggcatggcccacgtgatcaaggacatccagttccgcagccagatcaagtacagctgccccaagggctaccgcctcatcggcagcagcagcgccacctgcatcatcagcggcaacacagtcatctgggacaacaagacccctgtgtgtgaccgcatcatctgtggcctgccccccaccatcgccaacggggacttcaccagcatcagccgggagtacttccactacggctctgtggtgacctaccactgcaacctgggcagccggggcaagaaggtgtttgagctggtgggggagcccagcatctactgcaccagcaaggatgaccaggtgggcatctggagcggccctgccccccagtgcatcatccccaacaagtgcaccccacccaacgtggagaatggcatcctggtgtctgacaacagaagcctcttcagcctgaatgaggtggtggagttccgctgccagcccggcttcggcatgaagggccccagccacgtgaagtgccaggccctgaacaagtgggagcctgagctgcccagctgcagccgggtgtgccagcccccaccagatgtgctgcacgccgagaggacccagagggacaaggacaacttcagccctggccaggaggtgttctacagctgtgagcccggctatgacctgcggggcagcacctacctgcactgcaccccccagggcgactggagccctgctgccccccgctgtgaggtgaagagctgtgatgacttcctgggccagctgcccaatggacatgtgctcttccccctgaacctgcagctgggcgccaaggtggactttgtgtgtgatgagggcttccagctgaagggcagcagcgccagctactgtgtgctggccggcatggagagcctgtggaacagctctgtgcctgtgtgtgagaggaagagctgtgagaccccacctgtgcctgtgaatggcatggtgcacgtgatcacagacatccacgtgggcagccgcatcaactacagctgcaccaccggccaccggctgattggccacagcagcgctgagtgcatcctgagcggcaacacagcccactggagcatgaagccacccatctgccagcagatcttctgccccaaccccccagccatcctgaatggccgccacacaggcacccccctgggggacatcccctacggcaaggaggtgtcctacacctgtgacccccacccagaccggggcatgaccttcaacctgattggagagagcaccatccggaggaccagcgagccccatggaaatggagtgtggagcagccctgccccccgctgtgagctgcctgtgggcgccggcagccatgatgccctgattgtgggcaagttctatgaggtgtttgctgaggagttctgccacctgtag

SEQ ID NO: 148151 - DNA, 3279 bp, synthetic construct
  misc_feature 1..3279: note = Description of Artificial Sequence: Synthetic coding sequence
  source 1..3279: mol_type = other DNA
atgggcgccgccggcctgctgggcgtcttcctggccctggtggcccctggggtgctgggcatcagctgtggcagccccccacccatcctgaatggccgcatctcctactacagcacccccatcgctgtgggcaccgtcatccgctacagctgcagcggcaccttccgcctcatcggggagaagagcctgctgtgcatcaccaaggacaaggtggatggcacctgggacaagccagcccccaagtgtgagtacttcaacaagtacagcagctgcccagagcccatcgtgcctgggggctacaagatccggggcagcaccccctaccgccacggggacagcgtgacctttgcctgcaagaccaacttctccatgaatggaaacaagtctgtgtggtgccaggccaacaacatgtggggccccacccggctgcccacctgtgtgtctgtgttccccctggagtgcccagccctgcccatgatccacaacggccaccacaccagtgaaaatgtgggcagcatcgcccctggcctgtctgtgacctacagctgtgagagcggctacctgctggtgggggagaagatcatcaactgcctgagcagcggcaagtggagcgctgtgccccccacctgtgaggaggcccgctgcaagagcctgggccgcttccccaacgggaaggtgaaggagccccccatcctgcgggtgggcgtgacagccaacttcttctgtgatgagggctaccgcctgcagggcccccccagcagccgctgtgtgattgctggccagggcgtggcctggaccaagatgcctgtgtgtgaggagatcttctgccccagccccccacccatcctgaatggccgccacatcggcaacagcctggccaacgtgtcctatggcagcatcgtgacctacacctgtgaccctgaccctgaggagggcgtgaacttcatcctgattggagagagcaccctgcgctgcaccgtggacagccagaagacaggcacctggagcggccctgccccccgctgtgagctgagcaccagcgctgtgcagtgcccccacccccagatcctgcggggccgcatggtgtctggccagaaggaccgctacacctacaatgacaccgtcatctttgcctgcatgtttggcttcaccctgaagggcagcaagcagatccgctgcaatgcccagggcacctgggagcccagcgcccctgtgtgtgagaaggagtgccaggccccacccaacatcctgaatggccagaaggaggacagacacatggtgcgctttgatcctggcaccagcatcaagtacagctgcaaccctggctacgtgctggtgggggaggagagcatccagtgcaccagcgagggcgtgtggaccccacctgtgccccagtgcaaggtggccgcctgtgaggccaccggccggcagctgctgaccaagccccagcaccagtttgtgcggccagatgtgaacagcagctgtggggagggctacaagctgagcggctctgtgtaccaggagtgccagggcaccatcccctggttcatggagatccggctgtgcaaggagatcacctgccccccacctcctgtgatctacaatggagcccacacaggcagcagcctggaggacttcccctacggcaccaccgtgacctacacctgcaaccctggccctgagcggggcgtggagttcagcctgattggagagagcaccatccgctgcaccagcaatgaccaggagcggggcacctggagcggccctgcccccctgtgcaagctgagcctgctggccgtgcagtgcagccacgtgcacatcgccaacggctacaagatcagcggcaaggaggccccctacttctacaatgacacagtgaccttcaagtgctacagcggcttcaccctgaagggcagcagccagatccgctgcaaggctgacaacacctgggaccctgagatccctgtgtgtgagaagggctgccagagccccccaggcctgcaccacggccgccacactggaggcaacacagtgttctttgtgtctggcatgacagtggactacacctgtgaccccggctacctgctggtgggcaacaagagcatccactgcatgcccagcggcaactggagccccagcgccccccgctgtgaggagacctgccagcacgtgcggcagagcctgcaggagctgcctgctggcagccgggtggagctggtgaacaccagctgccaggacggctaccagctgactggacatgcctaccagatgtgccaggatgctgaaaatggcatctggttcaagaagatccccctgtgcaaggtgatccactgccaccccccacctgtgattgtgaatggcaagcacacaggcatgatggccgagaacttcctgtatggaaatgaggtgtcctatgaatgtgaccagggcttctacctgctgggggagaagaagctgcagtgccgcagtgacagcaagggccacggctcctggagcggccccagcccccagtgcctgcggagcccccctgtgacccgctgccccaaccctgaggtgaagcacggctacaagctgaacaagacccacagcgcctacagccacaatgacatcgtgtatgtggactgcaaccctggcttcatcatgaatggcagcagggtcatccgctgccacacagacaacacctgggtgcctggggtgcccacctgcatcaagaaggccttcatcggctgccccccaccacccaagacccccaacggcaaccacactggaggcaacatcgcccgcttcagccctggcatgagcatcctgtacagctgtgaccagggctacctgctggtgggggaggccctgctgctgtgcacccatgagggcacctggagccagcctgccccccactgcaaggaggtgaactgcagcagccctgctgacatggatggcatccagaagggcctggagcccaggaagatgtaccagtacggggctgtggtgaccctggagtgtgaagatggctacatgctggagggcagcccccagagccagtgccagagcgaccaccagtggaacccccccctggccgtgtgccgcagccgcagcctggcccctgtgctgtgtggcattgctgctggcctcatcctgctgaccttcctgattgtcatcaccctgtatgtgatcagcaagcaccgggccaggaactactacacagacaccagccagaaggaggccttccacctggaggcccgggaggtgtacagcgtggacccctacaacccagccagctag

SEQ ID NO: 148152 - DNA, 3102 bp, synthetic construct
  misc_feature 1..3102: note = Description of Artificial Sequence: Synthetic coding sequence
  source 1..3102: mol_type = other DNA
atgggcgccgccggcctgctgggcgtcttcctggccctggtggcccctggggtgctgggcatcagctgtggcagccccccacccatcctgaatggccgcatctcctactacagcacccccatcgctgtgggcaccgtcatccgctacagctgcagcggcaccttccgcctcatcggggagaagagcctgctgtgcatcaccaaggacaaggtggatggcacctgggacaagccagcccccaagtgtgagtacttcaacaagtacagcagctgcccagagcccatcgtgcctgggggctacaagatccggggcagcaccccctaccgccacggggacagcgtgacctttgcctgcaagaccaacttctccatgaatggaaacaagtctgtgtggtgccaggccaacaacatgtggggccccacccggctgcccacctgtgtgtctgtgttccccctggagtgcccagccctgcccatgatccacaacggccaccacaccagtgaaaatgtgggcagcatcgcccctggcctgtctgtgacctacagctgtgagagcggctacctgctggtgggggagaagatcatcaactgcctgagcagcggcaagtggagcgctgtgccccccacctgtgaggaggcccgctgcaagagcctgggccgcttccccaacgggaaggtgaaggagccccccatcctgcgggtgggcgtgacagccaacttcttctgtgatgagggctaccgcctgcagggcccccccagcagccgctgtgtgattgctggccagggcgtggcctggaccaagatgcctgtgtgtgaggagatcttctgccccagccccccacccatcctgaatggccgccacatcggcaacagcctggccaacgtgtcctatggcagcatcgtgacctacacctgtgaccctgaccctgaggagggcgtgaacttcatcctgattggagagagcaccctgcgctgcaccgtggacagccagaagacaggcacctggagcggccctgccccccgctgtgagctgagcaccagcgctgtgcagtgcccccacccccagatcctgcggggccgcatggtgtctggccagaaggaccgctacacctacaatgacaccgtcatctttgcctgcatgtttggcttcaccctgaagggcagcaagcagatccgctgcaatgcccagggcacctgggagcccagcgcccctgtgtgtgagaaggagtgccaggccccacccaacatcctgaatggccagaaggaggacagacacatggtgcgctttgatcctggcaccagcatcaagtacagctgcaaccctggctacgtgctggtgggggaggagagcatccagtgcaccagcgagggcgtgtggaccccacctgtgccccagtgcaaggtggccgcctgtgaggccaccggccggcagctgctgaccaagccccagcaccagtttgtgcggccagatgtgaacagcagctgtggggagggctacaagctgagcggctctgtgtaccaggagtgccagggcaccatcccctggttcatggagatccggctgtgcaaggagatcacctgccccccacctcctgtgatctacaatggagcccacacaggcagcagcctggaggacttcccctacggcaccaccgtgacctacacctgcaaccctggccctgagcggggcgtggagttcagcctgattggagagagcaccatccgctgcaccagcaatgaccaggagcggggcacctggagcggccctgcccccctgtgcaagctgagcctgctggccgtgcagtgcagccacgtgcacatcgccaacggctacaagatcagcggcaaggaggccccctacttctacaatgacacagtgaccttcaagtgctacagcggcttcaccctgaagggcagcagccagatccgctgcaaggctgacaacacctgggaccctgagatccctgtgtgtgagaaggagacctgccagcacgtgcggcagagcctgcaggagctgcctgctggcagccgggtggagctggtgaacaccagctgccaggacggctaccagctgaccggccacgcctaccagatgtgccaggatgctgaaaatggcatctggttcaagaagatccccctgtgcaaggtgatccactgccaccccccacctgtgattgtgaatggcaagcacacaggcatgatggccgagaacttcctgtatggaaatgaggtgtcctatgaatgtgaccagggcttctacctgctgggggagaagaagctgcagtgccgcagtgacagcaaaggacatggctcctggagcggccccagcccccagtgcctgcggagcccccctgtgacccgctgccccaaccctgaggtgaagcacggctacaagctgaacaagacccacagcgcctacagccacaatgacatcgtgtatgtggactgcaaccctggcttcatcatgaatggcagcagggtcatccgctgccacacagacaacacctgggtgcctggggtgcccacctgcatcaagaaggccttcatcggctgccccccaccacccaagaccccaaatggaaaccacactggaggcaacatcgcccgcttcagccctggcatgagcatcctgtacagctgtgaccagggctacctgctggtgggggaggccctgctgctgtgcacccatgagggcacctggagccagcctgccccccactgcaaggaggtgaactgcagcagccctgctgacatggatggcatccagaagggcctggagcccaggaagatgtaccagtatggagctgtggtgaccctggagtgtgaagatggctacatgctggagggcagcccccagagccagtgccagagcgaccaccagtggaacccccccctggccgtgtgccgcagccgcagcctggcccctgtgctgtgtggcattgctgctggcctcatcctgctgaccttcctgattgtcatcaccctgtatgtgatcagcaagcaccgggccaggaactactacacagacaccagccagaaggaggccttccacctggaggcccgggaggtgtacagcgtggacccctacaacccagccagctag

SEQ ID NO: 148153 - DNA, 2916 bp, synthetic construct
  misc_feature 1..2916: note = Description of Artificial Sequence: Synthetic coding sequence
  source 1..2916: mol_type = other DNA
atgggcgccgccggcctgctgggcgtcttcctggccctggtggcccctggggtgctgggcatcagctgtggcagccccccacccatcctgaatggccgcatctcctactacagcacccccatcgctgtgggcaccgtcatccgctacagctgcagcggcaccttccgcctcatcggggagaagagcctgctgtgcatcaccaaggacaaggtggatggcacctgggacaagccagcccccaagtgtgagtacttcaacaagtacagcagctgcccagagcccatcgtgcctgggggctacaagatccggggcagcaccccctaccgccacggggacagcgtgacctttgcctgcaagaccaacttctccatgaatggaaacaagtctgtgtggtgccaggccaacaacatgtggggccccacccggctgcccacctgtgtgtctgtgttccccctggagtgcccagccctgcccatgatccacaacggccaccacaccagtgaaaatgtgggcagcatcgcccctggcctgtctgtgacctacagctgtgagagcggctacctgctggtgggggagaagatcatcaactgcctgagcagcggcaagtggagcgctgtgccccccacctgtgaggaggcccgctgcaagagcctgggccgcttccccaacgggaaggtgaaggagccccccatcctgcgggtgggcgtgacagccaacttcttctgtgatgagggctaccgcctgcagggcccccccagcagccgctgtgtgattgctggccagggcgtggcctggaccaagatgcctgtgtgtgaggagatcttctgccccagccccccacccatcctgaatggccgccacatcggcaacagcctggccaacgtgtcctatggcagcatcgtgacctacacctgtgaccctgaccctgaggagggcgtgaacttcatcctgattggagagagcaccctgcgctgcaccgtggacagccagaagacaggcacctggagcggccctgccccccgctgtgagctgagcaccagcgctgtgcagtgcccccacccccagatcctgcggggccgcatggtgtctggccagaaggaccgctacacctacaatgacaccgtcatctttgcctgcatgtttggcttcaccctgaagggcagcaagcagatccgctgcaatgcccagggcacctgggagcccagcgcccctgtgtgtgagaaggagtgccaggccccacccaacatcctgaatggccagaaggaggacagacacatggtgcgctttgatcctggcaccagcatcaagtacagctgcaaccctggctacgtgctggtgggggaggagagcatccagtgcaccagcgagggcgtgtggaccccacctgtgccccagtgcaaggtggccgcctgtgaggccaccggccggcagctgctgaccaagccccagcaccagtttgtgcggccagatgtgaacagcagctgtggggagggctacaagctgagcggctctgtgtaccaggagtgccagggcaccatcccctggttcatggagatccggctgtgcaaggagatcacctgccccccacctcctgtgatctacaatggagcccacacaggcagcagcctggaggacttcccctacggcaccaccgtgacctacacctgcaaccctggccctgagcggggcgtggagttcagcctgattggagagagcaccatccgctgcaccagcaatgaccaggagcggggcacctggagcggccctgcccccctgtgcaagctgagcctgctggccgtgcagtgcagccacgtgcacatcgccaacggctacaagatcagcggcaaggaggccccctacttctacaatgacacagtgaccttcaagtgctacagcggcttcaccctgaagggcagcagccagatccgctgcaaggctgacaacacctgggaccctgagatccctgtgtgtgagaaggagacctgccagcacgtgcggcagagcctgcaggagctgcctgctggcagccgggtggagctggtgaacaccagctgccaggacggctaccagctgaccggccacgcctaccagatgtgccaggatgctgaaaatggcatctggttcaagaagatccccctgtgcaaggtgatccactgccaccccccacctgtgattgtgaatggcaagcacacaggcatgatggccgagaacttcctgtatggaaatgaggtgtcctatgaatgtgaccagggcttctacctgctgggggagaagaagctgcagtgccgcagtgacagcaaaggacatggctcctggagcggccccagcccccagtgcctgcggagcccccctgtgacccgctgccccaaccctgaggtgaagcacggctacaagctgaacaagacccacagcgcctacagccacaatgacatcgtgtatgtggactgcaaccctggcttcatcatgaatggcagcagggtcatccgctgccacacagacaacacctgggtgcctggggtgcccacctgcatcaagaaggaggtgaactgcagcagccctgctgacatggatggcatccagaagggcctggagcccaggaagatgtaccagtatggagctgtggtgaccctggagtgtgaagatggctacatgctggagggcagcccccagagccagtgccagagcgaccaccagtggaacccccccctggccgtgtgccgcagccgcagcctggcccctgtgctgtgtggcattgctgctggcctcatcctgctgaccttcctgattgtcatcaccctgtatgtgatcagcaagcaccgggccaggaactactacacagacaccagccagaaggaggccttccacctggaggcccgggaggtgtacagcgtggacccctacaacccagccagctag

SEQ ID NO: 148154 - DNA, 3021 bp, synthetic construct
  misc_feature 1..3021: note = Description of Artificial Sequence: Synthetic coding sequence
  source 1..3021: mol_type = other DNA
atgggcgccgccggcctgctgggcgtcttcctggccctggtggcccctggggtgctgggcatcagctgtggcagccccccacccatcctgaatggccgcatctcctactacagcacccccatcgctgtgggcaccgtcatccgctacagctgcagcggcaccttccgcctcatcggggagaagagcctgctgtgcatcaccaaggacaaggtggatggcacctgggacaagccagcccccaagtgtgagtacttcaacaagtacagcagctgcccagagcccatcgtgcctgggggctacaagatccggggcagcaccccctaccgccacggggacagcgtgacctttgcctgcaagaccaacttctccatgaatggaaacaagtctgtgtggtgccaggccaacaacatgtggggccccacccggctgcccacctgtgtgtctgtgttccccctggagtgcccagccctgcccatgatccacaacggccaccacaccagtgaaaatgtgggcagcatcgcccctggcctgtctgtgacctacagctgtgagagcggctacctgctggtgggggagaagatcatcaactgcctgagcagcggcaagtggagcgctgtgccccccacctgtgaggaggcccgctgcaagagcctgggccgcttccccaacgggaaggtgaaggagccccccatcctgcgggtgggcgtgacagccaacttcttctgtgatgagggctaccgcctgcagggcccccccagcagccgctgtgtgattgctggccagggcgtggcctggaccaagatgcctgtgtgtgaggagatcttctgccccagccccccacccatcctgaatggccgccacatcggcaacagcctggccaacgtgtcctatggcagcatcgtgacctacacctgtgaccctgaccctgaggagggcgtgaacttcatcctgattggagagagcaccctgcgctgcaccgtggacagccagaagacaggcacctggagcggccctgccccccgctgtgagctgagcaccagcgctgtgcagtgcccccacccccagatcctgcggggccgcatggtgtctggccagaaggaccgctacacctacaatgacaccgtcatctttgcctgcatgtttggcttcaccctgaagggcagcaagcagatccgctgcaatgcccagggcacctgggagcccagcgcccctgtgtgtgagaaggagtgccaggccccacccaacatcctgaatggccagaaggaggacagacacatggtgcgctttgatcctggcaccagcatcaagtacagctgcaaccctggctacgtgctggtgggggaggagagcatccagtgcaccagcgagggcgtgtggaccccacctgtgccccagtgcaaggtggccgcctgtgaggccaccggccggcagctgctgaccaagccccagcaccagtttgtgcggccagatgtgaacagcagctgtggggagggcaaccacctgcccaccaccccctgctacctgcagtggggcacccaccgggagttcctgcggcgcttcagcatctggaaccacggccacctgcacatgcctggccctgagcggggcgtggagttcagcctcatcggggagagcaccatccgctgcaccagcaatgaccaggagcggggcacctggagcggccctgcccccctgtgcaagctgagcctgctggccgtgcagtgcagccacgtgcacatcgccaacggctacaagatcagcggcaaggaggccccctacttctacaatgacacagtgaccttcaagtgctacagcggcttcaccctgaagggcagcagccagatccgctgcaaggctgacaacacctgggaccctgagatccctgtgtgtgagaaggagacctgccagcacgtgcggcagagcctgcaggagctgcctgctggcagccgggtggagctggtgaacaccagctgccaggacggctaccagctgactggacatgcctaccagatgtgccaggatgctgaaaatggcatctggttcaagaagatccccctgtgcaaggtgatccactgccaccccccacctgtgattgtgaatggcaagcacacaggcatgatggccgagaacttcctgtatggaaatgaggtgtcctatgaatgtgaccagggcttctacctgctgggggagaagaagctgcagtgccgcagtgacagcaagggccacggctcctggagcggccccagcccccagtgcctgcggagcccccctgtgacccgctgccccaaccctgaggtgaagcacggctacaagctgaacaagacccacagcgcctacagccacaatgacatcgtgtatgtggactgcaaccctggcttcatcatgaatggcagcagggtcatccgctgccacacagacaacacctgggtgcctggggtgcccacctgcatcaagaaggccttcatcggctgccccccaccacccaagacccccaacggcaaccacactggaggcaacatcgcccgcttcagccctggcatgagcatcctgtacagctgtgaccagggctacctgctggtgggggaggccctgctgctgtgcacccatgagggcacctggagccagcctgccccccactgcaaggaggtgaactgcagcagccctgctgacatggatggcatccagaagggcctggagcccaggaagatgtaccagtacggggctgtggtgaccctggagtgtgaagatggctacatgctggagggcagcccccagagccagtgccagagcgaccaccagtggaacccccccctggccgtgtgccgcagccgcagcctggcccctgtgctgtgtggcattgctgctggcctcatcctgctgaccttcctgattgtcatcaccctgtatgtgatcagcaagcaccgggccaggaactactacacagacaccagccagaaggaggccttccacctggaggcccgggaggtgtacagcgtggacccctacaacccagccagctag

SEQ ID NO: 148155 - DNA, 2226 bp, synthetic construct
  misc_feature 1..2226: note = Description of Artificial Sequence: Synthetic coding sequence
  source 1..2226: mol_type = other DNA
atggctgctgctgagggccctgtgggagatggagagctgtggcagacctggctgcccaaccacgtggtgttcctgcggctgcgggagggcctgaagaaccagagccccacagaagctgagaagccagccagcagcagcctgcccagcagccccccaccccagctgctgaccagaaatgtggtgtttggcctgggcggggagctgttcctgtgggatggagaggacagcagcttcctggtggtgcggctgcggggccccagcggcggcggggaggagcccgccctgagccagtaccagaggctgctgtgcatcaacccccccctgtttgagatctaccaggtgctgctgagccccacccagcaccacgtggccctgattggcatcaagggcctgatggtgctggagctgcccaagcgctggggcaagaacagcgagtttgagggcggcaagagcacagtgaactgcagcaccacccctgtggccgagcgcttcttcaccagcagcaccagcctgaccctgaagcacgccgcctggtaccccagcgagatcctggacccccacgtggtgctgctgaccagtgacaacgtcatccgcatctacagcctgcgggagccccagacccccaccaacgtcatcatcctgtctgaggccgaggaggagagcctggtgctgaacaagggccgggcctacacagccagcctgggggagacagctgtggcctttgattttggccccctggccgctgtgcccaagaccctgtttggccagaatggcaaggatgaggtggtggcctaccccctgtacatcctgtatgaaaatggagagaccttcctgacctacatcagcctgctgcacagccctggcaacatcggcaagctgctgggccccctgcccatgcaccctgctgctgaggacaactacggctatgatgcctgtgctgtgctgtgcctgccctgtgtgcccaacatcctggtgattgccacagagagcggcatgctgtaccactgtgtggtgctggagggggaggaggaggatgaccacaccagcgagaagtcctgggacagcagaattgacctgatccccagcctgtatgtgtttgaatgtgtggagctggagctggccctgaagctggccagcggagaagatgacccctttgacagcgacttcagctgccctgtgaagctgcaccgggaccccaagtgccccagccgctaccactgcacccatgaagctggggtgcacagcgtgggcctgacctggatccacaagctgcacaagttcctgggcagtgatgaggaggacaaggacagcctgcaggagctgagcacagagcagaagtgctttgtggagcacatcctgtgcaccaagcccctgccctgccggcagcctgcccccatccggggcttctggatcgtgcctgacatcctgggccccaccatgatctgcatcaccagcacctatgagtgcctgatctggcccctgctgagcacagtgcacccagccagcccccccctgctgtgcacccgggaggatgtggaggtggccgagagccccctgcgggtgctggccgagaccccagacagctttgagaagcacatccgcagcatcctgcagaggtctgtggccaacccagccttcctgaaggccagcgagaaggacatcgcccctcctcctgaggagtgcctgcagctgctgagccgggccacccaggtgttccgggagcagtacatcctgaagcaggacctggccaaggaggagatccagaggagagtgaagctgctgtgtgaccagaagaagaagcagctggaggacctgagctactgccgggaggagaggaagagcctgcgggagatggccgagcggctggccgacaagtatgaggaggccaaggagaagcaggaggacatcatgaacaggatgaagaagctgctgcacagcttccacagcgagctgcctgtgctgagtgacagcgagcgggacatgaagaaggagctgcagctgatcccagaccagctgcggcacctgggcaatgccatcaagcaggtgaccatgaagaaggactaccagcagcagaagatggagaaggtgctgagcctgcccaagcccaccatcatcctgagcgcctaccagaggaagtgcatccagagcatcctgaaggaggagggggagcacatccgggagatggtgaagcagatcaatgacatccggaaccacgtgaacttctag

SEQ ID NO: 148156 - DNA, 762 bp, synthetic construct
  misc_feature 1..762: note = Description of Artificial Sequence: Synthetic coding sequence
  source 1..762: mol_type = other DNA
atgatgatgaagatcccctggggcagcatccctgtgctgatgctgctgctgctgctgggcctgattgacatcagccaggcccagctgagctgcaccggccccccagccatccctggcatccctggcatccctggcaccccaggcccagatggccagcccggcaccccaggcatcaagggggagaagggcctgcccggcctggccggggaccatggagaatttggagagaagggggaccccggcatccctggcaaccctgggaaggtgggccccaagggccccatgggccccaagggcggccctggggcccctggggcccctggccccaagggggagagcggggactacaaggccacccagaagatcgccttcagcgccaccaggaccatcaacgtgcccctgcggcgggaccagaccatccgctttgaccacgtgatcaccaacatgaacaacaactatgagcccaggtctgggaagttcacctgcaaggtgcccggcctgtactacttcacctaccacgccagcagccggggcaacctgtgtgtgaacctgatgaggggccgggagcgggcccagaaggtggtgaccttctgtgactatgcctacaacaccttccaggtgaccactggaggcatggtgctgaagctggagcagggagaaaatgtgttcctgcaggccacagacaagaacagcctgctgggcatggagggcgccaacagcatcttcagcggcttcctgctcttcccagacatggaggcctag

SEQ ID NO: 148157 - DNA, 690 bp, synthetic construct
  misc_feature 1..690: note = Description of Artificial Sequence: Synthetic coding sequence
  source 1..690: mol_type = other DNA
atgaagatcccctggggcagcatccctgtgctgatgctgctgctgctgctgggcctgattgacatcagccaggcccagctgagctgcaccggccccccagccatccctggcatccctggcatccctggcaccccaggcccagatggccagcccggcaccccaggcatcaagggggagaagggcctgcccggcctggccggggaccatggagaatttggagagaagggggaccccggcatccctggcaaccctgggaaggtgggccccaagggccccatgggccccaagggcggccctggggcccctggggcccctggccccaagggggagagcggggactacaaggccacccagaagatcgccttcagcgccaccaggaccatcaacgtgcccctgcggcgggaccagaccatccgctttgaccacgtgatcaccaacatgaacaacaactatgagcccaggtctgggaagttcacctgcaaggtgcccggcctgtactacttcacctaccacgccagcagccggggcaacctgtgtgtgaacctgatgaggggccgggagcgggcccagaaggtggtgaccttctgtgactatgcctacaacaccttccaggtgaccactggaggcatggtgctgaagctggagcagggagaaaatgtgttcctgcaggccacagacaagaacagctag

SEQ ID NO: 148158 - DNA, 756 bp, synthetic construct
  misc_feature 1..756: note = Description of Artificial Sequence: Synthetic coding sequence
  source 1..756: mol_type = other DNA
atgaagatcccctggggcagcatccctgtgctgatgctgctgctgctgctgggcctgattgacatcagccaggcccagctgagctgcaccggccccccagccatccctggcatccctggcatccctggcaccccaggcccagatggccagcccggcaccccaggcatcaagggggagaagggcctgcccggcctggccggggaccatggagaatttggagagaagggggaccccggcatccctggcaaccctgggaaggtgggccccaagggccccatgggccccaagggcggccctggggcccctggggcccctggccccaagggggagagcggggactacaaggccacccagaagatcgccttcagcgccaccaggaccatcaacgtgcccctgcggcgggaccagaccatccgctttgaccacgtgatcaccaacatgaacaacaactatgagcccaggtctgggaagttcacctgcaaggtgcccggcctgtactacttcacctaccacgccagcagccggggcaacctgtgtgtgaacctgatgaggggccgggagcgggcccagaaggtggtgaccttctgtgactatgcctacaacaccttccaggtgaccactggaggcatggtgctgaagctggagcagggagaaaatgtgttcctgcaggccacagacaagaacagcctgctgggcatggagggcgccaacagcatcttcagcggcttcctgctcttcccagacatggaggcctag

SEQ ID NO: 148159 - DNA, 462 bp, synthetic construct
  misc_feature 1..462: note = Description of Artificial Sequence: Synthetic coding sequence
  source 1..462: mol_type = other DNA
atgaagatcccctggggcagcatccctgtgctgatgctgctgctgctgctgggcctgattgacatcagccaggcccagctgagctgcaccggccccccagccatccctggcatccctggcatccctggcaccccaggcccagatggccagcccggcaccccaggcatcaagggggagaagggcctgcccggcctggccggggaccatggagaatttggagagaagggggaccccggcatccctggcaaccctgggaaggtgggccccaagggccccatgggccccaagggcggccctggggcccctggggcccctggccccaagggggagagcggggactacaaggccacccagaagatcgccttcagcgccaccaggaccatcaacgtgcccctgcggcgggaccagaccatccgctttgaccacgtgatcaccaacatgaacaacaactatgagccctag

SEQ ID NO: 148160 - DNA, 738 bp, synthetic construct
  misc_feature 1..738: note = Description of Artificial Sequence: Synthetic coding sequence
  source 1..738: mol_type = other DNA
atggatgtgggccccagcagcctgccccacctgggcctgaagctgctgctgctgctgctgctgctgcccctgcggggccaggccaacacaggctgctacggcatccctggcatgcctggcctgcccggggcccctgggaaggatggctatgatggcctgcccggccccaagggggagcccggcatcccagccatccctggcatccggggccccaagggccagaagggggagcccggcctgcccggccaccctgggaagaatggccccatgggccccccaggcatgcctggggtgcccggccccatgggcatccctggagagcccggggaggagggccgctacaagcagaagttccagagcgtcttcaccgtgacccggcagacccaccagcccccagcccccaacagcctcatccgcttcaatgctgtgctgaccaacccccagggcgactatgacaccagcacaggcaagttcacctgcaaggtgcccggcctgtactactttgtgtaccacgccagccacacagccaacctgtgtgtgctgctgtacagaagtggagtgaaggtggtgaccttctgtggccacaccagcaagaccaaccaggtgaacagcggcggcgtgctgctgcggctgcaggtgggggaggaggtgtggctggccgtgaatgactactatgacatggtgggcatccagggcagtgacagcgtcttcagcggcttcctgctcttcccagactag

SEQ ID NO: 148161 - DNA, 738 bp, synthetic construct; identical to SEQ ID NO: 148160
  misc_feature 1..738: note = Description of Artificial Sequence: Synthetic coding sequence
  source 1..738: mol_type = other DNA

SEQ ID NO: 148162 - DNA, 738 bp, synthetic construct; identical to SEQ ID NO: 148160
  misc_feature 1..738: note = Description of Artificial Sequence: Synthetic coding sequence
  source 1..738: mol_type = other DNA

SEQ ID NO: 148163 - DNA, 777 bp, synthetic construct
  misc_feature 1..777: note = Description of Artificial Sequence: Synthetic coding sequence
  source 1..777: mol_type = other DNA
atgctgctggtgctggtggtgctgatccctgtgctggtgtcctctgggggccctgagggccactatgagatgctgggcacctgcaggatggtgtgtgacccctacccagcccggggccctggggccggggccaggacagatggaggagatgccctgtctgagcagagcggggcccccccacccagcaccctggtgcagggcccccagggcaagccaggccgcacaggcaagccaggccccccaggccccccaggggaccccggccccccaggccctgtgggccccccaggagagaagggggagcccgggaagccaggccccccaggcctgcctggagctgggggcagcggggccatcagcacagccacctacaccaccgtgccccgggtggccttctacgccggcctgaagaacccccatgagggctatgaggtgctgaagtttgatgatgtggtgaccaacctgggcaacaactatgatgctgccagcggcaagttcacctgcaacatccctggcacctacttcttcacctaccacgtgctgatgagaggaggagatggcacctccatgtgggccgacctgtgcaagaatggccaggtgcgggccagcgccatcgcccaggatgctgaccagaactatgactatgccagcaacagcgtcatcctgcacctggatgctggagatgaggtgttcatcaagctggatggcggcaaggcccacggcggcaacagcaacaagtacagcaccttcagcggcttcatcatctacagcgactag

SEQ ID NO: 148164 - DNA, 864 bp, synthetic construct
  misc_feature 1..864: note = Description of Artificial Sequence: Synthetic coding sequence
  source 1..864: mol_type = other DNA
atggccctgggcctgctgattgctgtgcccctgctgctgcaggccgcccccaggggggccgcccactatgagatgatgggcacctgcaggatgatctgtgacccctacacagctgcccctggaggagagcccccaggggccaaggcccagcccccaggccccagcacagctgccctggaggtgatgcaggacctgagcgccaaccccccaccacccttcatccagggccccaagggggaccccggccggcctgggaagccaggcccccggggccccccaggagagcccggccccccaggcccccggggccccccaggagagaagggggacagcggccggcccggcctgcccggcctgcagctgacagctggaacagccagcggcgtgggcgtggtgggcggcggggccggcgtgggcggggacagcgagggggaggtgaccagcgccctgagcgccaccttcagcggccccaagatcgccttctacgtgggcctgaagagcccccatgagggctatgaggtgctgaagtttgatgatgtggtgaccaacctgggcaaccactatgaccccaccaccgggaagttcagctgccaggtgcggggcatctacttcttcacctaccacatcctgatgagaggaggagatggcacctccatgtgggccgacctgtgcaagaatggccaggtgcgggccagcgccatcgcccaggatgctgaccagaactatgactatgccagcaacagcgtggtgctgcacctggacagcggagatgaggtgtatgtgaagctggatggcggcaaggcccatggaggcaacaacaacaagtacagcaccttcagcggcttcctgctgtacccagactag

SEQ ID NO: 148165 - DNA, 2007 bp, synthetic construct
  misc_feature 1..2007: note = Description of Artificial Sequence: Synthetic coding sequence
  source 1..2007: mol_type = other DNA
atgtctgtgcgcttccgggtgggccgggaggagaatgcccagtggtggctgctgtacctgctggtgcctgccctcttctgcagagctgggggcagcatccccatcccccagaagctgtttggagaggtgaccagccccctcttccccaagccctaccccaacaactttgagaccaccaccgtcatcaccgtgcccaccggctacagagtgaagctggtgttccagcagtttgacctggagcccagcgagggctgcttctatgactatgtgaagatctctgctgacaagaagagcctgggccgcttctgtggccagctgggcagccccctgggcaaccccccaggcaagaaggagttcatgagccagggcaacaagatgctgctgaccttccacacagacttcagcaatgaggagaatggcaccatcatgttctacaagggcttcctggcctactaccaggccgtggacctggatgaatgtgccagccgcagcaagagcggggaggaggacccccagccccagtgccagcacctgtgccacaactacgtgggcggctacttctgcagctgccggcccggctatgagctgcaggaggacagacacagctgccaggccgagtgcagcagcgagctgtacacagaggccagcggctacatcagcagcctggagtaccccaggagctaccccccagacctgcgctgcaactacagcatccgggtggagcggggcctgaccctgcacctgaagttcctggagccctttgatattgatgaccaccagcaggtgcactgcccctatgaccagctgcagatctatgccaacgggaagaacatcggggagttctgtgggaagcagaggcccccagacctggacaccagcagcaatgctgtggacctgctcttcttcacagatgagagcggggacagccggggctggaagctgcgctacaccacagagatcatcaagtgcccccagcccaagaccctggatgagttcaccatcatccagaacctgcagccccagtaccagttccgggactacttcatcgccacctgcaagcagggctaccagctgattgagggcatccaggtggtggccggcgtggtggatgtgtctgctggccgggtgtcctggagcaccagcagccagacctgctgcaccagggtgtacacctgcacagcccagggcatctggaagaatgagcagaagggggagaagatcccccgctgcctgcctgtgtgtgggaagcctgtgaaccctgtggagcagaggcagaggatcatcggcggccagaaggccaagatgggcaacttcccctggcaggtgttcaccaacatccacggccggggcggcggggccctgctgggggaccgctggatcctgacagctgcccacaccctgtaccccaaggagcacgaggcccagagcaatgccagcctggatgtgttcctgggccacaccaacgtggaggagctgatgaagctgggcaaccaccccatcagaagagtgtctgtgcacccagactaccggcaggatgagagctacaactttgaaggagacatcgccctgctggagctggagaacagcgtgaccctgggccccaacctgctgcccatctgcctgcctgacaatgacaccttctatgacctgggcctgatgggctacgtgtctggctttggagtgatggaggagaagatcgcccatgacctgcgctttgtgcggctgcctgtggccaacccccaggcctgtgagaactggctgcggggcaagaacaggatggatgtgttcagccagaacatgttctgtgccggccaccccagcctgaagcaggatgcctgccagggcgacagcggaggagtgtttgctgtgcgggaccccaacacagaccgctgggtggccaccggcatcgtgtcctggggcatcggctgcagccggggctacggcttctacaccaaggtgctgaactacgtggactggatcaagaaggagatggaggaggaggactag

SEQ ID NO: 148166 - DNA, 1131 bp, synthetic construct
  misc_feature 1..1131: note = Description of Artificial Sequence: Synthetic coding sequence
  source 1..1131: mol_type = other DNA
atgtggctgctgtacctgctggtgcctgccctcttctgcagagctgggggcagcatccccatcccccagaagctgtttggagaggtgaccagccccctcttccccaagccctaccccaacaactttgagaccaccaccgtcatcaccgtgcccaccggctacagagtgaagctggtgttccagcagtttgacctggagcccagcgagggctgcttctatgactatgtgaagatctctgctgacaagaagagcctgggccgcttctgtggccagctgggcagccccctgggcaaccccccaggcaagaaggagttcatgagccagggcaacaagatgctgctgaccttccacacagacttcagcaatgaggagaatggcaccatcatgttctacaagggcttcctggcctactaccaggccgtggacctggatgaatgtgccagccgcagcaagagcggggaggaggacccccagccccagtgccagcacctgtgccacaactacgtgggcggctacttctgcagctgccggcccggctatgagctgcaggaggacagacacagctgccaggccgagtgcagcagcgagctgtacacagaggccagcggctacatcagcagcctggagtaccccaggagctaccccccagacctgcgctgcaactacagcatccgggtggagcggggcctgaccctgcacctgaagttcctggagccctttgatattgatgaccaccagcaggtgcactgcccctatgaccagctgcagatctatgccaacgggaagaacatcggggagttctgtgggaagcagaggcccccagacctggacaccagcagcaatgctgtggacctgctcttcttcacagatgagagcggggacagccggggctggaagctgcgctacaccacagagatcatcaagtgcccccagcccaagaccctggatgagttcaccatcatccagaacctgcagccccagtaccagttccgggactacttcatcgccacctgcaagcagggctaccagctgattgagggctgcaccccagcccagcaccgggccttcggccgcatgaacagaagagagcggcgcttcctgggcgcctgccagtgtgtgggcagcccctag

SEQ ID NO: 148167 - DNA, 1962 bp, synthetic construct
  misc_feature 1..1962: note = Description of Artificial Sequence: Synthetic coding sequence
  source 1..1962: mol_type = other DNA
tggctgctgtacctgctggtgcctgccctcttctgccgggccggcggcagcatccccatcccccagaagctgtttggagaggtgaccagccccctcttccccaagccctaccccaacaactttgagaccaccaccgtcatcaccgtgcccaccggctacagagtgaagctggtgttccagcagtttgacctggagcccagcgagggctgcttctatgactatgtgaagatctctgctgacaagaagagcctgggccgcttctgtggccagctgggcagccccctgggcaaccccccaggcaagaaggagttcatgagccagggcaacaagatgctgctgaccttccacacagacttcagcaatgaagaaaatggcaccatcatgttctacaagggcttcctggcctactaccaggccgtggacctggatgaatgtgccagccgcagcaagtctggagaggaggacccccagccccagtgccagcacctgtgccacaactacgtgggcggctacttctgcagctgcaggcctggctatgagctgcaggaggacagacacagctgccaggctgaatgtagcagcgagctgtacacagaggccagcggctacatcagcagcctggagtaccccaggagctaccccccagacctgcgctgcaactacagcatccgggtggagcggggcctgaccctgcacctgaagttcctggagccctttgatattgatgaccaccagcaggtgcactgcccctatgaccagctgcagatctatgccaacgggaagaacattggagagttctgtgggaagcagaggcccccagacctggacaccagcagcaatgctgtggacctgctcttcttcacagatgaaagtggggacagccggggctggaagctgcgctacaccacagagatcatcaagtgcccccagcccaagaccctggatgagttcaccatcatccagaacctgcagccccagtaccagttccgggactacttcatcgccacctgcaagcagggctaccagctgattgagggcatccaggtggtggccggcgtggtggatgtgtctgctggccgggtgtcctggagcaccagcagccagacctgctgcaccagggtgtacacctgcacagcccagggcatctggaagaatgagcagaagggggagaagatcccccgctgcctgcctgtgtgtgggaagcctgtgaaccctgtggagcagaggcagaggatcattggaggccagaaggccaagatgggcaacttcccctggcaggtgttcaccaacatccacggccggggcggcggggccctgctgggggaccgctggatcctgacagctgcccacaccctgtaccccaaggagcacgaggcccagagcaatgccagcctggatgtgttcctgggccacaccaacgtggaggagctgatgaagctgggcaaccaccccatccggcgggtgtctgtgcacccagactaccggcaggatgagagctacaactttgaaggagacatcgccctgctggagctggagaacagcgtgaccctgggccccaacctgctgcccatctgcctgcctgacaatgacaccttctatgacctgggcctgatgggctacgtgtctggcttcggcgtgatggaggagaagatcgcccatgacctgcgctttgtgcggctgcctgtggccaacccccaggcctgtgagaactggctgcggggcaagaacaggatggatgtgttcagccagaacatgttctgtgccggccaccccagcctgaagcaggatgcctgccagggcgacagcggcggcgtgtttgctgtgcgggaccccaacacagaccgctgggtggccactggaattgtgtcctggggcatcggctgcagccggggctacggcttctacaccaaggtgctgaactacgtggactggatcaagaaggagatggaggaggaggactag

SEQ ID NO: 148168 - DNA, 1464 bp, synthetic construct
  misc_feature 1..1464: note = Description of Artificial Sequence: Synthetic coding sequence
  source 1..1464: mol_type = other DNA
atgcctggcccccgggtgtggggcaagtacctgtggaggagcccccacagcaagggctgccctggggccatgtggtggctgctgctgtggggcgtgctgcaggcctgccccacccggggctctgtgctgctggcccaggagctgccccagcagctgaccagccctggctacccagagccctacggcaagggccaggagagcagcacagacatcaaggcccctgagggctttgctgtgcggctggtgttccaggactttgacctggagcccagccaggactgtgccggggacagcgtgaccatcagctttgtgggcagtgaccccagccagttctgtggccagcagggcagccccctgggccggcccccaggccagcgggagtttgtgagcagcggccgcagcctgcggctgaccttccgcacccagcccagcagcgagaacaagacagcccacctgcacaagggcttcctggccctgtaccagacagtggccgtgaactacagccagcccatcagcgaggccagccggggcagcgaggccatcaatgcccctggggacaacccagccaaggtgcagaaccactgccaggagccctactaccaggccgctgctgctggggccctgacctgtgccaccccaggcacctggaaggaccggcaggatggagaggaggtgctgcagtgcatgcctgtgtgtggccggcctgtgacccccatcgcccagaaccagaccaccctgggcagcagccgggccaagctgggcaacttcccctggcaggccttcaccagcatccacggccggggcggcggggccctgctgggggaccgctggatcctgacagctgcccacaccatctaccccaaggacagcgtgtccctgaggaagaaccagagcgtgaatgtgttcctgggccacacagccattgatgagatgctgaagctgggcaaccaccctgtgcaccgggtggtggtgcacccagactaccggcagaatgaaagccacaacttcagcggggacatcgccctgctggagctgcagcacagcatccccctgggccccaacgtgctgcctgtgtgcctgcctgacaatgagaccctgtacagaagtggcctgctgggctacgtgtctggcttcggcatggagatgggctggctgaccacagagctgaagtacagccggctgcctgtggccccccgggaggcctgcaatgcctggctgcagaagaggcagaggcctgaggtgttcagtgacaacatgttctgtgtgggagatgagacccagaggcacagcgtgtgccagggcgacagcggctctgtgtatgtggtgtgggacaaccacgcccaccactgggtggccactggaattgtgtcctggggcatcggctgtggggagggctatgacttctacaccaaggtgctgtcctatgtggactggatcaagggcgtgatgaatggcaagaactag

SEQ ID NO: 148169 - DNA, 1317 bp, synthetic construct
  misc_feature 1..1317: note = Description of Artificial Sequence: Synthetic coding sequence
  source 1..1317: mol_type = other DNA
atgcctggcccccgggtgtggggcaagtacctgtggaggagcccccacagcaagggctgccctggggccatgtggtggctgctgctgtggggcgtgctgcaggcctgccccacccggggctctgtgctgctggcccaggagctgccccagcagctgaccagccctggctacccagagccctacggcaagggccaggagagcagcacagacatcaaggcccctgagggctttgctgtgcggctggtgttccaggactttgacctggagcccagccaggactgtgccggggacagcgtgaccatcagctttgtgggcagtgaccccagccagttctgtggccagcagggcagccccctgggccggcccccaggccagcgggagtttgtgagcagcggccgcagcctgcggctgaccttccgcacccagcccagcagcgagaacaagacagcccacctgcacaagggcttcctggccctgtaccagacagtggccgtgaactacagccagcccatcagcgaggccagccggggcagcgaggccatcaatgcccctggggacaacccagccaaggtgcagaaccactgccaggagccctactaccaggccgctgctgctggggccctgacctgtgccaccccaggcacctggaaggaccggcaggatggagaggaggtgctgcagtgcatgcctgtgtgtggccggcctgtgacccccatcgcccagaaccagaccaccctgggcagcagccgggccaagctgggcaacttcccctggcaggccttcaccagcatccacggccggggcggcggggccctgctgggggaccgctggatcctgacagctgcccacaccatctaccccaaggacagcgtgtccctgaggaagaaccagagcgtgaatgtgttcctgggccacacagccattgatgagatgctgaagctgggcaaccaccctgtgcaccgggtggtggtgcacccagactaccggcagaatgaaagccacaacttcagcggggacatcgccctgctggagctgcagcacagcatccccctgggccccaacgtgctgcctgtgtgcctgcctgacaatgagaccctgtacagaagtggcctgctgggctacgtgtctggcttcggcatggagatgggctggctgaccacagagctgaagtacagccggctgcctgtggccccccgggaggcctgcaatgcctggctgcagaagaggcagaggcctgaggtgttcagtgacaacatgttctgtgtgggagatgaggccggggagagcctggagcccggcagaagaaggctgcagtag

SEQ ID NO: 148170 - DNA, 2067 bp, synthetic construct
  misc_feature 1..2067: note = Description of Artificial Sequence: Synthetic coding sequence
  source 1..2067: mol_type = other DNA
atgtggtgcatcgtgctcttcagcctgctggcctgggtgtatgcagagcccaccatgtacggggagatcctgagccccaactacccccaggcctaccccagcgaggtggagaagtcctgggacatcgaggtgcctgagggctacggcatccacctgtacttcacccacctggacatcgagctgtctgagaactgtgcctatgattctgtgcagatcatcagcggggacacagaggagggccgcctgtgtggccagaggagcagcaacaacccccacagccccatcgtggaggagttccaggtgccctacaacaagctgcaggtgatcttcaagagtgacttcagcaatgaggagcgcttcaccggctttgctgcctactacgtggccacagacatcaatgaatgtacagactttgtggatgtgccctgcagccacttctgcaacaacttcatcggcggctacttctgcagctgccccccagagtacttcctgcatgatgacatgaagaactgtggggtgaactgcagcggagatgtgttcaccgccctgattggagaaattgccagccccaactaccccaagccctacccagagaacagccgctgtgagtaccagatccggctggagaagggcttccaggtggtggtgaccctgcggagagaagattttgatgtggaggccgctgacagcgctggcaactgcctggacagcctggtgtttgtggccggggaccggcagtttggcccctactgcggccacggcttccctggccccctgaacatcgagaccaagagcaatgccctggacatcatcttccagacagacctgaccggccagaagaagggctggaagctgcgctaccacggggaccccatgccctgccccaaggaggacacccccaacagcgtgtgggagcccgccaaggccaagtatgtgttcagagatgtggtgcagatcacctgcctggatggctttgaggtggtggagggccgggtgggcgccaccagcttctacagcacctgccagagcaatggcaagtggagcaacagcaagctgaagtgccagcctgtggactgtggcatccctgagagcattgaaaatggcaaggtggaggaccctgagagcaccctgtttggcagcgtcatccgctacacctgtgaggagccctactactacatggagaatggaggcggcggggagtaccactgtgctggaaatggctcctgggtgaatgaggtgctgggccctgagctgcccaagtgtgtgcctgtgtgtggggtgccccgggagccctttgaggagaagcagaggatcattggaggcagtgatgctgacatcaagaacttcccctggcaggtgttctttgacaacccctgggccggcggggccctgatcaatgagtactgggtgctgacagctgcccacgtggtggagggcaaccgggagcccaccatgtatgtgggcagcacctctgtgcagaccagccggctggccaagagcaagatgctgaccccagagcacgtgttcatccaccctggctggaagctgctggaggtgcctgagggccgcaccaactttgacaatgacatcgccctggtgcggctgaaggaccctgtgaagatgggccccaccgtgagccccatctgcctgcccggcaccagcagtgactacaacctgatggatggagacctgggcctcatcagcggctggggccgcacagagaagagggacagagctgtgcggctgaaggccgcccggctgcctgtggcccccctgaggaagtgcaaggaggtgaaggtggagaagcccacagcagatgctgaggcctacgtgttcacccccaacatgatctgtgccggcggggagaagggcatggacagctgcaagggggacagcggcggggcctttgctgtgcaggaccccaatgacaagaccaagttctatgctgctggcctggtgtcctggggcccccagtgtggcacctacggcctgtacaccagggtgaagaactacgtggactggatcatgaagaccatgcaggagaacagcaccccaagagaagattag

SEQ ID NO: 148171 - DNA, 2067 bp, synthetic construct; identical to SEQ ID NO: 148170
  misc_feature 1..2067: note = Description of Artificial Sequence: Synthetic coding sequence
  source 1..2067: mol_type = other DNA

SEQ ID NO: 148172 - DNA, 2049 bp, synthetic construct
  misc_feature 1..2049: note = Description of Artificial Sequence: Synthetic coding sequence
  source 1..2049: mol_type = other DNA
atgtacggggagatcctgagccccaactacccccaggcctaccccagcgaggtggagaagtcctgggacatcgaggtgcctgagggctacggcatccacctgtacttcacccacctggacatcgagctgtctgagaactgtgcctatgattctgtgcagatcatcagcggggacacagaggagggccgcctgtgtggccagaggagcagcaacaacccccacagccccatcgtggaggagttccaggtgccctacaacaagctgcaggtgatcttcaagagtgacttcagcaatgaggagcgcttcaccggctttgctgcctactacgtggccacagacaaggatgagtgcagcggccgggcccagctgtggaaccacatgtctgatgtgccctgcagccacttctgcaacaacttcatcggcggctacttctgcagctgccccccagagtacttcctgcatgatgacatgaagaactgtggggtgaactgcagcggagatgtgttcaccgccctgattggagagatcgccagccccaactaccccaagccctacccagagaacagccgctgtgagtaccagatccggctggagaagggcttccaggtgcacctgagcctgctgctgaagctggagtgcagcggggccatcacagcccactgcagcctggacctgctgggcagcattgctggggaccggcagtttggcccctactgcggccacggcttccctggccccctgaacatcgagaccaagagcaatgccctggacatcatcttccagacagacctgaccggccagaagaagggctggaagctgcgctaccacggggaccccatgccctgccccaaggaggacacccccaacagcgtgtgggagcccgccaaggccaagtatgtgttcagagatgtggtgcagatcacctgcctggatggctttgaggtggtggagggccgggtgggcgccaccagcttctacagcacctgccagagcaatggcaagtggagcaacagcaagctgaagtgccagcctgtggactgtggcatccctgagagcattgaaaatggcaaggtggaggaccctgagagcaccctgtttggcagcgtcatccgctacacctgtgaggagccctactactacatggagaatggaggcggcggggaggagcgggagcggggggagtaccactgtgctggaaatggctcctgggtgaatgaggtgctgggccctgagctgcccaagtgtgtgcctgtgtgtggggtgccccgggagccctttgaggagaagcagaggatcattggaggcagtgatgctgacatcaagaacttcccctggcaggtgttctttgacaacccctgggccggcggggccctgatcaatgagtactgggtgctgacagctgcccacgtggtggagggcaaccgggagcccaccatgtatgtgggcagcacctctgtgcagaccagccggctggccaagagcaagatgctgaccccagagcacgtgttcatccaccctggctggaagctgctggaggtgcctgagggccgcaccaactttgacaatgacatcgccctggtgcggctgaaggaccctgtgaagatgggccccaccgtgagccccatctgcctgcccggcaccagcagtgactacaacctgatggatggagacctgggcctcatcagcggctggggccgcacagagaagagggacagagctgtgcggctgaaggccgcccggctgcctgtggcccccctgaggaagtgcaaggaggtgaaggtggagaagcccacagcagatgctgaggcctacgtgttcacccccaacatgatctgtgccggcggggagaagggcatggacagctgcaagggggacagcggcggggcctttgctgtgcaggaccccaatgacaagaccaagttctatgctgctggcctggtgtcctggggcccccagtgtggcacctacggcctgtacaccagggtgaagaactacgtggactggatcatgaagaccatgcaggagaacagcaccccaagagaagattag

SEQ ID NO: 148173 - DNA, 507 bp, synthetic construct
  misc_feature 1..507: note = Description of Artificial Sequence: Synthetic coding sequence
  source 1..507: mol_type = other DNA
atgtggtgcatcgtgctcttcagcctgctggcctgggtgtatgcagagcccaccatgtacggggagatcctgagccccaactacccccaggcctaccccagcgaggtggagaagtcctgggacatcgaggtgcctgagggctacggcatccacctgtacttcacccacctggacatcgagctgtctgagaactgtgcctatgattctgtgcagatcatcagcggggacacagaggagggccgcctgtgtggccagaggagcagcaacaacccccacagccccatcgtggaggagttccaggtgccctacaacaagctgcaggtgatcttcaagagtgacttcagcaatgaggagcgcttcaccggctttgctgcctactacgtggccacagacatcaatgaatgtacagactttgtggatgtgccctgcagccacttctgcaacaacttcatcggcggctacttctgcagctgccccccagagtacttcctgcatgatgacatgtag

SEQ ID NO: 148174 - DNA, 2067 bp, synthetic construct; identical to SEQ ID NO: 148170
  misc_feature 1..2067: note = Description of Artificial Sequence: Synthetic coding sequence
  source 1..2067: mol_type = other DNA

SEQ ID NO: 148175 - DNA, 312 bp, synthetic construct
  misc_feature 1..312: note = Description of Artificial Sequence: Synthetic coding sequence
  source 1..312: mol_type = other DNA
atgtggtgcatcgtgctcttcagcctgctggcctgggtgtatgcagagcccaccatgtacggggagatcctgagccccaactacccccaggcctaccccagcgaggtggagaagtcctgggacatcgaggtgcctgagggctacggcatccacctgtacttcacccacctggacatcgagctgtctgagaactgtgcctatgattctgtgcagatcatcagcggggacacagaggagggccgcctgtgtggccagaggagcagcaacaacccccacagccccatcgtggaggagttccaggtgccctactag

SEQ ID NO: 148176 - DNA, 306 bp, synthetic construct
  misc_feature 1..306: note = Description of Artificial Sequence: Synthetic coding sequence
  source 1..306: mol_type = other DNA
atgtggtgcatcgtgctcttcagcctgctggcctgggtgtatgcagagcccaccatgtacggggagatcctgagccccaactacccccaggcctaccccagcgaggtggagaagtcctgggacatcgaggtgcctgagggctacggcatccacctgtacttcacccacctggacatcgagctgtctgagaactgtgcctatgattctgtgcagatcatcagcggggacacagaggagggccgcctgtgtggccagaggagcagcaacaacccccacagccccatcgtggaggagttccaggtgtag

SEQ ID NO: 148177 - DNA, 2259 bp, synthetic construct
  misc_feature 1..2259: note = Description of Artificial Sequence: Synthetic coding sequence
  source 1..2259: mol_type = other DNA
atgggccccctgatggtgctcttctgcctgctcttcctgtacccaggcctggccgacagcgcccccagctgcccccagaatgtgaacatcagcggcggcaccttcaccctgagccacggctgggcccctggcagcctgctgacctacagctgcccccagggcctgtaccccagccctgccagccggctgtgcaagagcagcggccagtggcagacccctggggccaccaggagcctgagcaaggctgtgtgcaagcctgtgcgctgcccagcccctgtgtcctttgaaaatggcatctacaccccccggctgggcagctaccctgtgggcggcaatgtgtcctttgaatgtgaagatggcttcatcctgcggggcagccctgtgcggcagtgccggcccaacggcatgtgggatggagaaacagctgtgtgtgacaacggggccggccactgccccaaccctggcatcagcctgggcgctgtgaggacaggcttccgctttggacatggagacaaggtgcgctaccgctgcagcagcaacctggtgctgaccggcagcagcgagcgggagtgccagggcaatggagtgtggagcggcacagagcccatctgccggcagccctacagctatgacttcccagaagatgtggccccagccctgggcaccagcttcagccacatgctgggcgccaccaaccccacccagaagaccaaggagagcctgggcaggaagatccagatccagaggagcggccacctgaacctgtacctgctgctggactgcagccagagcgtgtctgaaaatgacttcctgatcttcaaggagagcgccagcctgatggtggaccgcatcttctcctttgagatcaacgtgtctgtggccatcatcacctttgccagcgagcccaaggtgctgatgtctgtgctgaatgacaacagccgggacatgacagaggtgatcagcagcctggagaatgccaactacaaggaccatgaaaatggaacaggcaccaacacctatgctgccctgaacagcgtgtacctgatgatgaacaaccagatgaggctgctgggcatggagaccatggcctggcaggagatcagacatgccatcatcctgctgacagatggcaagagcaacatgggcggcagccccaagacagctgtggaccacatccgggagatcctgaacatcaaccagaagagaaatgactacctggacatctatgccatcggcgtgggcaagctggatgtggactggagggagctgaatgagctgggcagcaagaaggatggagagagacatgccttcatcctgcaggacaccaaggccctgcaccaggtgtttgagcacatgctggatgtgtccaagctgacagacaccatctgtggggtgggcaacatgtctgccaatgccagtgaccaggagaggaccccctggcacgtgaccatcaagcccaagagccaggagacctgccgcggggccctgatcagtgaccagtgggtgctgacagctgcccactgcttcagagatggaaatgaccacagcctgtggagggtgaatgtgggggaccccaagagccagtggggcaaggagttcctgattgagaaggccgtcatcagccctggctttgatgtgtttgccaagaagaaccagggcatcctggagttctatggagatgacatcgccctgctgaagctggcccagaaggtgaagatgagcacccacgcccggcccatctgcctgccctgcaccatggaggccaacctggccctgcggcggccccagggcagcacctgccgggaccatgaaaatgagctgctgaacaagcagagcgtgcctgcccactttgtggccctgaatggcagcaagctgaacatcaacctgaagatgggcgtggagtggaccagctgtgccgaggtggtgtcccaggagaagaccatgttccccaacctgacagatgtgcgggaggtggtgacagaccagttcctgtgcagcggcacccaggaggatgagagcccctgcaagggggagagcggcggcgctgtgttcctggagcggcgcttccgcttcttccaggtgggcctggtgtcctggggcctgtacaacccctgcctgggcagcgctgacaagaacagcaggaagagggcccccaggagcaaggtgcccccaccccgggacttccacatcaacctcttcaggatgcagccctggctgcggcagcacctgggagatgtgctgaacttcctgcccctgtag

SEQ ID NO: 148178 - DNA, 1134 bp, synthetic construct
  misc_feature 1..1134: note = Description of Artificial Sequence: Synthetic coding sequence
  source 1..1134: mol_type = other DNA
atgacagaggtgatcagcagcctggagaatgccaactacaaggaccatgaaaatggcaccggcaccaacacctacgccgccctgaacagcgtgtacctgatgatgaacaaccagatgaggctgctgggcatggagaccatggcctggcaggagatcagacatgccatcatcctgctgacagatggcaagagcaacatgggcggcagccccaagacagctgtggaccacatccgggagatcctgaacatcaaccagaagagaaatgactacctggacatctatgccatcggcgtgggcaagctggatgtggactggagggagctgaatgagctgggcagcaagaaggatggagagagacatgccttcatcctgcaggacaccaaggccctgcaccaggtgtttgagcacatgctggatgtgtccaagctgacagacaccatctgtggggtgggcaacatgtctgccaatgccagtgaccaggagaggaccccctggcacgtgaccatcaagcccaagagccaggagacctgccgcggggccctgatcagtgaccagtgggtgctgacagctgcccactgcttcagagatggaaatgaccacagcctgtggagggtgaatgtgggggaccccaagagccagtggggcaaggagttcctgattgagaaggctgtgatcagccctggctttgatgtgtttgccaagaagaaccagggcatcctggagttctatggagatgacatcgccctgctgaagctggcccagaaggtgaagatgagcacccacgcccggcccatctgcctgccctgcaccatggaggccaacctggccctgcggcggccccagggcagcacctgccgggaccatgaaaatgagctgctgaacaagcagagcgtgcctgcccactttgtggccctgaatggcagcaagctgaacatcaacctgaagatgggcgtggagtggaccagctgtgccgaggtggtgtcccaggagaagaccatgttccccaacctgacagatgtgcgggaggtggtgacagaccagttcctgtgcagcggcacccaggaggatgagagcccctgcaagggcggcagcggggagctgggcagcctgcagcccctgccctggctgtgctag

SEQ ID NO: 148179 - DNA, 2259 bp, synthetic construct; identical to SEQ ID NO: 148177
  misc_feature 1..2259: note = Description of Artificial Sequence: Synthetic coding sequence
  source 1..2259: mol_type = other DNA

SEQ ID NO: 148180 - DNA, 1578 bp, synthetic construct
  misc_feature 1..1578: note = Description of Artificial Sequence: Synthetic coding sequence
  source 1..1578: mol_type = other DNA
atggtgctcttctgcctgctcttcctgtacccagctggccactgccccaaccctggcatcagcctgggcgctgtgaggacaggcttccgctttggacatggagacaaggtgcgctaccgctgcagcagcaacctggtgctgaccggcagcagcgagcgggagtgccagggcaatggagtgtggagcggcacagagcccatctgccggcagccctacagctatgacttcccagaagatgtggccccagccctgggcaccagcttcagccacatgctgggcgccaccaaccccacccagaagaccaaggaccatgaaaatggcaccggcaccaacacctacgccgccctgaacagcgtgtacctgatgatgaacaaccagatgaggctgctgggcatggagaccatggcctggcaggagatcagacatgccatcatcctgctgacagatggcaagagcaacatgggcggcagccccaagacagctgtggaccacatccgggagatcctgaacatcaaccagaagagaaatgactacctggacatctatgccatcggcgtgggcaagctggatgtggactggagggagctgaatgagctgggcagcaagaaggatggagagagacatgccttcatcctgcaggacaccaaggccctgcaccaggtgtttgagcacatgctggatgtgtccaagctgacagacaccatctgtggggtgggcaacatgtctgccaatgccagtgaccaggagaggaccccctggcacgtgaccatcaagcccaagagccaggagacctgccgcggggccctgatcagtgaccagtgggtgctgacagctgcccactgcttcagagatggaaatgaccacagcctgtggagggtgaatgtgggggaccccaagagccagtggggcaaggagttcctgattgagaaggctgtgatcagccctggctttgatgtgtttgccaagaagaaccagggcatcctggagttctatggagatgacatcgccctgctgaagctggcccagaaggtgaagatgagcacccacgcccggcccatctgcctgccctgcaccatggaggccaacctggccctgcggcggccccagggcagcacctgccgggaccatgaaaatgagctgctgaacaagcagagcgtgcctgcccactttgtggccctgaatggcagcaagctgaacatcaacctgaagatgggcgtggagtggaccagctgtgccgaggtggtgtcccaggagaagaccatgttccccaacctgacagatgtgcgggaggtggtgacagaccagttcctgtgcagcggcacccaggaggatgagagcccctgcaagggggagagcggcggcgctgtgttcctggagcggcgcttccgcttcttccaggtgggcctggtgtcctggggcctgtacaacccctgcctgggcagcgctgacaagaacagcaggaagagggcccccaggagcaaggtgcccccaccccgggacttccacatcaacctcttcaggatgcagccctggctgcggcagcacctgggagatgtgctgaacttcctgcccctgtag

SEQ ID NO: 148181 - DNA, 2259 bp, synthetic construct; identical to SEQ ID NO: 148177
  misc_feature 1..2259: note = Description of Artificial Sequence: Synthetic coding sequence
  source 1..2259: mol_type = other DNA

SEQ ID NO: 148182 - DNA, 1578 bp, synthetic construct; identical to SEQ ID NO: 148180
  misc_feature 1..1578: note = Description of Artificial Sequence: Synthetic coding sequence
  source 1..1578: mol_type = other DNA

SEQ ID NO: 148183 - DNA, 2259 bp, synthetic construct; identical to SEQ ID NO: 148177
  misc_feature 1..2259: note = Description of Artificial Sequence: Synthetic coding sequence
  source 1..2259: mol_type = other DNA

SEQ ID NO: 148184 - DNA, 420 bp, synthetic construct
  misc_feature 1..420: note = Description of Artificial Sequence: Synthetic coding sequence
  source 1..420: mol_type = other DNA
atgggccccctgatggtgctcttctgcctgctcttcctgtacccaggcctggccgacagcgcccccagctgcccccagaatgtgaacatcagcggcggcaccttcaccctgagccacggctgggcccctggcagcctgctgacctacagctgcccccagggcctgtaccccagccctgccagccggctgtgcaagagcagcggccagtggcagacccctggggccaccaggagcctgagcaaggctgtgtgcaagcctgtgcgctgcccagcccctgtgtcctttgaaaatggcatctacaccccccggctgggcagctaccctgtgggcggcaatgtgtcctttgaatgtgaagatggcttcatcctgcggggcagccctgtgcggcagtgccggcccaacggcatgtgggatggatag

SEQ ID NO: 148185 - DNA, 510 bp, synthetic construct
  misc_feature 1..510: note = Description of Artificial Sequence: Synthetic coding sequence
  source 1..510: mol_type = other DNA
atgagggccctgtgcatccgggagacctgcagcagcgagctgggcttcagcaggaactggagcaggaggaaggccggccactgccccaaccctggcatcagcctgggcgctgtgaggacaggcttccgcttcggccacggggacaaggtgcgctaccgctgcagcagcaacctggtgctgaccggcagcagcgagcgggagtgccagggcaatggagtgtggagcggcacagagcccatctgccggcagccctacagctatgacttcccagaagatgtggccccagccctgggcaccagcttcagccacatgctgggcgccaccaaccccacccagaagaccaaggaccatgaaaatggaacaggcaccaacacctatgctgccctgaacagcgtgtacctgatgatgaacaaccagatgaggctgctgggcatggagaccatggcctggcaggagatcagacatgccatcatcctgctgacagatggcaagagcaacatgggcggctag

SEQ ID NO: 148186 - DNA, 420 bp, synthetic construct; identical to SEQ ID NO: 148184
  misc_feature 1..420: note = Description of Artificial Sequence: Synthetic coding sequence
  source 1..420: mol_type = other DNA

SEQ ID NO: 148187 - DNA, 2259 bp, synthetic construct; identical to SEQ ID NO: 148177
  misc_feature 1..2259: note = Description of Artificial Sequence: Synthetic coding sequence
  source 1..2259: mol_type = other DNA

SEQ ID NO: 148188 - DNA, 378 bp, synthetic construct
  misc_feature 1..378: note = Description of Artificial Sequence: Synthetic coding sequence
  source 1..378: mol_type = other DNA
atgggccccctgatggtgctcttctgcctgctcttcctgtacccaggcctggccgacagcgcccccagctgcccccagaatgtgaacatcagcggcggcaccttcaccctgagccacggctgggcccctggcagcctgctgacctacagctgcccccagggcctgtaccccagccctgccagccggctgtgcaagagcagcggccagtggcagacccctggggccaccaggagcctgagcaaggctgtgtgcaagccaggccactgccccaaccctggcatcagcctgggcgctgtgaggacaggcttccgctttggacatggagacaaggtgcgctaccgctgcagcagcaacctggtgctgaccggcagcagctag

SEQ ID NO: 148189 - DNA, 510 bp, synthetic construct; identical to SEQ ID NO: 148185
  misc_feature 1..510: note = Description of Artificial Sequence: Synthetic coding sequence
  source 1..510: mol_type = other DNA

SEQ ID NO: 148190 - DNA, 1062 bp, synthetic construct
  misc_feature 1..1062: note = Description of Artificial Sequence: Synthetic coding sequence
  source 1..1062: mol_type = other DNA
atgggccccctgatggtgctcttctgcctgctcttcctgtacccagctggccactgccccaaccctggcatcagcctgggcgctgtgaggacaggcttccgctttggacatggagacaaggtgcgctaccgctgcagcagcaacctggtgctgaccggcagcagcgagcgggagtgccagggcaatggagtgtggagcggcacagagcccatctgccggcagccctacagctatgacttcccagaagatgtggccccagccctgggcaccagcttcagccacatgctgggcgccaccaaccccacccagaagaccaaggagagcctgggcaggaagatccagatccagaggagcggccacctgaacctgtacctgctgctggactgcagccagagcgtgtctgaaaatgacttcctgatcttcaaggagagcgccagcctgatggtggaccgcatcttctcctttgagatcaacgtgtctgtggccatcatcacctttgccagcgagcccaaggtgctgatgtctgtgctgaatgacaacagccgggacatgacagaggtgatcagcagcctggagaatgccaactacaaggaccatgaaaatggaacaggcaccaacacctatgctgccctgaacagcgtgtacctgatgatgaacaaccagatgaggctgctgggcatggagaccatggcctggcaggagatcagacatgccatcatcctgctgacagatggcaagagcaacatgggcggcagccccaagacagctgtggaccacatccgggagatcctgaacatcaaccagaagagaaatgactacctggacatctatgccatcggcgtgggcaagctggatgtggactggagggagctgaatgagctgggcagcaagaaggatggagagagacatgccttcatcctgcaggacaccaaggccctgcaccaggtgtttgagcacatgctggatgtgtccaagctgacagacaccatctgtggggtgggcaacatgtctgccaatgccagtgaccaggagaggaccccctggcacgtgaccatcaagtag

SEQ ID NO: 148191 - DNA, 2259 bp, synthetic construct; identical to SEQ ID NO: 148177
  misc_feature 1..2259: note = Description of Artificial Sequence: Synthetic coding sequence
  source 1..2259: mol_type = other DNA

SEQ ID NO: 148192 - DNA, 1062 bp, synthetic construct; identical to SEQ ID NO: 148190
  misc_feature 1..1062: note = Description of Artificial Sequence: Synthetic coding sequence
  source 1..1062: mol_type = other DNA

SEQ ID NO: 148193 - DNA, 1062 bp, synthetic construct; identical to SEQ ID NO: 148190
  misc_feature 1..1062: note = Description of Artificial Sequence: Synthetic coding sequence
  source 1..1062: mol_type = other DNA

SEQ ID NO: 148194 - DNA, 510 bp, synthetic construct; identical to SEQ ID NO: 148185
  misc_feature 1..510: note = Description of Artificial Sequence: Synthetic coding sequence
  source 1..510: mol_type = other DNA

SEQ ID NO: 148195 - DNA, 1578 bp, synthetic construct; identical to SEQ ID NO: 148180
  misc_feature 1..1578: note = Description of Artificial Sequence: Synthetic coding sequence
  source 1..1578: mol_type = other DNA

SEQ ID NO: 148196 - DNA, 1062 bp, synthetic construct; identical to SEQ ID NO: 148190
  misc_feature 1..1062: note = Description of Artificial Sequence: Synthetic coding sequence
  source 1..1062: mol_type = other DNA

SEQ ID NO: 148197 - DNA, 405 bp, synthetic construct
  misc_feature 1..405: note = Description of Artificial Sequence: Synthetic coding sequence
  source 1..405: mol_type = other DNA
tgaggccactgccccaaccctggcatcagcctgggcgctgtgaggacaggcttccgcttcggccacggggacaaggtgcgctaccgctgcagcagcaacctggtgctgaccggcagcagcgagcgggagtgccagggcaatggagtgtggagcggcacagagcccatctgccggcagccctacagctatgacttcccagaagatgtggccccagccctgggcaccagcttcagccacatgctgggcgccaccaaccccacccagaagaccaaggagagcctgggcaggaagatccagatccagaggagcggccacctgaacctgtacctgctgctggactgcagccagagcgtgtctgaaaatgacttcctgatcttcaaggagagcgccagcctgatggtgtag

SEQ ID NO: 148198 - DNA, 1578 bp, synthetic construct; identical to SEQ ID NO: 148180
  misc_feature 1..1578: note = Description of Artificial Sequence: Synthetic coding sequence
  source 1..1578: mol_type = other DNA

SEQ ID NO: 148199 - DNA, 1578 bp, synthetic construct; identical to SEQ ID NO: 148180
  misc_feature 1..1578: note = Description of Artificial Sequence: Synthetic coding sequence
  source 1..1578: mol_type = other DNA

SEQ ID NO: 148200 - DNA, 1062 bp, synthetic construct; identical to SEQ ID NO: 148190
  misc_feature 1..1062: note = Description of Artificial Sequence: Synthetic coding sequence
  source 1..1062: mol_type = other DNA

SEQ ID NO: 148201 - DNA, 477 bp, synthetic construct
  misc_feature 1..477: note = Description of Artificial Sequence: Synthetic coding sequence
  source 1..477: mol_type = other DNA
atgagggccctgtgcatccgggagacctgcagcagcgagctgggcttcagcaggaactggagcaggaggaaggccggccactgccccaaccctggcatcagcctgggcgctgtgaggacaggcttccgcttcggccacggggacaaggtgcgctaccgctgcagcagcaacctggtgctgaccggcagcagcgagcgggagtgccagggcaatggagtgtggagcggcacagagcccatctgccggcagccctacagctatgacttcccagaagatgtggccccagccctgggcaccagcttcagccacatgctgggcgccaccaaccccacccagaagaccaaggagagcctgggcaggaagatccagatccagaggagcggccacctgaacctgtacctgctgctggactgcagccagagcgtgtctgaaaatgacttcctgatcttcaaggagagcgccagcctgatggtgtag

SEQ ID NO: 148202 - DNA, 477 bp, synthetic construct; identical to SEQ ID NO: 148201
  misc_feature 1..477: note = Description of Artificial Sequence: Synthetic coding sequence
  source 1..477: mol_type = other DNA

SEQ ID NO: 148203 - DNA, 978 bp, synthetic construct
  misc_feature 1..978: note = Description of Artificial Sequence: Synthetic coding sequence
  source 1..978: mol_type = other DNA
atgggcaccaggtctgccatcgccgccccccgcatcctgtgcagccggggcctgcggagcggcagcgcccgggccaccggcagcggcgtggagaggagccccagcgctgccaaccccaccctgatgaccagcctgcggacctggcccctgccctgggccctgcccagccccacctgcctgggcccccccatccccccccggcggcagaggatcttctcctttgagatcaacgtgtctgtggccatcatcacctttgccagcgagcccaaggtgctgatgtctgtgctgaatgacaacagccgggacatgacagaggtgatcagcagcctggagaatgccaactacaaggaccatgaaaatggcaccggcaccaacacctacgccgccctgaacagcgtgtacctgatgatgaacaaccagatgaggctgctgggcatggagaccatggcctggcaggagatcagacatgccatcatcctgctgacagatggcaagagcaacatgggcggcagccccaagacagctgtggaccacatccgggagatcctgaacatcaaccagaagagaaatgactacctggacatctatgccatcggcgtgggcaagctggatgtggactggagggagctgaatgagctgggcagcaagaaggatggagagagacatgccttcatcctgcaggacaccaaggccctgcaccaggtgtttgagcacatgctggatgtgtccaagctgacagacaccatctgtggggtgggcaacatgtctgccaatgccagtgaccaggagaggaccccctggcacgtgaccatcaagcccaagagccaggagacctgccgcggggccctgatcagtgaccagtgggtgctgacagctgcccactgcttcagagatggaaatgaccacagcctgtggagggtgaatgtgggggaccccaagagccagtggggcaaggagttcctgattgagaaggcctag

SEQ ID NO: 148204 - DNA, 477 bp, synthetic construct; identical to SEQ ID NO: 148201
  misc_feature 1..477: note = Description of Artificial Sequence: Synthetic coding sequence
  source 1..477: mol_type = other DNA

SEQ ID NO: 148205 - DNA, 1062 bp, synthetic construct; identical to SEQ ID NO: 148190
  misc_feature 1..1062: note = Description of Artificial Sequence: Synthetic coding sequence
  source 1..1062: mol_type = other DNA

SEQ ID NO: 148206 - DNA, 420 bp, synthetic construct; identical to SEQ ID NO: 148184
  misc_feature 1..420: note = Description of Artificial Sequence: Synthetic coding sequence
  source 1..420: mol_type = other DNA

SEQ ID NO: 148207 - DNA, 438 bp, synthetic construct
  misc_feature 1..438: note = Description of Artificial Sequence: Synthetic coding sequence
  source 1..438: mol_type = other DNA
tgaggccactgccccaaccctggcatcagcctgggcgctgtgaggacaggcttccgcttcggccacggggacaaggtgcgctaccgctgcagcagcaacctggtgctgaccggcagcagcgagcgggagtgccagggcaatggagtgtggagcggcacagagcccatctgccggcagccctacagctatgacttcccagaagatgtggccccagccctgggcaccagcttcagccacatgctgggcgccaccaaccccacccagaagaccaaggaccatgaaaatggaacaggcaccaacacctatgctgccctgaacagcgtgtacctgatgatgaacaaccagatgaggctgctgggcatggagaccatggcctggcaggagatcagacatgccatcatcctgctgacagatggcaagagcaacatgggcggctag

SEQ ID NO: 148208 - DNA, 378 bp, synthetic construct; identical to SEQ ID NO: 148188
  misc_feature 1..378: note = Description of Artificial Sequence: Synthetic coding sequence
  source 1..378: mol_type = other DNA

SEQ ID NO: 148209 - DNA, 420 bp, synthetic construct; identical to SEQ ID NO: 148184
  misc_feature 1..420: note = Description of Artificial Sequence: Synthetic coding sequence
  source 1..420: mol_type = other DNA

SEQ ID NO: 148210 - DNA, 477 bp, synthetic construct; identical to SEQ ID NO: 148201
  misc_feature 1..477: note = Description of Artificial Sequence: Synthetic coding sequence
  source 1..477: mol_type = other DNA

SEQ ID NO: 148211 - DNA, 378 bp, synthetic construct; identical to SEQ ID NO: 148188
  misc_feature 1..378: note = Description of Artificial Sequence: Synthetic coding sequence
  source 1..378: mol_type = other DNA

SEQ ID NO: 148212 - DNA, 1863 bp, synthetic construct
  misc_feature 1..1863: note = Description of Artificial Sequence: Synthetic coding sequence
  source 1..1863: mol_type = other DNA
atgggccccctgatggtgctcttctgcctgctcttcctgtacccagctggccactgccccaaccctggcatcagcctgggcgctgtgaggacaggcttccgctttggacatggagacaaggtgcgctaccgctgcagcagcaacctggtgctgaccggcagcagcgagcgggagtgccagggcaatggagtgtggagcggcacagagcccatctgccggcagccctacagctatgacttcccagaagatgtggccccagccctgggcaccagcttcagccacatgctgggcgccaccaaccccacccagaagaccaaggagagcctgggcaggaagatccagatccagaggagcggccacctgaacctgtacctgctgctggactgcagccagagcgtgtctgaaaatgacttcctgatcttcaaggagagcgccagcctgatggtggaccgcatcttctcctttgagatcaacgtgtctgtggccatcatcacctttgccagcgagcccaaggtgctgatgtctgtgctgaatgacaacagccgggacatgacagaggtgatcagcagcctggagaatgccaactacaaggaccatgaaaatggaacaggcaccaacacctatgctgccctgaacagcgtgtacctgatgatgaacaaccagatgaggctgctgggcatggagaccatggcctggcaggagatcagacatgccatcatcctgctgacagatggcaagagcaacatgggcggcagccccaagacagctgtggaccacatccgggagatcctgaacatcaaccagaagagaaatgactacctggacatctatgccatcggcgtgggcaagctggatgtggactggagggagctgaatgagctgggcagcaagaaggatggagagagacatgccttcatcctgcaggacaccaaggccctgcaccaggtgtttgagcacatgctggatgtgtccaagctgacagacaccatctgtggggtgggcaacatgtctgccaatgccagtgaccaggagaggaccccctggcacgtgaccatcaagcccaagagccaggagacctgccgcggggccctgatcagtgaccagtgggtgctgacagctgcccactgcttcagagatggaaatgaccacagcctgtggagggtgaatgtgggggaccccaagagccagtggggcaaggagttcctgattgagaaggccgtcatcagccctggctttgatgtgtttgccaagaagaaccagggcatcctggagttctatggagatgacatcgccctgctgaagctggcccagaaggtgaagatgagcacccacgcccggcccatctgcctgccctgcaccatggaggccaacctggccctgcggcggccccagggcagcacctgccgggaccatgaaaatgagctgctgaacaagcagagcgtgcctgcccactttgtggccctgaatggcagcaagctgaacatcaacctgaagatgggcgtggagtggaccagctgtgccgaggtggtgtcccaggagaagaccatgttccccaacctgacagatgtgcgggaggtggtgacagaccagttcctgtgcagcggcacccaggaggatgagagcccctgcaagggggagagcggcggcgctgtgttcctggagcggcgcttccgcttcttccaggtgggcctggtgtcctggggcctgtacaacccctgcctgggcagcgctgacaagaacagcaggaagagggcccccaggagcaaggtgcccccaccccgggacttccacatcaacctcttcaggatgcagccctggctgcggcagcacctgggagatgtgctgaacttcctgcccctgtag

SEQ ID NO: 148213 - DNA, 378 bp, synthetic construct; identical to SEQ ID NO: 148188
  misc_feature 1..378: note = Description of Artificial Sequence: Synthetic coding sequence
  source 1..378: mol_type = other DNA

SEQ ID NO: 148214 - DNA, 420 bp, synthetic construct; identical to SEQ ID NO: 148184
  misc_feature 1..420: note = Description of Artificial Sequence: Synthetic coding sequence
  source 1..420: mol_type = other DNA

SEQ ID NO: 148215 - DNA, 378 bp, synthetic construct; identical to SEQ ID NO: 148188
  misc_feature 1..378: note = Description of Artificial Sequence: Synthetic coding sequence
  source 1..378: mol_type = other DNA

SEQ ID NO: 148216 - DNA, 2259 bp, synthetic construct; identical to SEQ ID NO: 148177
  misc_feature 1..2259: note = Description of Artificial Sequence: Synthetic coding sequence
  source 1..2259: mol_type = other DNA

SEQ ID NO: 148217 - DNA, 378 bp, synthetic construct; identical to SEQ ID NO: 148188
  misc_feature 1..378: note = Description of Artificial Sequence: Synthetic coding sequence
  source 1..378: mol_type = other DNA

SEQ ID NO: 148218 - DNA, 510 bp, synthetic construct; identical to SEQ ID NO: 148185
  misc_feature 1..510: note = Description of Artificial Sequence: Synthetic coding sequence
  source 1..510: mol_type = other DNA

SEQ ID NO: 148219 - DNA, 1578 bp, synthetic construct; identical to SEQ ID NO: 148180
  misc_feature 1..1578: note = Description of Artificial Sequence: Synthetic coding sequence
  source 1..1578: mol_type = other DNA

SEQ ID NO: 148220 - DNA, 438 bp, synthetic construct; identical to SEQ ID NO: 148207
  misc_feature 1..438: note = Description of Artificial Sequence: Synthetic coding sequence
  source 1..438: mol_type = other DNA

SEQ ID NO: 148221 - DNA, 405 bp, synthetic construct; identical to SEQ ID NO: 148197
  misc_feature 1..405: note = Description of Artificial Sequence: Synthetic coding sequence
  source 1..405: mol_type = other DNA

SEQ ID NO: 148222 - DNA, 420 bp, synthetic construct; identical to SEQ ID NO: 148184
  misc_feature 1..420: note = Description of Artificial Sequence: Synthetic coding sequence
  source 1..420: mol_type = other DNA

SEQ ID NO: 148223 - DNA, 420 bp, synthetic construct; identical to SEQ ID NO: 148184
  misc_feature 1..420: note = Description of Artificial Sequence: Synthetic coding sequence
  source 1..420: mol_type = other DNA

SEQ ID NO: 148224 - DNA, 1617 bp, synthetic construct
  misc_feature 1..1617: note = Description of Artificial Sequence: Synthetic coding sequence
  source 1..1617: mol_type = other DNA
atgagggccctgtgcatccgggagacctgcagcagcgagctgggcttcagcaggaactggagcaggaggaaggccggccactgccccaaccctggcatcagcctgggcgctgtgaggacaggcttccgcttcggccacggggacaaggtgcgctaccgctgcagcagcaacctggtgctgaccggcagcagcgagcgggagtgccagggcaatggagtgtggagcggcacagagcccatctgccggcagccctacagctatgacttcccagaagatgtggccccagccctgggcaccagcttcagccacatgctgggcgccaccaaccccacccagaagaccaaggaccatgaaaatggaacaggcaccaacacctatgctgccctgaacagcgtgtacctgatgatgaacaaccagatgaggctgctgggcatggagaccatggcctggcaggagatcagacatgccatcatcctgctgacagatggcaagagcaacatgggcggcagccccaagacagctgtggaccacatccgggagatcctgaacatcaaccagaagagaaatgactacctggacatctatgccatcggcgtgggcaagctggatgtggactggagggagctgaatgagctgggcagcaagaaggatggagagagacatgccttcatcctgcaggacaccaaggccctgcaccaggtgtttgagcacatgctggatgtgtccaagctgacagacaccatctgtggggtgggcaacatgtctgccaatgccagtgaccaggagaggaccccctggcacgtgaccatcaagcccaagagccaggagacctgccgcggggccctgatcagtgaccagtgggtgctgacagctgcccactgcttcagagatggaaatgaccacagcctgtggagggtgaatgtgggggaccccaagagccagtggggcaaggagttcctgattgagaaggccgtcatcagccctggctttgatgtgtttgccaagaagaaccagggcatcctggagttctatggagatgacatcgccctgctgaagctggcccagaaggtgaagatgagcacccacgcccggcccatctgcctgccctgcaccatggaggccaacctggccctgcggcggccccagggcagcacctgccgggaccatgaaaatgagctgctgaacaagcagagcgtgcctgcccactttgtggccctgaatggcagcaagctgaacatcaacctgaagatgggcgtggagtggaccagctgtgccgaggtggtgtcccaggagaagaccatgttccccaacctgacagatgtgcgggaggtggtgacagaccagttcctgtgcagcggcacccaggaggatgagagcccctgcaagggggagagcggcggcgctgtgttcctggagcggcgcttccgcttcttccaggtgggcctggtgtcctggggcctgtacaacccctgcctgggcagcgctgacaagaacagcaggaagagggcccccaggagcaaggtgcccccaccccgggacttccacatcaacctcttcaggatgcagccctggctgcggcagcacctgggagatgtgctgaacttcctgcccctgtag

SEQ ID NO: 148225 - DNA, 1521 bp, synthetic construct
  misc_feature 1..1521: note = Description of Artificial Sequence: Synthetic coding sequence
  source 1..1521: mol_type = other DNA
atgggcaccaggtctgccatcgccgccccccgcatcctgtgcagccggggcctgcggagcggcagcgcccgggccaccggcagcggcgtggagaggagccccagcgctgccatcttctcctttgagatcaacgtgtctgtggccatcatcacctttgccagcgagcccaaggtgctgatgtctgtgctgaatgacaacagccgggacatgacagaggtgatcagcagcctggagaatgccaactacaaggaccatgaaaatggaacaggcaccaacacctatgctgccctgaacagcgtgtacctgatgatgaacaaccagatgaggctgctgggcatggagaccatggcctggcaggagatcagacatgccatcatcctgctgacagatggcaagagcaacatgggcggcagccccaagacagctgtggaccacatccgggagatcctgaacatcaaccagaagagaaatgactacctggacatctatgccatcggcgtgggcaagctggatgtggactggagggagctgaatgagctgggcagcaagaaggatggagagagacatgccttcatcctgcaggacaccaaggccctgcaccaggtgtttgagcacatgctggatgtgtccaagctgacagacaccatctgtggggtgggcaacatgtctgccaatgccagtgaccaggagaggaccccctggcacgtgaccatcaagcccaagagccaggagacctgccgcggggccctgatcagtgaccagtgggtgctgacagctgcccactgcttcagagatggaaatgaccacagcctgtggagggtgaatgtgggggaccccaagagccagtggggcaaggagttcctgattgagaaggccgtcatcagccctggctttgatgtgtttgccaagaagaaccagggcatcctggagttctatggagatgacatcgccctgctgaagctggcccagaaggtgaagatgagcacccacgcccggcccatctgcctgccctgcaccatggaggccaacctggccctgcggcggccccagggcagcacctgccgggaccatgaaaatgagctgctgaacaagcagagcgtgcctgcccactttgtggccctgaatggcagcaagctgaacatcaacctgaagatgggcgtggagtggaccagctgtgccgaggtggtgtcccaggagaagaccatgttccccaacctgacagatgtgcgggaggtggtgacagaccagttcctgtgcagcggcacccaggaggatgagagcccctgcaagggggagagcggcggcgctgtgttcctggagcggcgcttccgcttcttccaggtgggcctggtgtcctggggcctgtacaacccctgcctgggcagcgctgacaagaacagcaggaagagggcccccaggagcaaggtgcccccaccccgggacttccacatcaacctcttcaggatgcagccctggctgcggcagcacctgggagatgtgctgaacttcctgcccctgtag

SEQ ID NO: 148226 - DNA, 1521 bp, synthetic construct; identical to SEQ ID NO: 148225
  misc_feature 1..1521: note = Description of Artificial Sequence: Synthetic coding sequence
  source 1..1521: mol_type = other DNA

SEQ ID NO: 148227 - DNA, 1521 bp, synthetic construct; identical to SEQ ID NO: 148225
  misc_feature 1..1521: note = Description of Artificial Sequence: Synthetic coding sequence
  source 1..1521: mol_type = other DNA

SEQ ID NO: 148228 - DNA, 1134 bp, synthetic construct; identical to SEQ ID NO: 148178
  misc_feature 1..1134: note = Description of Artificial Sequence: Synthetic coding sequence
  source 1..1134: mol_type = other DNA

SEQ ID NO: 148229 - DNA, 978 bp, synthetic construct; identical to SEQ ID NO: 148203
  misc_feature 1..978: note = Description of Artificial Sequence: Synthetic coding sequence
  source 1..978: mol_type = other DNA

SEQ ID NO: 148230 - DNA, 1521 bp, synthetic construct; identical to SEQ ID NO: 148225
  misc_feature 1..1521: note = Description of Artificial Sequence: Synthetic coding sequence
  source 1..1521: mol_type = other DNA

SEQ ID NO: 148231 - DNA, 1521 bp, synthetic construct; identical to SEQ ID NO: 148225
  misc_feature 1..1521: note = Description of Artificial Sequence: Synthetic coding sequence
  source 1..1521: mol_type = other DNA

SEQ ID NO: 148232 - DNA, 1617 bp, synthetic construct; identical to SEQ ID NO: 148224
  misc_feature 1..1617: note = Description of Artificial Sequence: Synthetic coding sequence
  source 1..1617: mol_type = other DNA

SEQ ID NO: 148233 - DNA, 1134 bp, synthetic construct; identical to SEQ ID NO: 148178
  misc_feature 1..1134: note = Description of Artificial Sequence: Synthetic coding sequence
  source 1..1134: mol_type = other DNA

SEQ ID NO: 148234 - DNA, 1863 bp, synthetic construct; identical to SEQ ID NO: 148212
  misc_feature 1..1863: note = Description of Artificial Sequence: Synthetic coding sequence
  source 1..1863: mol_type = other DNA

SEQ ID NO: 148235 - DNA, 1863 bp, synthetic construct; identical to SEQ ID NO: 148212
  misc_feature 1..1863: note = Description of Artificial Sequence: Synthetic coding sequence
  source 1..1863: mol_type = other DNA

SEQ ID NO: 148236 - DNA, 978 bp, synthetic construct; identical to SEQ ID NO: 148203
  misc_feature 1..978: note = Description of Artificial Sequence: Synthetic coding sequence
  source 1..978: mol_type = other DNA

SEQ ID NO: 148237 - DNA, 978 bp, synthetic construct; identical to SEQ ID NO: 148203
  misc_feature 1..978: note = Description of Artificial Sequence: Synthetic coding sequence
  source 1..978: mol_type = other DNA

SEQ ID NO: 148238 - DNA, 1521 bp, synthetic construct; identical to SEQ ID NO: 148225
  misc_feature 1..1521: note = Description of Artificial Sequence: Synthetic coding sequence
  source 1..1521: mol_type = other DNA

SEQ ID NO: 148239 - DNA, 978 bp, synthetic construct; identical to SEQ ID NO: 148203
  misc_feature 1..978: note = Description of Artificial Sequence: Synthetic coding sequence
  source 1..978: mol_type = other DNA

SEQ ID NO: 148240 - DNA, 1863 bp, synthetic construct; identical to SEQ ID NO: 148212
  misc_feature 1..1863: note = Description of Artificial Sequence: Synthetic coding sequence
  source 1..1863: mol_type = other DNA

SEQ ID NO: 148241 - DNA, 1134 bp, synthetic construct; identical to SEQ ID NO: 148178
  misc_feature 1..1134: note = Description of Artificial Sequence: Synthetic coding sequence
  source 1..1134: mol_type = other DNA

SEQ ID NO: 148242 - DNA, 1134 bp, synthetic construct; identical to SEQ ID NO: 148178
  misc_feature 1..1134: note = Description of Artificial Sequence: Synthetic coding sequence
  source 1..1134: mol_type = other DNA

SEQ ID NO: 148243 - DNA, 978 bp, synthetic construct; identical to SEQ ID NO: 148203
  misc_feature 1..978: note = Description of Artificial Sequence: Synthetic coding sequence
  source 1..978: mol_type = other DNA

SEQ ID NO: 148244 - DNA, 1134 bp, synthetic construct; identical to SEQ ID NO: 148178
  misc_feature 1..1134: note = Description of Artificial Sequence: Synthetic coding sequence
  source 1..1134: mol_type = other DNA

SEQ ID NO: 148245 - DNA, 1617 bp, synthetic construct; identical to SEQ ID NO: 148224
  misc_feature 1..1617: note = Description of Artificial Sequence: Synthetic coding sequence
  source 1..1617: mol_type = other DNA

SEQ ID NO: 148246 - DNA, 1863 bp, synthetic construct; identical to SEQ ID NO: 148212
  misc_feature 1..1863: note = Description of Artificial Sequence: Synthetic coding sequence
  source 1..1863: mol_type = other DNA

SEQ ID NO: 148247 - DNA, 1863 bp, synthetic construct; identical to SEQ ID NO: 148212
  misc_feature 1..1863: note = Description of Artificial Sequence: Synthetic coding sequence
  source 1..1863: mol_type = other DNA

SEQ ID NO: 148248 - DNA, 1863 bp, synthetic construct; identical to SEQ ID NO: 148212
  misc_feature 1..1863: note = Description of Artificial Sequence: Synthetic coding sequence
  source 1..1863: mol_type = other DNA

SEQ ID NO: 148249 - DNA, 978 bp, synthetic construct; identical to SEQ ID NO: 148203
  misc_feature 1..978: note = Description of Artificial Sequence: Synthetic coding sequence
  source 1..978: mol_type = other DNA

SEQ ID NO: 148250 - DNA, 1134 bp, synthetic construct; identical to SEQ ID NO: 148178
  misc_feature 1..1134: note = Description of Artificial Sequence: Synthetic coding sequence
  source 1..1134: mol_type = other DNA

SEQ ID NO: 148251 - DNA, 1617 bp, synthetic construct; identical to SEQ ID NO: 148224
  misc_feature 1..1617: note = Description of Artificial Sequence: Synthetic coding sequence
  source 1..1617: mol_type = other DNA

SEQ ID NO: 148252 - DNA, 1617 bp, synthetic construct; identical to SEQ ID NO: 148224
  misc_feature 1..1617: note = Description of Artificial Sequence: Synthetic coding sequence
  source 1..1617: mol_type = other DNA

SEQ ID NO: 148253 - DNA, 4992 bp, synthetic construct
  misc_feature 1..4992: note = Description of Artificial Sequence: Synthetic coding sequence
  source 1..4992: mol_type = other DNA
atgggccccaccagcggccccagcctgctgctgctgctgctgacccacctgcccctggccctgggcagccccatgtacagcatcatcacccccaacatcctgcggctggagagcgaggagaccatggtgctggaggcccatgatgcccagggagatgtgcctgtgacagtgacagtgcatgacttccctgggaagaagctggtgctgagcagcgagaagacagtgctgaccccagccaccaaccacatgggaaatgtgaccttcaccatcccagccaaccgggagttcaagtctgagaagggcaggaacaagtttgtgacagtgcaggccaccttcggcacccaggtggtggagaaggtggtgctggtgtccctgcagagcggctacctgttcatccagacagacaagaccatctacaccccaggcagcacagtgctgtaccgcatcttcaccgtgaaccacaagctgctgcctgtgggccgcacagtgatggtgaacatcgagaaccctgagggcatccctgtgaagcaggacagcctgagcagccagaaccagctgggcgtgctgcccctgtcctgggacatccctgagctggtgaacatgggccagtggaagatccgggcctactatgagaacagcccccagcaggtgttcagcacagaatttgaggtgaaggagtatgtgctgcccagctttgaggtgattgtggagcccacagagaagttctactacatctacaatgagaagggcctggaggtgaccatcacagcccgcttcctgtatggcaagaaggtggagggcacagccttcgtcatcttcggcatccaggatggagagcagaggatcagcctgcctgagagcctgaagaggatccccattgaagatggcagcggggaggtggtgctgagcaggaaggtgctgctggatggagtgcagaaccccagggctgaggacctggtgggcaagagcctgtatgtgtctgccaccgtcatcctgcacagcggcagtgacatggtgcaggccgagaggagcggcatccccatcgtgaccagcccctaccagatccacttcaccaagacccccaagtacttcaagccaggcatgccctttgacctgatggtgtttgtgaccaacccagatggcagccctgcctacagagtgcctgtggccgtgcagggcgaggacacagtgcagagcctgacccagggagatggagtggccaagctgagcatcaacacccaccccagccagaagcccctgagcatcaccgtgaggaccaagaagcaggagctgtctgaggccgagcaggccaccaggaccatgcaggccctgccctacagcacagtgggcaacagcaacaactacctgcacctgtctgtgctgaggacagagctgcggcctggagagaccctgaatgtgaacttcctgctgaggatggaccgggcccacgaggccaagatccgctactacacctacctgatcatgaacaagggccgcctgctgaaggccggccggcaggtgcgggagcccggccaggacctggtggtgctgcccctgagcatcaccacagacttcatccccagcttccggctggtggcctactacaccctcatcggggccagcggccagcgggaggtggtggccgacagcgtgtgggtggatgtgaaggacagctgtgtgggcagcctggtggtgaagagcggccagagtgaagatcggcagcctgtgcccggccagcagatgaccctgaagattgaaggagaccatggagcccgggtggtgctggtggccgtggacaagggcgtgtttgtgctgaacaagaagaacaagctgacccagagcaagatctgggatgtggtggagaaggctgacatcggctgcaccccaggcagcggcaaggactatgctggggtcttcagtgatgctggcctgaccttcaccagcagcagcggccagcagacagcccagagagctgagctgcagtgcccccagcctgctgccaggagaagaagatctgtgcagctgacagagaagaggatggacaaggtgggcaagtaccccaaggagctgaggaagtgctgtgaagatggcatgagggagaaccccatgaggttcagctgccagaggaggacccgcttcatcagcctgggggaggcctgcaagaaggtgttcctggactgctgcaactacatcacagagctgcggcggcagcacgcccgggccagccacctgggcctggcccggagcaacctggatgaggacatcatcgccgaggagaacatcgtgagccgctctgagttccctgagagctggctgtggaatgtggaggacctgaaggagccccccaagaatggcatcagcaccaagctgatgaacatcttcctgaaggacagcatcaccacctgggagatcctggccgtgtccatgtctgacaagaagggcatctgtgtggccgacccctttgaggtgacagtgatgcaggacttcttcatcgacctgcggctgccctacagcgtggtgagaaatgagcaggtggagatccgggctgtgctgtacaactaccggcagaaccaggagctgaaggtgcgggtggagctgctgcacaacccagccttctgcagcctggccaccaccaagaggaggcaccagcagacagtgaccatcccccccaagagcagcctgtctgtgccctacgtgattgtgcccctgaagacaggcctgcaggaggtggaggtgaaggctgctgtgtaccaccacttcatcagtgatggagtgaggaagagcctgaaggtggtgcctgagggcatccgcatgaacaagacagtggccgtgaggaccctggaccctgagcggctgggccgggagggcgtgcagaaggaggacatccccccagctgacctgagtgaccaggtgcctgacacagagagcgagacccgcatcctgctgcagggcacccctgtggcccagatgacagaagatgctgtggatgctgagcggctgaagcacctgattgtgacccccagcggctgtggggagcagaacatgattggcatgacccccaccgtgattgctgtgcactacctggatgaaacagagcagtgggagaagtttggcctggagaagaggcagggcgccctggagctgatcaagaagggctacacccagcagctggccttccggcagcccagcagcgcctttgctgcctttgtgaagagggcccccagcacctggctgacagcctacgtggtgaaggtgttcagcctggccgtgaacctgattgccatcgacagccaggtgctgtgtggggctgtgaagtggctgatcctggagaagcagaagccagatggagtcttccaggaggatgcccctgtgatccaccaggagatgattggaggcctgaggaacaacaatgagaaggacatggccctgacagcctttgtgctgatcagcctgcaggaggccaaggacatctgtgaggagcaggtgaacagcctgcccggcagcatcaccaaggccggggacttcctggaggccaactacatgaacctgcagaggagctacacagtggccatcgccggctacgccctggcccagatgggccgcctgaagggccccctgctgaacaagttcctgaccacagccaaggacaagaaccgctgggaggaccccgggaagcagctgtacaacgtggaggccaccagctatgccctgctggccctgctgcagctgaaggactttgattttgtgccccctgtggtgcgctggctgaatgagcagcgctactacggcggcggctacggcagcacccaggccaccttcatggtgttccaggccctggcccagtaccagaaggatgccccagaccaccaggagctgaacctggatgtgtccctgcagctgcccagccgcagcagcaagatcacccaccgcatccactgggagagcgccagcctgctgcggtctgaggagaccaaggaaaatgaaggcttcaccgtgacagctgagggcaagggccagggcaccctgtctgtggtgaccatgtaccacgccaaggccaaggaccagctgacctgcaacaagtttgacctgaaggtgaccatcaagccagcccctgagacagagaagaggccccaggatgccaagaacaccatgatcctggagatctgcacccgctacagaggagaccaggatgccaccatgagcatcctggacatctccatgatgactggatttgccccagacacagatgacctgaagcagctggccaatggagtggaccgctacatcagcaaatatgagctggacaaggccttcagtgacaggaacaccctcatcatctacctggacaaggtgagccacagtgaagatgactgcctggccttcaaggtgcaccagtacttcaacgtggagctgatccagcccggggctgtgaaggtgtatgcctactacaacctggaggagagctgcacccgcttctaccaccctgagaaggaggatggcaagctgaacaagctgtgcagagatgagctgtgccgctgtgccgaggagaactgcttcatccagaagagtgatgacaaggtgaccctggaggagcggctggacaaggcctgtgagcccggggtggactatgtgtacaagacccggctggtgaaggtgcagctgagcaatgactttgatgagtacatcatggccatcgagcagaccatcaagagcggcagtgatgaggtgcaggtgggccagcagaggaccttcatcagccccatcaagtgccgggaggccctgaagctggaggagaagaagcactacctgatgtggggcctgagcagtgacttctggggcgagaagcccaacctgagctacatcatcggcaaggacacctgggtggagcactggccagaggaggatgagtgccaggatgaggagaaccagaagcagtgccaggacctgggcgccttcacagagagcatggtggtgtttggctgccccaactag

SEQ ID NO: 148254 - DNA, 1794 bp, synthetic construct
  misc_feature 1..1794: note = Description of Artificial Sequence: Synthetic coding sequence
  source 1..1794: mol_type = other DNA
atgcacccccccaagacccccagcggggccctgcacaggaagaggaagatggccgcctggcccttcagccggctgtggaaggtgtctgaccccatcctcttccagatgaccctgattgctgccctgctgcctgctgtgctgggcaactgtggccccccacccaccctgagctttgctgcccccatggacatcaccctgacagagacccgcttcaagacaggcaccaccctgaagtacacctgcctgcccggctacgtgcgcagccacagcacccagaccctgacctgcaacagtgatggagagtgggtgtacaacaccttctgcatctacaagcgctgccgccaccctggagagctgagaaatggccaggtggagatcaagacagacctgagctttggcagccagatcgagttcagctgcagcgagggcttcttcctgattggcagcaccaccagccgctgtgaggtgcaggaccggggcgtgggctggagccaccccctgccccagtgtgagatcgtgaagtgcaagcccccaccagacatcagaaatggccgccacagcggggaggagaacttctacgcctacggcttctctgtgacctacagctgtgacccccgcttcagcctgctgggccacgccagcatcagctgcaccgtggagaatgagaccatcggcgtgtggaggcccagcccccccacctgtgagaagatcacctgcaggaagccagatgtgagccacggggagatggtgtctggcttcggccccatctacaactacaaggacaccatcgtgttcaagtgccagaagggctttgtgctgcggggcagcagcgtcatccactgtgatgctgacagcaagtggaaccccagccccccagcctgtgagcccaacagctgcatcaacctgcctgacatcccccacgcctcctgggagacctacccccggcccaccaaggaggatgtgtatgtggtgggcaccgtgctgcgctaccgctgccaccctggctacaagcccaccacagatgagcccaccaccgtcatctgccagaagaacctgcgctggaccccctaccagggctgtgaggccctgtgctgcccagagcccaagctgaacaacggggagatcacccagcacaggaagagcaggcctgccaaccactgtgtgtacttctatggagatgagatctccttcagctgccacgagaccagccgcttcagcgccatctgccagggagatggcacctggagccccaggacccccagctgtggggacatctgcaacttcccccccaagatcgcccacggccactacaagcagagcagcagctacagcttcttcaaggaggagatcatctatgaatgtgacaagggctacatcctggtgggccaggccaagctgagctgcagctacagccactggagcgccccagccccccagtgcaaggccctgtgcaggaagccagagctggtgaatggccgcctgtctgtggacaaggaccagtatgtggagccagaaaatgtgaccatccagtgtgacagcggctatggagtggtgggcccccagagcatcacctgcagcggcaacagaacctggtacccagaggtgcccaagtgtgagtgggagaccccagagggctgtgagcaggtgctgaccgggaagaggctgatgcagtgcctgcccaacccagaagatgtgaagatggccctggaggtgtacaagctgagcctggagattgagcagctggagctgcagagggacagcgcccggcagagcaccctggacaaggagctgtag

SEQ ID NO: 148255 - DNA, 459 bp, synthetic construct
  misc_feature 1..459: note = Description of Artificial Sequence: Synthetic coding sequence
  source 1..459: mol_type = other DNA
atgcacccccccaagacccccagcggggccctgcacaggaagaggaagatggccgcctggcccttcagccggctgtggaaggtgtctgaccccatcctcttccagatgaccctgattgctgccctgctgcctgctgtgctgggcaactgtggccccccacccaccctgagctttgctgcccccatggacatcaccctgacagagacccgcttcaagacaggcaccaccctgaagtacacctgcctgcccggctacgtgcgcagccacagcacccagaccctgacctgcaacagtgatggagagtgggtgtacaacaccttctgcatctacaagcgctgccgccaccctggagagctgagaaatggccaggtggagatcaagacagacctgagctttggcagccagatcgagttcagctgcagcgagggcttcttcctgattggcagcaccaccagctag

SEQ ID NO: 148256 - DNA, 759 bp, synthetic construct
  misc_feature 1..759: note = Description of Artificial Sequence: Synthetic coding sequence
  source 1..759: mol_type = other DNA
atgttcttctggtgtgcctgctgcctgatggtggcctggagggtgtctgccagtgatgctgagcactgcccagagctgccccctgtggacaacagcatctttgtggccaaggaggtggagggccagatcctgggcacctacgtgtgcatcaagggctaccacctggtgggcaagaagaccctcttctgcaatgccagcaaggagtgggacaacaccaccacagaatgtcggctgggccactgcccagaccctgtgctggtgaatggagagttcagcagcagcggccctgtgaatgtgtctgacaagatcaccttcatgtgcaatgaccactacatcctgaagggcagcaacagaagccagtgcctggaggaccacacctgggccccacccttccccatctgcaagagccgggactgtgaccccccaggcaaccctgtgcacggctactttgagggcaacaacttcaccctgggcagcaccatctcctactactgtgaggaccgctactacctggtgggcgtgcaggagcagcagtgtgtggatggagagtggagcagcgccctgcctgtgtgcaagctgatccaggaggcccccaagccagaatgtgagaaggccctgctggccttccaggagagcaagaacctgtgtgaggccatggagaacttcatgcagcagctgaaggagagcggcatgaccatggaggagctgaagtacagcctggagctgaagaaggccgagctgaaggccaagctgctgtag

SEQ ID NO: 148257 - DNA, 756 bp, synthetic construct
  misc_feature 1..756: note = Description of Artificial Sequence: Synthetic coding sequence
  source 1..756: mol_type = other DNA
atgttcttctggtgtgcctgctgcctgatggtggcctggagggtgtctgccagtgatgagcactgcccagagctgccccctgtggacaacagcatctttgtggccaaggaggtggagggccagatcctgggcacctacgtgtgcatcaagggctaccacctggtgggcaagaagaccctcttctgcaatgccagcaaggagtgggacaacaccaccacagagtgccgcctgggccactgcccagaccctgtgctggtgaatggagagttcagcagcagcggccctgtgaatgtgtctgacaagatcaccttcatgtgcaatgaccactacatcctgaagggcagcaacagaagccagtgcctggaggaccacacctgggccccacccttccccatctgcaagagccgggactgtgaccccccaggcaaccctgtgcacggctactttgagggcaacaacttcaccctgggcagcaccatctcctactactgtgaagatcgctactacctggtgggcgtgcaggagcagcagtgtgtggatggagagtggagcagcgccctgcctgtgtgcaagctgatccaggaggcccccaagccagaatgtgagaaggccctgctggccttccaggagagcaagaacctgtgtgaggccatggagaacttcatgcagcagctgaaggagagcggcatgaccatggaggagctgaagtacagcctggagctgaagaaggccgagctgaaggccaagctgctgtag

SEQ ID NO: 148258 - DNA, 759 bp, synthetic construct; identical to SEQ ID NO: 148256
  misc_feature 1..759: note = Description of Artificial Sequence: Synthetic coding sequence
  source 1..759: mol_type = other DNA

SEQ ID NO: 148259 - DNA, 759 bp, synthetic construct; identical to SEQ ID NO: 148256
  misc_feature 1..759: note = Description of Artificial Sequence: Synthetic coding sequence
  source 1..759: mol_type = other DNA

SEQ ID NO: 148260 - DNA, 657 bp, synthetic construct
  misc_feature 1..657: note = Description of Artificial Sequence: Synthetic coding sequence
  source 1..657: mol_type = other DNA
atggtggcctggagggtgtctgccagtgatgagcactgcccagagctgccccctgtggacaacagcatctttgtggccaaggaggtggagggccagatcctgggcacctacgtgtgcatcaagggctaccacctggtgggcaagaagaccctcttctgcaatgccagcaaggagtgggacaacaccaccacagaatgtcggctgggccactgcccagaccctgtgctggtgaatggagagttcagcagcagcggccctgtgaatgtgtctgacaagatcaccttcatgtgcaatgaccactacatcctgaagggcagcaacagaagccagtgcctggaggaccacacctgggccccacccttccccatctgcaagagcatcccccagacccggcccctgcccttccagccctgcagccccctcttcctgttcctgctgcggcagagcctggccctcttcccccggctggagtgcagcggccgcatcctggcccactgcaacctgcacctgcccggcagcagcagcagccacgccagcgccagccaggtggccggcatcactggagcccacccccgctgggccaacttctgcatcttcagccgggactgggtgagcccctgctggccaggctggagccagatcccagacctgaggtag

SEQ ID NO: 148261 - DNA, 546 bp, synthetic construct
  misc_feature 1..546: note = Description of Artificial Sequence: Synthetic coding sequence
  source 1..546: mol_type = other DNA
atgttcttctggtgtgcctgctgcctgatggtggcctggagggtgtctgccagtgatgctgagcactgcccagagctgccccctgtggacaacagcatctttgtggccaaggaggtggagggccagatcctgggcacctacgtgtgcatcaagggctaccacctggtgggcaagaagaccctcttctgcaatgccagcaaggagtgggacaacaccaccacagaatgtcggctgggccactgcccagaccctgtgctggtgaatggagagttcagcagcagcggccctgtgaatgtgtctgacaagatcaccttcatgtgcaatgaccactacatcctgaagggcagcaacagaagccagtgcctggaggaccacacctgggccccacccttccccatctgcaagagccgggactgtgaccccccaggcaaccctgtgcacggctactttgagggcaacaacttcaccctgggcagcaccatctcctactactgtgaggaccgctactacctggtgggcgtgcaggagcagcagtgtgtggactag

SEQ ID NO: 148262 - DNA, 5235 bp, synthetic construct
  misc_feature 1..5235: note = Description of Artificial Sequence: Synthetic coding sequence
  source 1..5235: mol_type = other DNA
atgaggctgctgtggggcctcatctgggccagcagcttcttcaccctgagcctgcagaagccccggctgctgctcttcagccccagcgtggtgcacctgggcgtgcccctgtctgtgggcgtgcagctgcaggatgtgccccggggccaggtggtgaagggctctgtgttcctgaggaaccccagcagaaataatgtgccctgcagccccaaggtggacttcaccctgagcagcgagcgggactttgccctgctgagcctgcaggtgcccctgaaggatgccaagagctgtggcctgcaccagctgctgcggggccctgaggtgcagctggtggcccacagcccctggctgaaggacagcctgagcaggaccaccaacatccagggcatcaacctgctcttcagcagcagaagaggccacctgttcctgcagacagaccagcccatctacaaccctggccagagggtgcgctacagagtgtttgccctggaccagaagatgaggcccagcacagacaccatcaccgtgatggtggagaacagccacggcctgcgggtgaggaagaaggaggtgtacatgcccagcagcatcttccaggatgactttgtgatcccagacatcagcgagcccggcacctggaagatcagcgcccgcttcagtgatggcctggagagcaacagcagcacccagtttgaggtgaagaagtatgtgctgcccaactttgaggtgaagatcaccccaggcaagccctacatcctgactgtgcccggccacctggatgagatgcagctggacatccaggcccgctacatctacggcaagcctgtgcagggcgtggcctacgtgcgcttcggcctgctggatgaagatggcaagaagaccttcttccggggcctggagagccagaccaagctggtgaatggccagagccacatcagcctgagcaaggccgagttccaggatgccctggagaagctgaacatgggcatcacagacctgcagggcctgcggctgtatgtggccgccgccatcatcgagtacccaggaggagagatggaggaggccgagctgacctcctggtactttgtgagcagccccttcagcctggacctgagcaagaccaagaggcacctggtgcctggggcccccttcctgctgcaggccctggtgcgggagatgagcggcagccctgccagcggcatccctgtgaaggtgtctgccaccgtgagcagccctggctctgtgcctgaggtgcaggacatccagcagaacacagatggcagcggccaggtgtccatccccatcatcatcccccagaccatcagcgagctgcagctgtctgtgtctgctggcagcccccacccagccatcgcccggctgactgtggccgcccctccttctgggggccctggcttcctgagcattgagtggccagacagccggcccccccgggtgggggacaccctgaacctgaacctgcgggctgtgggcagcggggccaccttcagccactactactacatgatcctgagccggggccagatcgtgttcatgaaccgggagcccaagaggaccctgacctctgtgtctgtgtttgtggaccaccacctggcccccagcttctactttgtggccttctactaccatggagaccaccctgtggccaacagcctgcgggtggatgtgcaggccggggcctgtgagggcaagctggagctgtctgtggatggagccaagcagtacagaaatggagagagcgtgaagctgcacctggagacagacagcctggccctggtggccctgggcgccctggacacagccctgtatgctgctggcagcaagagccacaagcccctgaacatgggcaaggtgtttgaggccatgaacagctatgacctgggctgcggccctgggggcggggacagcgccctgcaggtgttccaggccgccggcctggccttcagtgatggagaccagtggaccctgagcaggaagaggctgagctgccccaaggagaagaccaccaggaagaagagaaatgtgaacttccagaaggccatcaatgagaagctgggccagtatgccagccccacagccaagcgctgctgccaggatggagtgacccggctgcccatgatgaggagctgtgagcagagagctgcccgggtgcagcagcctgactgccgggagcccttcctgagctgctgccagtttgctgagagcctgaggaagaagagccgggacaagggccaggccggcctgcagagggccctggagatcctgcaggaggaggacctgattgatgaagatgacatccctgtgcgctccttcttccctgagaactggctgtggagggtggagaccgtggaccgcttccagatcctgaccctgtggctgcctgacagcctgaccacctgggagatccacggcctgagcctgagcaagaccaagggcctgtgtgtggccacccctgtgcagctgcgggtcttccgggagttccacctgcacctgcggctgcccatgtctgtgagaagatttgagcagctggagctgcggcctgtgctgtacaactacctggacaagaacctgactgtgtctgtgcacgtgtcccctgtggagggcctgtgcctggccggcggcggcggcctggcccagcaggtgctggtgcctgctggcagcgcccggcctgtggccttctctgtggtgcccacagctgctgctgctgtgtccctgaaggtggtggcccggggcagctttgagttccctgtgggagatgctgtgtccaaggtgctgcagatcgagaaggagggcgccatccaccgggaggagctggtgtatgagctgaaccccctggaccaccggggccgcaccctggagatccctggcaacagcgaccccaacatgatcccagatggagacttcaacagctatgtgcgggtgacagccagtgaccccctggacaccctgggcagcgagggcgccctgagccctggaggagtggccagcctgctgcggctgccccggggctgtggggagcagaccatgatctacctggcccccaccctggccgccagccgctacctggacaagacagagcagtggagcaccctgcccccagagaccaaggaccatgctgtggacctgatccagaagggctacatgaggatccagcagttcaggaaggcagatggcagctatgctgcctggctgagccgggacagcagcacctggctgacagcctttgtgctgaaggtgctgagcctggcccaggagcaggtgggcggcagccctgagaagctgcaggagaccagcaactggctgctgagccagcagcaggctgatggcagcttccaggacccctgccctgtgctggaccgctccatgcagggcggcctggtgggcaatgatgagaccgtggccctgacagcctttgtgaccatcgccctgcaccacggcctggccgtgttccaggatgagggcgctgagcccctgaagcagagggtggaggccagcatcagcaaggccaacagcttcctgggggagaaggccagcgctggcctgctgggcgcccacgccgccgccatcacagcctatgccctgaccctgaccaaggcccctgtggacctgctgggcgtggcccacaacaacctgatggccatggcccaggagaccggggacaacctgtactggggctctgtgacaggcagccagagcaatgctgtgagccccaccccagcccccaggaaccccagcgaccccatgccccaggccccagccctgtggattgagaccacagcctatgccctgctgcacctgctgctgcacgagggcaaggccgagatggctgaccaggccgccgcctggctgacccggcagggcagcttccagggcggcttccgcagcacccaggacacagtgattgccctggatgccctgagcgcctactggatcgccagccacaccacagaggagcggggcctgaatgtgaccctgagcagcactggaagaaatggcttcaagagccacgccctgcagctgaacaaccggcagatccggggcctggaggaggagctgcagttcagcctgggcagcaagatcaacgtgaaggtgggcggcaacagcaagggcaccctgaaggtgctgcggacctacaacgtgctggacatgaagaacaccacctgccaggacctgcagatcgaggtgacagtgaagggccacgtggagtacaccatggaggccaatgaagattatgaggactatgaatatgatgagctgcctgccaaggatgatcctgatgcccccctgcagcctgtgacccccctgcagctgtttgagggcagaagaaacagaagaagaagagaggcccccaaggtggtggaggagcaggagagccgggtgcactacacagtgtgcatctggagaaatggcaaggtgggcctgagcggcatggccatcgcagatgtgaccctgctgagcggcttccacgccctgcgggctgacctggagaagctgaccagcctgagtgacagatatgtgagccactttgaaacagagggcccccacgtgctgctgtactttgacagcgtgcccaccagccgggagtgtgtgggctttgaggccgtgcaggaggtgcctgtgggcctggtgcagcctgccagcgccaccctgtatgactactacaaccctgagcggcgctgcagcgtcttctacggggcccccagcaagagccggctgctggccaccctgtgcagcgctgaggtgtgccagtgtgccgagggcaagtgcccccggcagaggcgggccctggagcggggcctgcaggatgaagatggctacaggatgaagtttgcctgctactacccccgggtggagtatggcttccaggtgaaggtgctgcgggaggacagccgggccgccttccggctgtttgagaccaagatcacccaggtgctgcacttcaccaaggatgtgaaggccgccgccaaccagatgaggaacttcctggtgcgggccagctgccgcctgcggctggagcccgggaaggagtacctgatcatgggcctggatggagccacctatgacctggagggccacccccagtacctgctggacagcaacagctggattgaggagatgcccagcgagcggctgtgccgcagcacccggcagagagctgcctgtgcccagctgaatgacttcctgcaggagtatggcacccagggctgccaggtgtag

SEQ ID NO: 148263 - DNA, 5235 bp, synthetic construct
  misc_feature 1..5235: note = Description of Artificial Sequence: Synthetic coding sequence
  source 1..5235: mol_type = other DNA
atgaggctgctgtggggcctcatctgggccagcagcttcttcaccctgagcctgcagaagccccggctgctgctcttcagccccagcgtggtgcacctgggcgtgcccctgtctgtgggcgtgcagctgcaggatgtgccccggggccaggtggtgaagggctctgtgttcctgaggaaccccagcagaaataatgtgccctgcagccccaaggtggacttcaccctgagcagcgagcgggactttgccctgctgagcctgcaggtgcccctgaaggatgccaagagctgtggcctgcaccagctgctgcggggccctgaggtgcagctggtggcccacagcccctggctgaaggacagcctgagcaggaccaccaacatccagggcatcaacctgctcttcagcagcagaagaggccacctgttcctgcagacagaccagcccatctacaaccctggccagagggtgcgctacagagtgtttgccctggaccagaagatgaggcccagcacagacaccatcaccgtgatggtggagaacagccacggcctgcgggtgaggaagaaggaggtgtacatgcccagcagcatcttccaggatgactttgtgatcccagacatcagcgagcccggcacctggaagatcagcgcccgcttcagtgatggcctggagagcaacagcagcacccagtttgaggtgaagaagtatgtgctgcccaactttgaggtgaagatcaccccaggcaagccctacatcctgactgtgcccggccacctggatgagatgcagctggacatccaggcccgctacatctacggcaagcctgtgcagggcgtggcctacgtgcgcttcggcctgctggatgaagatggcaagaagaccttcttccggggcctggagagccagaccaagctggtgaatggccagagccacatcagcctgagcaaggccgagttccaggatgccctggagaagctgaacatgggcatcacagacctgcagggcctgcggctgtatgtggccgccgccatcatcgagagccctggaggagagatggaggaggccgagctgacctcctggtactttgtgagcagccccttcagcctggacctgagcaagaccaagaggcacctggtgcctggggcccccttcctgctgcaggccctggtgcgggagatgagcggcagccctgccagcggcatccctgtgaaggtgtctgccaccgtgagcagccctggctctgtgcctgaggtgcaggacatccagcagaacacagatggcagcggccaggtgtccatccccatcatcatcccccagaccatcagcgagctgcagctgtctgtgtctgctggcagcccccacccagccatcgcccggctgactgtggccgcccctccttctgggggccctggcttcctgagcattgaaagaccagacagccggcccccccgggtgggggacaccctgaacctgaacctgcgggctgtgggcagcggggccaccttcagccactactactacatgatcctgagccggggccagatcgtgttcatgaaccgggagcccaagaggaccctgacctctgtgtctgtgtttgtggaccaccacctggcccccagcttctactttgtggccttctactaccatggagaccaccctgtggccaacagcctgcgggtggatgtgcaggccggggcctgtgagggcaagctggagctgtctgtggatggagccaagcagtacagaaatggagagagcgtgaagctgcacctggagacagacagcctggccctggtggccctgggcgccctggacacagccctgtatgctgctggcagcaagagccacaagcccctgaacatgggcaaggtgtttgaggccatgaacagctatgacctgggctgcggccctgggggcggggacagcgccctgcaggtgttccaggccgccggcctggccttcagtgatggagaccagtggaccctgagcaggaagaggctgagctgccccaaggagaagaccaccaggaagaagagaaatgtgaacttccagaaggccatcaatgagaagctgggccagtatgccagccccacagccaagcgctgctgccaggatggagtgacccggctgcccatgatgaggagctgtgagcagagagctgcccgggtgcagcagcctgactgccgggagcccttcctgagctgctgccagtttgctgagagcctgaggaagaagagccgggacaagggccaggccggcctgcagagggccctggagatcctgcaggaggaggacctgattgatgaagatgacatccctgtgcgctccttcttccctgagaactggctgtggagggtggagaccgtggaccgcttccagatcctgaccctgtggctgcctgacagcctgaccacctgggagatccacggcctgagcctgagcaagaccaagggcctgtgtgtggccacccctgtgcagctgcgggtcttccgggagttccacctgcacctgcggctgcccatgtctgtgagaagatttgagcagctggagctgcggcctgtgctgtacaactacctggacaagaacctgactgtgtctgtgcacgtgtcccctgtggagggcctgtgcctggccggcggcggcggcctggcccagcaggtgctggtgcctgctggcagcgcccggcctgtggccttctctgtggtgcccacagctgctgctgctgtgtccctgaaggtggtggcccggggcagctttgagttccctgtgggagatgctgtgtccaaggtgctgcagatcgagaaggagggcgccatccaccgggaggagctggtgtatgagctgaaccccctggaccaccggggccgcaccctggagatccctggcaacagcgaccccaacatgatcccagatggagacttcaacagctatgtgcgggtgacagccagtgaccccctggacaccctgggcagcgagggcgccctgagccctggaggagtggccagcctgctgcggctgccccggggctgtggggagcagaccatgatctacctggcccccaccctggccgccagccgctacctggacaagacagagcagtggagcaccctgcccccagagaccaaggaccatgctgtggacctgatccagaagggctacatgaggatccagcagttcaggaaggcagatggcagctatgctgcctggctgagccgggacagcagcacctggctgacagcctttgtgctgaaggtgctgagcctggcccaggagcaggtgggcggcagccctgagaagctgcaggagaccagcaactggctgctgagccagcagcaggctgatggcagcttccaggacccctgccctgtgctggaccgctccatgcagggcggcctggtgggcaatgatgagaccgtggccctgacagcctttgtgaccatcgccctgcaccacggcctggccgtgttccaggatgagggcgctgagcccctgaagcagagggtggaggccagcatcagcaaggccagcagcttcctgggggagaaggccagcgctggcctgctgggcgcccacgccgccgccatcacagcctatgccctgaccctgaccaaggcccctgtggacctgctgggcgtggcccacaacaacctgatggccatggcccaggagaccggggacaacctgtactggggctctgtgacaggcagccagagcaatgctgtgagccccaccccagcccccaggaaccccagcgaccccatgccccaggccccagccctgtggattgagaccacagcctatgccctgctgcacctgctgctgcacgagggcaaggccgagatggctgaccaggccgccgcctggctgacccggcagggcagcttccagggcggcttccgcagcacccaggacacagtgattgccctggatgccctgagcgcctactggatcgccagccacaccacagaggagcggggcctgaatgtgaccctgagcagcactggaagaaatggcttcaagagccacgccctgcagctgaacaaccggcagatccggggcctggaggaggagctgcagttcagcctgggcagcaagatcaacgtgaaggtgggcggcaacagcaagggcaccctgaaggtgctgcggacctacaacgtgctggacatgaagaacaccacctgccaggacctgcagatcgaggtgacagtgaagggccacgtggagtacaccatggaggccaatgaagattatgaggactatgaatatgatgagctgcctgccaaggatgatcctgatgcccccctgcagcctgtgacccccctgcagctgtttgagggcagaagaaacagaagaagaagagaggcccccaaggtggtggaggagcaggagagccgggtgcactacacagtgtgcatctggagaaatggcaaggtgggcctgagcggcatggccatcgcagatgtgaccctgctgagcggcttccacgccctgcgggctgacctggagaagctgaccagcctgagtgacagatatgtgagccactttgaaacagagggcccccacgtgctgctgtactttgacagcgtgcccaccagccgggagtgtgtgggctttgaggccgtgcaggaggtgcctgtgggcctggtgcagcctgccagcgccaccctgtatgactactacaaccctgagcggcgctgcagcgtcttctacggggcccccagcaagagccggctgctggccaccctgtgcagcgctgaggtgtgccagtgtgccgagggcaagtgcccccggcagaggcgggccctggagcggggcctgcaggatgaagatggctacaggatgaagtttgcctgctactacccccgggtggagtatggcttccaggtgaaggtgctgcgggaggacagccgggccgccttccggctgtttgagaccaagatcacccaggtgctgcacttcaccaaggatgtgaaggccgccgccaaccagatgaggaacttcctggtgcgggccagctgccgcctgcggctggagcccgggaaggagtacctgatcatgggcctggatggagccacctatgacctggagggccacccccagtacctgctggacagcaacagctggattgaggagatgcccagcgagcggctgtgccgcagcacccggcagagagctgcctgtgcccagctgaatgacttcctgcaggagtatggcacccagggctgccaggtgtag

SEQ ID NO: 148264 - DNA, 5235 bp, synthetic construct
  misc_feature 1..5235: note = Description of Artificial Sequence: Synthetic coding sequence
  source 1..5235: mol_type = other DNA
atgaggctgctgtggggcctcatctgggccagcagcttcttcaccctgagcctgcagaagccccggctgctgctcttcagccccagcgtggtgcacctgggcgtgcccctgtctgtgggcgtgcagctgcaggatgtgccccggggccaggtggtgaagggctctgtgttcctgaggaaccccagcagaaataatgtgccctgcagccccaaggtggacttcaccctgagcagcgagcgggactttgccctgctgagcctgcaggtgcccctgaaggatgccaagagctgtggcctgcaccagctgctgcggggccctgaggtgcagctggtggcccacagcccctggctgaaggacagcctgagcaggaccaccaacatccagggcatcaacctgctcttcagcagcagaagaggccacctgttcctgcagacagaccagcccatctacaaccctggccagagggtgcgctacagagtgtttgccctggaccagaagatgaggcccagcacagacaccatcaccgtgatggtggagaacagccacggcctgcgggtgaggaagaaggaggtgtacatgcccagcagcatcttccaggatgactttgtgatcccagacatcagcgagcccggcacctggaagatcagcgcccgcttcagtgatggcctggagagcaacagcagcacccagtttgaggtgaagaagtatgtgctgcccaactttgaggtgaagatcaccccaggcaagccctacatcctgactgtgcccggccacctggatgagatgcagctggacatccaggcccgctacatctacggcaagcctgtgcagggcgtggcctacgtgcgcttcggcctgctggatgaagatggcaagaagaccttcttccggggcctggagagccagaccaagctggtgaatggccagagccacatcagcctgagcaaggccgagttccaggatgccctggagaagctgaacatgggcatcacagacctgcagggcctgcggctgtatgtggccgccgccatcatcgagtacccaggaggagagatggaggaggccgagctgacctcctggtactttgtgagcagccccttcagcctggacctgagcaagaccaagaggcacctggtgcctggggcccccttcctgctgcaggccctggtgcgggagatgagcggcagccctgccagcggcatccctgtgaaggtgtctgccaccgtgagcagccctggctctgtgcctgaggtgcaggacatccagcagaacacagatggcagcggccaggtgtccatccccatcatcatcccccagaccatcagcgagctgcagctgtctgtgtctgctggcagcccccacccagccatcgcccggctgactgtggccgcccctccttctgggggccctggcttcctgagcattgaaagaccagacagccggcccccccgggtgggggacaccctgaacctgaacctgcgggctgtgggcagcggggccaccttcagccactactactacatgatcctgagccggggccagatcgtgttcatgaaccgggagcccaagaggaccctgacctctgtgtctgtgtttgtggaccaccacctggcccccagcttctactttgtggccttctactaccatggagaccaccctgtggccaacagcctgcgggtggatgtgcaggccggggcctgtgagggcaagctggagctgtctgtggatggagccaagcagtacagaaatggagagagcgtgaagctgcacctggagacagacagcctggccctggtggccctgggcgccctggacacagccctgtatgctgctggcagcaagagccacaagcccctgaacatgggcaaggtgtttgaggccatgaacagctatgacctgggctgcggccctgggggcggggacagcgccctgcaggtgttccaggccgccggcctggccttcagtgatggagaccagtggaccctgagcaggaagaggctgagctgccccaaggagaagaccaccaggaagaagagaaatgtgaacttccagaaggccatcaatgagaagctgggccagtatgccagccccacagccaagcgctgctgccaggatggagtgacccggctgcccatgatgaggagctgtgagcagagagctgcccgggtgcagcagcctgactgccgggagcccttcctgagctgctgccagtttgctgagagcctgaggaagaagagccgggacaagggccaggccggcctgcagagggccctggagatcctgcaggaggaggacctgattgatgaagatgacatccctgtgcgctccttcttccctgagaactggctgtggagggtggagaccgtggaccgcttccagatcctgaccctgtggctgcctgacagcctgaccacctgggagatccacggcctgagcctgagcaagaccaagggcctgtgtgtggccacccctgtgcagctgcgggtcttccgggagttccacctgcacctgcggctgcccatgtctgtgagaagatttgagcagctggagctgcggcctgtgctgtacaactacctggacaagaacctgactgtgtctgtgcacgtgtcccctgtggagggcctgtgcctggccggcggcggcggcctggcccagcaggtgctggtgcctgctggcagcgcccggcctgtggccttctctgtggtgcccacagctgctgctgctgtgtccctgaaggtggtggcccggggcagctttgagttccctgtgggagatgctgtgtccaaggtgctgcagatcgagaaggagggcgccatccaccgggaggagctggtgtatgagctgaaccccctggaccaccggggccgcaccctggagatccctggcaacagcgaccccaacatgatcccagatggagacttcaacagctatgtgcgggtgacagccagtgaccccctggacaccctgggcagcgagggcgccctgagccctggaggagtggccagcctgctgcggctgccccggggctgtggggagcagaccatgatctacctggcccccaccctggccgccagccgctacctggacaagacagagcagtggagcaccctgcccccagagaccaaggaccatgctgtggacctgatccagaagggctacatgaggatccagcagttcaggaaggcagatggcagctatgctgcctggctgagccgggacagcagcacctggctgacagcctttgtgctgaaggtgctgagcctggcccaggagcaggtgggcggcagccctgagaagctgcaggagaccagcaactggctgctgagccagcagcaggctgatggcagcttccaggacccctgccctgtgctggaccgctccatgcagggcggcctggtgggcaatgatgagaccgtggccctgacagcctttgtgaccatcgccctgcaccacggcctggccgtgttccaggatgagggcgctgagcccctgaagcagagggtggaggccagcatcagcaaggccaacagcttcctgggggagaaggccagcgctggcctgctgggcgcccacgccgccgccatcacagcctatgccctgaccctgaccaaggcccctgtggacctgctgggcgtggcccacaacaacctgatggccatggcccaggagaccggggacaacctgtactggggctctgtgacaggcagccagagcaatgctgtgagccccaccccagcccccaggaaccccagcgaccccatgccccaggccccagccctgtggattgagaccacagcctatgccctgctgcacctgctgctgcacgagggcaaggccgagatggctgaccaggccgccgcctggctgacccggcagggcagcttccagggcggcttccgcagcacccaggacacagtgattgccctggatgccctgagcgcctactggatcgccagccacaccacagaggagcggggcctgaatgtgaccctgagcagcactggaagaaatggcttcaagagccacgccctgcagctgaacaaccggcagatccggggcctggaggaggagctgcagttcagcctgggcagcaagatcaacgtgaaggtgggcggcaacagcaagggcaccctgaaggtgctgcggacctacaacgtgctggacatgaagaacaccacctgccaggacctgcagatcgaggtgacagtgaagggccacgtggagtacaccatggaggccaatgaagattatgaggactatgaatatgatgagctgcctgccaaggatgatcctgatgcccccctgcagcctgtgacccccctgcagctgtttgagggcagaagaaacagaagaagaagagaggcccccaaggtggtggaggagcaggagagccgggtgcactacacagtgtgcatctggagaaatggcaaggtgggcctgagcggcatggccatcgcagatgtgaccctgctgagcggcttccacgccctgcgggctgacctggagaagctgaccagcctgagtgacagatatgtgagccactttgaaacagagggcccccacgtgctgctgtactttgacagcgtgcccaccagccgggagtgtgtgggctttgaggccgtgcaggaggtgcctgtgggcctggtgcagcctgccagcgccaccctgtatgactactacaaccctgagcggcgctgcagcgtcttctacggggcccccagcaagagccggctgctggccaccctgtgcagcgctgaggtgtgccagtgtgccgagggcaagtgcccccggcagaggcgggccctggagcggggcctgcaggatgaagatggctacaggatgaagtttgcctgctactacccccgggtggagtatggcttccaggtgaaggtgctgcgggaggacagccgggccgccttccggctgtttgagaccaagatcacccaggtgctgcacttcaccaaggatgtgaaggccgccgccaaccagatgaggaacttcctggtgcgggccagctgccgcctgcggctggagcccgggaaggagtacctgatcatgggcctggatggagccacctatgacctggagggccacccccagtacctgctggacagcaacagctggattgaggagatgcccagcgagcggctgtgccgcagcacccggcagagagctgcctgtgcccagctgaatgacttcctgcaggagtatggcacccagggctgccaggtgtag

SEQ ID NO: 148265 - DNA, 5235 bp, synthetic construct
  misc_feature 1..5235: note = Description of Artificial Sequence: Synthetic coding sequence
  source 1..5235: mol_type = other DNA
atgaggctgctgtggggcctcatctgggccagcagcttcttcaccctgagcctgcagaagccccggctgctgctcttcagccccagcgtggtgcacctgggcgtgcccctgtctgtgggcgtgcagctgcaggatgtgccccggggccaggtggtgaagggctctgtgttcctgaggaaccccagcagaaataatgtgccctgcagccccaaggtggacttcaccctgagcagcgagcgggactttgccctgctgagcctgcaggtgcccctgaaggatgccaagagctgtggcctgcaccagctgctgcggggccctgaggtgcagctggtggcccacagcccctggctgaaggacagcctgagcaggaccaccaacatccagggcatcaacctgctcttcagcagcagaagaggccacctgttcctgcagacagaccagcccatctacaaccctggccagagggtgcgctacagagtgtttgccctggaccagaagatgaggcccagcacagacaccatcaccgtgatggtggagaacagccacggcctgcgggtgaggaagaaggaggtgtacatgcccagcagcatcttccaggatgactttgtgatcccagacatcagcgagcccggcacctggaagatcagcgcccgcttcagtgatggcctggagagcaacagcagcacccagtttgaggtgaagaagtatgtgctgcccaactttgaggtgaagatcaccccaggcaagccctacatcctgactgtgcccggccacctggatgagatgcagctggacatccaggcccgctacatctacggcaagcctgtgcagggcgtggcctacgtgcgcttcggcctgctggatgaagatggcaagaagaccttcttccggggcctggagagccagaccaagctggtgaatggccagagccacatcagcctgagcaaggccgagttccaggatgccctggagaagctgaacatgggcatcacagacctgcagggcctgcggctgtatgtggccgccgccatcatcgagagccctggaggagagatggaggaggccgagctgacctcctggtactttgtgagcagccccttcagcctggacctgagcaagaccaagaggcacctggtgcctggggcccccttcctgctgcaggccctggtgcgggagatgagcggcagccctgccagcggcatccctgtgaaggtgtctgccaccgtgagcagccctggctctgtgcctgaggtgcaggacatccagcagaacacagatggcagcggccaggtgtccatccccatcatcatcccccagaccatcagcgagctgcagctgtctgtgtctgctggcagcccccacccagccatcgcccggctgactgtggccgcccctccttctgggggccctggcttcctgagcattgaaagaccagacagccggcccccccgggtgggggacaccctgaacctgaacctgcgggctgtgggcagcggggccaccttcagccactactactacatgatcctgagccggggccagatcgtgttcatgaaccgggagcccaagaggaccctgacctctgtgtctgtgtttgtggaccaccacctggcccccagcttctactttgtggccttctactaccatggagaccaccctgtggccaacagcctgcgggtggatgtgcaggccggggcctgtgagggcaagctggagctgtctgtggatggagccaagcagtacagaaatggagagagcgtgaagctgcacctggagacagacagcctggccctggtggccctgggcgccctggacacagccctgtatgctgctggcagcaagagccacaagcccctgaacatgggcaaggtgtttgaggccatgaacagctatgacctgggctgcggccctgggggcggggacagcgccctgcaggtgttccaggccgccggcctggccttcagtgatggagaccagtggaccctgagcaggaagaggctgagctgccccaaggagaagaccaccaggaagaagagaaatgtgaacttccagaaggccatcaatgagaagctgggccagtatgccagccccacagccaagcgctgctgccaggatggagtgacccggctgcccatgatgaggagctgtgagcagagagctgcccgggtgcagcagcctgactgccgggagcccttcctgagctgctgccagtttgctgagagcctgaggaagaagagccgggacaagggccaggccggcctgcagagggccctggagatcctgcaggaggaggacctgattgatgaagatgacatccctgtgcgctccttcttccctgagaactggctgtggagggtggagaccgtggaccgcttccagatcctgaccctgtggctgcctgacagcctgaccacctgggagatccacggcctgagcctgagcaagaccaagggcctgtgtgtggccacccctgtgcagctgcgggtcttccgggagttccacctgcacctgcggctgcccatgtctgtgagaagatttgagcagctggagctgcggcctgtgctgtacaactacctggacaagaacctgactgtgtctgtgcacgtgtcccctgtggagggcctgtgcctggccggcggcggcggcctggcccagcaggtgctggtgcctgctggcagcgcccggcctgtggccttctctgtggtgcccacagctgctgctgctgtgtccctgaaggtggtggcccggggcagctttgagttccctgtgggagatgctgtgtccaaggtgctgcagatcgagaaggagggcgccatccaccgggaggagctggtgtatgagctgaaccccctggaccaccggggccgcaccctggagatccctggcaacagcgaccccaacatgatcccagatggagacttcaacagctatgtgcgggtgacagccagtgaccccctggacaccctgggcagcgagggcgccctgagccctggaggagtggccagcctgctgcggctgccccggggctgtggggagcagaccatgatctacctggcccccaccctggccgccagccgctacctggacaagacagagcagtggagcaccctgcccccagagaccaaggaccatgctgtggacctgatccagaagggctacatgaggatccagcagttcaggaaggcagatggcagctatgctgcctggctgagccgggacagcagcacctggctgacagcctttgtgctgaaggtgctgagcctggcccaggagcaggtgggcggcagccctgagaagctgcaggagaccagcaactggctgctgagccagcagcaggctgatggcagcttccaggacccctgccctgtgctggaccgctccatgcagggcggcctggtgggcaatgatgagaccgtggccctgacagcctttgtgaccatcgccctgcaccacggcctggccgtgttccaggatgagggcgctgagcccctgaagcagagggtggaggccagcatcagcaaggccaacagcttcctgggggagaaggccagcgctggcctgctgggcgcccacgccgccgccatcacagcctatgccctgaccctgaccaaggcccctgtggacctgctgggcgtggcccacaacaacctgatggccatggcccaggagaccggggacaacctgtactggggctctgtgacaggcagccagagcaatgctgtgagccccaccccagcccccaggaaccccagcgaccccatgccccaggccccagccctgtggattgagaccacagcctatgccctgctgcacctgctgctgcacgagggcaaggccgagatggctgaccaggccagcgcctggctgacccggcagggcagcttccagggcggcttccgcagcacccaggacacagtgattgccctggatgccctgagcgcctactggatcgccagccacaccacagaggagcggggcctgaatgtgaccctgagcagcactggaagaaatggcttcaagagccacgccctgcagctgaacaaccggcagatccggggcctggaggaggagctgcagttcagcctgggcagcaagatcaacgtgaaggtgggcggcaacagcaagggcaccctgaaggtgctgcggacctacaacgtgctggacatgaagaacaccacctgccaggacctgcagatcgaggtgacagtgaagggccacgtggagtacaccatggaggccaatgaagattatgaggactatgaatatgatgagctgcctgccaaggatgatcctgatgcccccctgcagcctgtgacccccctgcagctgtttgagggcagaagaaacagaagaagaagagaggcccccaaggtggtggaggagcaggagagccgggtgcactacacagtgtgcatctggagaaatggcaaggtgggcctgagcggcatggccatcgcagatgtgaccctgctgagcggcttccacgccctgcgggctgacctggagaagctgaccagcctgagtgacagatatgtgagccactttgaaacagagggcccccacgtgctgctgtactttgacagcgtgcccaccagccgggagtgtgtgggctttgaggccgtgcaggaggtgcctgtgggcctggtgcagcctgccagcgccaccctgtatgactactacaaccctgagcggcgctgcagcgtcttctacggggcccccagcaagagccggctgctggccaccctgtgcagcgctgaggtgtgccagtgtgccgagggcaagtgcccccggcagaggcgggccctggagcggggcctgcaggatgaagatggctacaggatgaagtttgcctgctactacccccgggtggagtatggcttccaggtgaaggtgctgcgggaggacagccgggccgccttccggctgtttgagaccaagatcacccaggtgctgcacttcaccaaggatgtgaaggccgccgccaaccagatgaggaacttcctggtgcgggccagctgccgcctgcggctggagcccgggaaggagtacctgatcatgggcctggatggagccacctatgacctggagggccacccccagtacctgctggacagcaacagctggattgaggagatgcccagcgagcggctgtgccgcagcacccggcagagagctgcctgtgcccagctgaatgacttcctgcaggagtatggcacccagggctgccaggtgtag

SEQ ID NO: 148266 - DNA, 5097 bp, synthetic construct
  misc_feature 1..5097: note = Description of Artificial Sequence: Synthetic coding sequence
  source 1..5097: mol_type = other DNA
atgaggctgctgtggggcctcatctgggccagcagcttcttcaccctgagcctgcagaagccccggctgctgctcttcagccccagcgtggtgcacctgggcgtgcccctgtctgtgggcgtgcagctgcaggatgtgccccggggccaggtggtgaagggctctgtgttcctgaggaaccccagcagaaataatgtgccctgcagccccaaggtggacttcaccctgagcagcgagcgggactttgccctgctgagcctgcaggtgcccctgaaggatgccaagagctgtggcctgcaccagctgctgcggggccctgaggtgcagctggtggcccacagcccctggctgaaggacagcctgagcaggaccaccaacatccagggcatcaacctgctcttcagcagcagaagaggccacctgttcctgcagacagaccagcccatctacaaccctggccagagggtgcgctacagagtgtttgccctggaccagaagatgaggcccagcacagacaccatcaccgtgatggtggagaacagccacggcctgcgggtgaggaagaaggaggtgtacatgcccagcagcatcttccaggatgactttgtgatcccagacatcagcgagcccggcacctggaagatcagcgcccgcttcagtgatggcctggagagcaacagcagcacccagtttgaggtgaagaagtatgtgctgcccaactttgaggtgaagatcaccccaggcaagccctacatcctgactgtgcccggccacctggatgagatgcagctggacatccaggcccgctacatctacggcaagcctgtgcagggcgtggcctacgtgcgcttcggcctgctggatgaagatggcaagaagaccttcttccggggcctggagagccagaccaagctggtgaatggccagagccacatcagcctgagcaaggccgagttccaggatgccctggagaagctgaacatgggcatcacagacctgcagggcctgcggctgtatgtggccgccgccatcatcgagagccctggaggagagatggaggaggccgagctgacctcctggtactttgtgagcagccccttcagcctggacctgagcaagaccaagaggcacctggtgcctggggcccccttcctgctgcaggccctggtgcgggagatgagcggcagccctgccagcggcatccctgtgaaggtgtctgccaccgtgagcagccctggctctgtgcctgaggtgcaggacatccagcagaacacagatggcagcggccaggtgtccatccccatcatcatcccccagaccatcagcgagctgcagctgtctgtgtctgctggcagcccccacccagccatcgcccggctgactgtggccgcccctccttctgggggccctggcttcctgagcattgaaagaccagacagccggcccccccgggtgggggacaccctgaacctgaacctgcgggctgtgggcagcggggccaccttcagccactactactacatgatcctgagccggggccagatcgtgttcatgaaccgggagcccaagaggaccctgacctctgtgtctgtgtttgtggaccaccacctggcccccagcttctactttgtggccttctactaccatggagaccaccctgtggccaacagcctgcgggtggatgtgcaggccggggcctgtgagggcaagctggagctgtctgtggatggagccaagcagtacagaaatggagagagcgtgaagctgcacctggagacagacagcctggccctggtggccctgggcgccctggacacagccctgtatgctgctggcagcaagagccacaagcccctgaacatgggcaaggtgtttgaggccatgaacagctatgacctgggctgcggccctgggggcggggacagcgccctgcaggtgttccaggccgccggcctggccttcagtgatggagaccagtggaccctgagcaggaagaggctgagctgccccaaggagaagaccaccaggaagaagagaaatgtgaacttccagaaggccatcaatgagaagctgggccagtatgccagccccacagccaagcgctgctgccaggatggagtgacccggctgcccatgatgaggagctgtgagcagagagctgcccgggtgcagcagcctgactgccgggagcccttcctgagctgctgccagtttgctgagagcctgaggaagaagagccgggacaagggccaggccggcctgcagagggccctggagatcctgcaggaggaggacctgattgatgaagatgacatccctgtgcgctccttcttccctgagaactggctgtggagggtggagaccgtggaccgcttccagatcctgaccctgtggctgcctgacagcctgaccacctgggagatccacggcctgagcctgagcaagaccaagggcctgtgtgtggccacccctgtgcagctgcgggtcttccgggagttccacctgcacctgcggctgcccatgtctgtgagaagatttgagcagctggagctgcggcctgtgctgtacaactacctggacaagaacctgactgtgtctgtgcacgtgtcccctgtggagggcctgtgcctggccggcggcggcggcctggcccagcaggtgctggtgcctgctggcagcgcccggcctgtggccttctctgtggtgcccacagctgctgctgctgtgtccctgaaggtggtggcccggggcagctttgagttccctgtgggagatgctgtgtccaaggtgctgcagatcgagaaggagggcgccatccaccgggaggagctggtgtatgagctgaaccccctggaccaccggggccgcaccctggagatccctggcaacagcgaccccaacatgatcccagatggagacttcaacagctatgtgcgggtgacagccagtgaccccctggacaccctgggcagcgagggcgccctgagccctggaggagtggccagcctgctgcggctgccccggggctgtggggagcagaccatgatctacctggcccccaccctggccgccagccgctacctggacaagacagagcagtggagcaccctgcccccagagaccaaggaccatgctgtggacctgatccagaagggctacatgaggatccagcagttcaggaaggcagatggcagctatgctgcctggctgagccgggacagcagcacctggctgacagcctttgtgctgaaggtgctgagcctggcccaggagcaggtgggcggcagccctgagaagctgcaggagaccagcaactggctgctgagccagcagcaggctgatggcagcttccaggacccctgccctgtgctggaccgctccatgcagggcggcctggtgggcaatgatgagaccgtggccctgacagcctttgtgaccatcgccctgcaccacggcctggccgtgttccaggatgagggcgctgagcccctgaagcagagggtggaggccagcatcagcaaggccaacagcttcctgggggagaaggccagcgctggcctgctgggcgcccacgccgccgccatcacagcctatgccctgaccctgaccaaggcccctgtggacctgctgggcgtggcccacaacaacctgatggccatggcccaggagaccggggacaacctgtactggggctctgtgacaggcagccagagcaatgctgtgagccccaccccagcccccaggaaccccagcgaccccatgccccaggccccagccctgtggattgagaccacagcctatgccctgctgcacctgctgctgcacgagggcaaggccgagatggctgaccaggccagcgcctggctgacccggcagggcagcttccagggcggcttccgcagcacccaggacacagtgattgccctggatgccctgagcgcctactggatcgccagccacaccacagaggagcggggcctgaatgtgaccctgagcagcactggaagaaatggcttcaagagccacgccctgcagctgaacaaccggcagatccggggcctggaggaggagctgcagttcagcctgggcagcaagatcaacgtgaaggtgggcggcaacagcaagggcaccctgaaggtgctgcggacctacaacgtgctggacatgaagaacaccacctgccaggacctgcagatcgaggtgacagtgaagggccacgtggagtacaccatggaggccaatgaagattatgaggactatgaatatgatgagctgcctgccaaggatgatcctgatgcccccctgcagcctgtgacccccctgcagctgtttgagggcagaagaaacagaagaagaagagaggcccccaagctgaccagcctgagtgacagatatgtgagccactttgaaacagagggcccccacgtgctgctgtactttgacagcgtgcccaccagccgggagtgtgtgggctttgaggccgtgcaggaggtgcctgtgggcctggtgcagcctgccagcgccaccctgtatgactactacaaccctgagcggcgctgcagcgtcttctacggggcccccagcaagagccggctgctggccaccctgtgcagcgctgaggtgtgccagtgtgccgagggcaagtgcccccggcagaggcgggccctggagcggggcctgcaggatgaagatggctacaggatgaagtttgcctgctactacccccgggtggagtatggcttccaggtgaaggtgctgcgggaggacagccgggccgccttccggctgtttgagaccaagatcacccaggtgctgcacttcaccaaggatgtgaaggccgccgccaaccagatgaggaacttcctggtgcgggccagctgccgcctgcggctggagcccgggaaggagtacctgatcatgggcctggatggagccacctatgacctggagggccacccccagtacctgctggacagcaacagctggattgaggagatgcccagcgagcggctgtgccgcagcacccggcagagagctgcctgtgcccagctgaatgacttcctgcaggagtatggcacccagggctgccaggtgtag

SEQ ID NO: 148267 - DNA, 813 bp, synthetic construct
  misc_feature 1..813: note = Description of Artificial Sequence: Synthetic coding sequence
  source 1..813: mol_type = other DNA
atgtgcccagaggacagcctgcaggtgcccctgaaggatgccaagagctgtggcctgcaccagctgctgcggggccctgaggtgcagctggtggcccacagcccctggctgaaggacagcctgagcaggaccaccaacatccagggcatcaacctgctcttcagcagcagaagaggccacctgttcctgcagacagaccagcccatctacaaccctggccagagggtgcgctacagagtgtttgccctggaccagaagatgaggcccagcacagacaccatcaccgtgatggtggagaacagccacggcctgcgggtgaggaagaaggaggtgtacatgcccagcagcatcttccaggatgactttgtgatcccagacatcagcgagcccggcacctggaagatcagcgcccgcttcagtgatggcctggagagcaacagcagcacccagtttgaggtgaagaagtatgtgctgcccaactttgaggtgaagatcaccccaggcaagccctacatcctgactgtgcccggccacctggatgagatgcagctggacatccaggcccgctacatctacggcaagcctgtgcagggcgtggcctacgtgcgcttcggcctgctggatgaagatggcaagaagaccttcttccggggcctggagagccagaccaagctggtgaatggccagagccacatcagcctgagcaaggccgagttccaggatgccctggagaagctgaacatgggcatcacagacctgcagggcctgcggctgtatgtggccgccgccatcatcgagagccctgggggctag

SEQ ID NO: 148268 - DNA, 5097 bp, synthetic construct
  misc_feature 1..5097: note = Description of Artificial Sequence: Synthetic coding sequence
  source 1..5097: mol_type = other DNA
atgaggctgctgtggggcctcatctgggccagcagcttcttcaccctgagcctgcagaagccccggctgctgctcttcagccccagcgtggtgcacctgggcgtgcccctgtctgtgggcgtgcagctgcaggatgtgccccggggccaggtggtgaagggctctgtgttcctgaggaaccccagcagaaataatgtgccctgcagccccaaggtggacttcaccctgagcagcgagcgggactttgccctgctgagcctgcaggtgcccctgaaggatgccaagagctgtggcctgcaccagctgctgcggggccctgaggtgcagctggtggcccacagcccctggctgaaggacagcctgagcaggaccaccaacatccagggcatcaacctgctcttcagcagcagaagaggccacctgttcctgcagacagaccagcccatctacaaccctggccagagggtgcgctacagagtgtttgccctggaccagaagatgaggcccagcacagacaccatcaccgtgatggtggagaacagccacggcctgcgggtgaggaagaaggaggtgtacatgcccagcagcatcttccaggatgactttgtgatcccagacatcagcgagcccggcacctggaagatcagcgcccgcttcagtgatggcctggagagcaacagcagcacccagtttgaggtgaagaagtatgtgctgcccaactttgaggtgaagatcaccccaggcaagccctacatcctgactgtgcccggccacctggatgagatgcagctggacatccaggcccgctacatctacggcaagcctgtgcagggcgtggcctacgtgcgcttcggcctgctggatgaagatggcaagaagaccttcttccggggcctggagagccagaccaagctggtgaatggccagagccacatcagcctgagcaaggccgagttccaggatgccctggagaagctgaacatgggcatcacagacctgcagggcctgcggctgtatgtggccgccgccatcatcgagtacccaggaggagagatggaggaggccgagctgacctcctggtactttgtgagcagccccttcagcctggacctgagcaagaccaagaggcacctggtgcctggggcccccttcctgctgcaggccctggtgcgggagatgagcggcagccctgccagcggcatccctgtgaaggtgtctgccaccgtgagcagccctggctctgtgcctgaggtgcaggacatccagcagaacacagatggcagcggccaggtgtccatccccatcatcatcccccagaccatcagcgagctgcagctgtctgtgtctgctggcagcccccacccagccatcgcccggctgactgtggccgcccctccttctgggggccctggcttcctgagcattgagtggccagacagccggcccccccgggtgggggacaccctgaacctgaacctgcgggctgtgggcagcggggccaccttcagccactactactacatgatcctgagccggggccagatcgtgttcatgaaccgggagcccaagaggaccctgacctctgtgtctgtgtttgtggaccaccacctggcccccagcttctactttgtggccttctactaccatggagaccaccctgtggccaacagcctgcgggtggatgtgcaggccggggcctgtgagggcaagctggagctgtctgtggatggagccaagcagtacagaaatggagagagcgtgaagctgcacctggagacagacagcctggccctggtggccctgggcgccctggacacagccctgtatgctgctggcagcaagagccacaagcccctgaacatgggcaaggtgtttgaggccatgaacagctatgacctgggctgcggccctgggggcggggacagcgccctgcaggtgttccaggccgccggcctggccttcagtgatggagaccagtggaccctgagcaggaagaggctgagctgccccaaggagaagaccaccaggaagaagagaaatgtgaacttccagaaggccatcaatgagaagctgggccagtatgccagccccacagccaagcgctgctgccaggatggagtgacccggctgcccatgatgaggagctgtgagcagagagctgcccgggtgcagcagcctgactgccgggagcccttcctgagctgctgccagtttgctgagagcctgaggaagaagagccgggacaagggccaggccggcctgcagagggccctggagatcctgcaggaggaggacctgattgatgaagatgacatccctgtgcgctccttcttccctgagaactggctgtggagggtggagaccgtggaccgcttccagatcctgaccctgtggctgcctgacagcctgaccacctgggagatccacggcctgagcctgagcaagaccaagggcctgtgtgtggccacccctgtgcagctgcgggtcttccgggagttccacctgcacctgcggctgcccatgtctgtgagaagatttgagcagctggagctgcggcctgtgctgtacaactacctggacaagaacctgactgtgtctgtgcacgtgtcccctgtggagggcctgtgcctggccggcggcggcggcctggcccagcaggtgctggtgcctgctggcagcgcccggcctgtggccttctctgtggtgcccacagctgctgctgctgtgtccctgaaggtggtggcccggggcagctttgagttccctgtgggagatgctgtgtccaaggtgctgcagatcgagaaggagggcgccatccaccgggaggagctggtgtatgagctgaaccccctggaccaccggggccgcaccctggagatccctggcaacagcgaccccaacatgatcccagatggagacttcaacagctatgtgcgggtgacagccagtgaccccctggacaccctgggcagcgagggcgccctgagccctggaggagtggccagcctgctgcggctgccccggggctgtggggagcagaccatgatctacctggcccccaccctggccgccagccgctacctggacaagacagagcagtggagcaccctgcccccagagaccaaggaccatgctgtggacctgatccagaagggctacatgaggatccagcagttcaggaaggcagatggcagctatgctgcctggctgagccgggacagcagcacctggctgacagcctttgtgctgaaggtgctgagcctggcccaggagcaggtgggcggcagccctgagaagctgcaggagaccagcaactggctgctgagccagcagcaggctgatggcagcttccaggacccctgccctgtgctggaccgctccatgcagggcggcctggtgggcaatgatgagaccgtggccctgacagcctttgtgaccatcgccctgcaccacggcctggccgtgttccaggatgagggcgctgagcccctgaagcagagggtggaggccagcatcagcaaggccaacagcttcctgggggagaaggccagcgctggcctgctgggcgcccacgccgccgccatcacagcctatgccctgaccctgaccaaggcccctgtggacctgctgggcgtggcccacaacaacctgatggccatggcccaggagaccggggacaacctgtactggggctctgtgacaggcagccagagcaatgctgtgagccccaccccagcccccaggaaccccagcgaccccatgccccaggccccagccctgtggattgagaccacagcctatgccctgctgcacctgctgctgcacgagggcaaggccgagatggctgaccaggccgccgcctggctgacccggcagggcagcttccagggcggcttccgcagcacccaggacacagtgattgccctggatgccctgagcgcctactggatcgccagccacaccacagaggagcggggcctgaatgtgaccctgagcagcactggaagaaatggcttcaagagccacgccctgcagctgaacaaccggcagatccggggcctggaggaggagctgcagttcagcctgggcagcaagatcaacgtgaaggtgggcggcaacagcaagggcaccctgaaggtgctgcggacctacaacgtgctggacatgaagaacaccacctgccaggacctgcagatcgaggtgacagtgaagggccacgtggagtacaccatggaggccaatgaagattatgaggactatgaatatgatgagctgcctgccaaggatgatcctgatgcccccctgcagcctgtgacccccctgcagctgtttgagggcagaagaaacagaagaagaagagaggcccccaagctgaccagcctgagtgacagatatgtgagccactttgaaacagagggcccccacgtgctgctgtactttgacagcgtgcccaccagccgggagtgtgtgggctttgaggccgtgcaggaggtgcctgtgggcctggtgcagcctgccagcgccaccctgtatgactactacaaccctgagcggcgctgcagcgtcttctacggggcccccagcaagagccggctgctggccaccctgtgcagcgctgaggtgtgccagtgtgccgagggcaagtgcccccggcagaggcgggccctggagcggggcctgcaggatgaagatggctacaggatgaagtttgcctgctactacccccgggtggagtatggcttccaggtgaaggtgctgcgggaggacagccgggccgccttccggctgtttgagaccaagatcacccaggtgctgcacttcaccaaggatgtgaaggccgccgccaaccagatgaggaacttcctggtgcgggccagctgccgcctgcggctggagcccgggaaggagtacctgatcatgggcctggatggagccacctatgacctggagggccacccccagtacctgctggacagcaacagctggattgaggagatgcccagcgagcggctgtgccgcagcacccggcagagagctgcctgtgcccagctgaatgacttcctgcaggagtatggcacccagggctgccaggtgtag

SEQ ID NO: 148269 - DNA, 1536 bp, synthetic construct
  misc_feature 1..1536: note = Description of Artificial Sequence: Synthetic coding sequence
  source 1..1536: mol_type = other DNA
atggccaagggcctgtctgtgcagaatgacaagcaccctggctaccagcctgccctgctgctgagccctggggcccccctgtttgctgatggccctgcctatgccctgctgcacctgctgctgcacgagggcaaggccgagatggctgaccaggccgccgcctggctgacccggcagggcagcttccagggcggcttccgcagcacccaggacaccgtcatcgccctggatgccctgagcgcctactggatcgccagccacaccacagaggagcggggcctgaatgtgaccctgagcagcactggaagaaatggcttcaagagccacgccctgcagctgaacaaccggcagatccggggcctggaggaggagctgcagttcagcctgggcagcaagatcaacgtgaaggtgggcggcaacagcaagggcaccctgaaggtgctgcggacctacaacgtgctggacatgaagaacaccacctgccaggacctgcagatcgaggtgacagtgaagggccacgtggagtacaccatggaggccaatgaagattatgaagattatgaatatgatgagctgcctgccaaggatgatcctgatgcccccctgcagcctgtgacccccctgcagctgtttgagggcagaagaaacagaagaagaagagaggcccccaaggtggtggaggagcaggagagccgggtgcactacacagtgtgcatctggagaaatggcaaggtgggcctgagcggcatggccatcgcagatgtgaccctgctgagcggcttccacgccctgcgggctgacctggagaagctgaccagcctgagtgaccgctacgtgagccactttgaaacagagggcccccacgtgctgctgtactttgattctgtgcccaccagcagagaatgtgtgggctttgaagctgtgcaggaggtgcctgtgggcctggtgcagcctgccagcgccaccctgtatgactactacaaccctgagcggcgctgcagcgtcttctatggagcccccagcaagagccggctgctggccaccctgtgcagcgctgaggtgtgccagtgtgccgagggcaaatgtccccggcagaggcgggccctggagcggggcctgcaggatgaagatggctacaggatgaagtttgcctgctactacccccgggtggagtatggcttccaggtgaaggtgctgcgggaggacagcagagctgccttccggctgtttgagaccaagatcacccaggtgctgcacttcaccaaggatgtgaaggctgctgccaaccagatgaggaacttcctggtgcgggccagctgccgcctgcggctggagcccgggaaggagtacctgatcatgggcctggatggagccacctatgacctggagggccacccccagtacctgctggacagcaacagctggattgaggagatgcccagcgagcggctgtgccgcagcacccggcagagagctgcctgtgcccagctgaatgacttcctgcaggagtatggcacccagggctgccaggtgtag

SEQ ID NO: 148270 - DNA, 5097 bp, synthetic construct
  misc_feature 1..5097: note = Description of Artificial Sequence: Synthetic coding sequence
  source 1..5097: mol_type = other DNA
atgaggctgctgtggggcctcatctgggccagcagcttcttcaccctgagcctgcagaagccccggctgctgctcttcagccccagcgtggtgcacctgggcgtgcccctgtctgtgggcgtgcagctgcaggatgtgccccggggccaggtggtgaagggctctgtgttcctgaggaaccccagcagaaataatgtgccctgcagccccaaggtggacttcaccctgagcagcgagcgggactttgccctgctgagcctgcaggtgcccctgaaggatgccaagagctgtggcctgcaccagctgctgcggggccctgaggtgcagctggtggcccacagcccctggctgaaggacagcctgagcaggaccaccaacatccagggcatcaacctgctcttcagcagcagaagaggccacctgttcctgcagacagaccagcccatctacaaccctggccagagggtgcgctacagagtgtttgccctggaccagaagatgaggcccagcacagacaccatcaccgtgatggtggagaacagccacggcctgcgggtgaggaagaaggaggtgtacatgcccagcagcatcttccaggatgactttgtgatcccagacatcagcgagcccggcacctggaagatcagcgcccgcttcagtgatggcctggagagcaacagcagcacccagtttgaggtgaagaagtatgtgctgcccaactttgaggtgaagatcaccccaggcaagccctacatcctgactgtgcccggccacctggatgagatgcagctggacatccaggcccgctacatctacggcaagcctgtgcagggcgtggcctacgtgcgcttcggcctgctggatgaagatggcaagaagaccttcttccggggcctggagagccagaccaagctggtgaatggccagagccacatcagcctgagcaaggccgagttccaggatgccctggagaagctgaacatgggcatcacagacctgcagggcctgcggctgtatgtggccgccgccatcatcgagagccctggaggagagatggaggaggccgagctgacctcctggtactttgtgagcagccccttcagcctggacctgagcaagaccaagaggcacctggtgcctggggcccccttcctgctgcaggccctggtgcgggagatgagcggcagccctgccagcggcatccctgtgaaggtgtctgccaccgtgagcagccctggctctgtgcctgaggtgcaggacatccagcagaacacagatggcagcggccaggtgtccatccccatcatcatcccccagaccatcagcgagctgcagctgtctgtgtctgctggcagcccccacccagccatcgcccggctgactgtggccgcccctccttctgggggccctggcttcctgagcattgaaagaccagacagccggcccccccgggtgggggacaccctgaacctgaacctgcgggctgtgggcagcggggccaccttcagccactactactacatgatcctgagccggggccagatcgtgttcatgaaccgggagcccaagaggaccctgacctctgtgtctgtgtttgtggaccaccacctggcccccagcttctactttgtggccttctactaccatggagaccaccctgtggccaacagcctgcgggtggatgtgcaggccggggcctgtgagggcaagctggagctgtctgtggatggagccaagcagtacagaaatggagagagcgtgaagctgcacctggagacagacagcctggccctggtggccctgggcgccctggacacagccctgtatgctgctggcagcaagagccacaagcccctgaacatgggcaaggtgtttgaggccatgaacagctatgacctgggctgcggccctgggggcggggacagcgccctgcaggtgttccaggccgccggcctggccttcagtgatggagaccagtggaccctgagcaggaagaggctgagctgccccaaggagaagaccaccaggaagaagagaaatgtgaacttccagaaggccatcaatgagaagctgggccagtatgccagccccacagccaagcgctgctgccaggatggagtgacccggctgcccatgatgaggagctgtgagcagagagctgcccgggtgcagcagcctgactgccgggagcccttcctgagctgctgccagtttgctgagagcctgaggaagaagagccgggacaagggccaggccggcctgcagagggccctggagatcctgcaggaggaggacctgattgatgaagatgacatccctgtgcgctccttcttccctgagaactggctgtggagggtggagaccgtggaccgcttccagatcctgaccctgtggctgcctgacagcctgaccacctgggagatccacggcctgagcctgagcaagaccaagggcctgtgtgtggccacccctgtgcagctgcgggtcttccgggagttccacctgcacctgcggctgcccatgtctgtgagaagatttgagcagctggagctgcggcctgtgctgtacaactacctggacaagaacctgactgtgtctgtgcacgtgtcccctgtggagggcctgtgcctggccggcggcggcggcctggcccagcaggtgctggtgcctgctggcagcgcccggcctgtggccttctctgtggtgcccacagctgctgctgctgtgtccctgaaggtggtggcccggggcagctttgagttccctgtgggagatgctgtgtccaaggtgctgcagatcgagaaggagggcgccatccaccgggaggagctggtgtatgagctgaaccccctggaccaccggggccgcaccctggagatccctggcaacagcgaccccaacatgatcccagatggagacttcaacagctatgtgcgggtgacagccagtgaccccctggacaccctgggcagcgagggcgccctgagccctggaggagtggccagcctgctgcggctgccccggggctgtggggagcagaccatgatctacctggcccccaccctggccgccagccgctacctggacaagacagagcagtggagcaccctgcccccagagaccaaggaccatgctgtggacctgatccagaagggctacatgaggatccagcagttcaggaaggcagatggcagctatgctgcctggctgagccgggacagcagcacctggctgacagcctttgtgctgaaggtgctgagcctggcccaggagcaggtgggcggcagccctgagaagctgcaggagaccagcaactggctgctgagccagcagcaggctgatggcagcttccaggacccctgccctgtgctggaccgctccatgcagggcggcctggtgggcaatgatgagaccgtggccctgacagcctttgtgaccatcgccctgcaccacggcctggccgtgttccaggatgagggcgctgagcccctgaagcagagggtggaggccagcatcagcaaggccagcagcttcctgggggagaaggccagcgctggcctgctgggcgcccacgccgccgccatcacagcctatgccctgaccctgaccaaggcccctgtggacctgctgggcgtggcccacaacaacctgatggccatggcccaggagaccggggacaacctgtactggggctctgtgacaggcagccagagcaatgctgtgagccccaccccagcccccaggaaccccagcgaccccatgccccaggccccagccctgtggattgagaccacagcctatgccctgctgcacctgctgctgcacgagggcaaggccgagatggctgaccaggccgccgcctggctgacccggcagggcagcttccagggcggcttccgcagcacccaggacacagtgattgccctggatgccctgagcgcctactggatcgccagccacaccacagaggagcggggcctgaatgtgaccctgagcagcactggaagaaatggcttcaagagccacgccctgcagctgaacaaccggcagatccggggcctggaggaggagctgcagttcagcctgggcagcaagatcaacgtgaaggtgggcggcaacagcaagggcaccctgaaggtgctgcggacctacaacgtgctggacatgaagaacaccacctgccaggacctgcagatcgaggtgacagtgaagggccacgtggagtacaccatggaggccaatgaagattatgaggactatgaatatgatgagctgcctgccaaggatgatcctgatgcccccctgcagcctgtgacccccctgcagctgtttgagggcagaagaaacagaagaagaagagaggcccccaagctgaccagcctgagtgacagatatgtgagccactttgaaacagagggcccccacgtgctgctgtactttgacagcgtgcccaccagccgggagtgtgtgggctttgaggccgtgcaggaggtgcctgtgggcctggtgcagcctgccagcgccaccctgtatgactactacaaccctgagcggcgctgcagcgtcttctacggggcccccagcaagagccggctgctggccaccctgtgcagcgctgaggtgtgccagtgtgccgagggcaagtgcccccggcagaggcgggccctggagcggggcctgcaggatgaagatggctacaggatgaagtttgcctgctactacccccgggtggagtatggcttccaggtgaaggtgctgcgggaggacagccgggccgccttccggctgtttgagaccaagatcacccaggtgctgcacttcaccaaggatgtgaaggccgccgccaaccagatgaggaacttcctggtgcgggccagctgccgcctgcggctggagcccgggaaggagtacctgatcatgggcctggatggagccacctatgacctggagggccacccccagtacctgctggacagcaacagctggattgaggagatgcccagcgagcggctgtgccgcagcacccggcagagagctgcctgtgcccagctgaatgacttcctgcaggagtatggcacccagggctgccaggtgtag

SEQ ID NO: 148271 - DNA, 5097 bp, synthetic construct
  misc_feature 1..5097: note = Description of Artificial Sequence: Synthetic coding sequence
  source 1..5097: mol_type = other DNA
atgaggctgctgtggggcctcatctgggccagcagcttcttcaccctgagcctgcagaagccccggctgctgctcttcagccccagcgtggtgcacctgggcgtgcccctgtctgtgggcgtgcagctgcaggatgtgccccggggccaggtggtgaagggctctgtgttcctgaggaaccccagcagaaataatgtgccctgcagccccaaggtggacttcaccctgagcagcgagcgggactttgccctgctgagcctgcaggtgcccctgaaggatgccaagagctgtggcctgcaccagctgctgcggggccctgaggtgcagctggtggcccacagcccctggctgaaggacagcctgagcaggaccaccaacatccagggcatcaacctgctcttcagcagcagaagaggccacctgttcctgcagacagaccagcccatctacaaccctggccagagggtgcgctacagagtgtttgccctggaccagaagatgaggcccagcacagacaccatcaccgtgatggtggagaacagccacggcctgcgggtgaggaagaaggaggtgtacatgcccagcagcatcttccaggatgactttgtgatcccagacatcagcgagcccggcacctggaagatcagcgcccgcttcagtgatggcctggagagcaacagcagcacccagtttgaggtgaagaagtatgtgctgcccaactttgaggtgaagatcaccccaggcaagccctacatcctgactgtgcccggccacctggatgagatgcagctggacatccaggcccgctacatctacggcaagcctgtgcagggcgtggcctacgtgcgcttcggcctgctggatgaagatggcaagaagaccttcttccggggcctggagagccagaccaagctggtgaatggccagagccacatcagcctgagcaaggccgagttccaggatgccctggagaagctgaacatgggcatcacagacctgcagggcctgcggctgtatgtggccgccgccatcatcgagtacccaggaggagagatggaggaggccgagctgacctcctggtactttgtgagcagccccttcagcctggacctgagcaagaccaagaggcacctggtgcctggggcccccttcctgctgcaggccctggtgcgggagatgagcggcagccctgccagcggcatccctgtgaaggtgtctgccaccgtgagcagccctggctctgtgcctgaggtgcaggacatccagcagaacacagatggcagcggccaggtgtccatccccatcatcatcccccagaccatcagcgagctgcagctgtctgtgtctgctggcagcccccacccagccatcgcccggctgactgtggccgcccctccttctgggggccctggcttcctgagcattgaaagaccagacagccggcccccccgggtgggggacaccctgaacctgaacctgcgggctgtgggcagcggggccaccttcagccactactactacatgatcctgagccggggccagatcgtgttcatgaaccgggagcccaagaggaccctgacctctgtgtctgtgtttgtggaccaccacctggcccccagcttctactttgtggccttctactaccatggagaccaccctgtggccaacagcctgcgggtggatgtgcaggccggggcctgtgagggcaagctggagctgtctgtggatggagccaagcagtacagaaatggagagagcgtgaagctgcacctggagacagacagcctggccctggtggccctgggcgccctggacacagccctgtatgctgctggcagcaagagccacaagcccctgaacatgggcaaggtgtttgaggccatgaacagctatgacctgggctgcggccctgggggcggggacagcgccctgcaggtgttccaggccgccggcctggccttcagtgatggagaccagtggaccctgagcaggaagaggctgagctgccccaaggagaagaccaccaggaagaagagaaatgtgaacttccagaaggccatcaatgagaagctgggccagtatgccagccccacagccaagcgctgctgccaggatggagtgacccggctgcccatgatgaggagctgtgagcagagagctgcccgggtgcagcagcctgactgccgggagcccttcctgagctgctgccagtttgctgagagcctgaggaagaagagccgggacaagggccaggccggcctgcagagggccctggagatcctgcaggaggaggacctgattgatgaagatgacatccctgtgcgctccttcttccctgagaactggctgtggagggtggagaccgtggaccgcttccagatcctgaccctgtggctgcctgacagcctgaccacctgggagatccacggcctgagcctgagcaagaccaagggcctgtgtgtggccacccctgtgcagctgcgggtcttccgggagttccacctgcacctgcggctgcccatgtctgtgagaagatttgagcagctggagctgcggcctgtgctgtacaactacctggacaagaacctgactgtgtctgtgcacgtgtcccctgtggagggcctgtgcctggccggcggcggcggcctggcccagcaggtgctggtgcctgctggcagcgcccggcctgtggccttctctgtggtgcccacagctgctgctgctgtgtccctgaaggtggtggcccggggcagctttgagttccctgtgggagatgctgtgtccaaggtgctgcagatcgagaaggagggcgccatccaccgggaggagctggtgtatgagctgaaccccctggaccaccggggccgcaccctggagatccctggcaacagcgaccccaacatgatcccagatggagacttcaacagctatgtgcgggtgacagccagtgaccccctggacaccctgggcagcgagggcgccctgagccctggaggagtggccagcctgctgcggctgccccggggctgtggggagcagaccatgatctacctggcccccaccctggccgccagccgctacctggacaagacagagcagtggagcaccctgcccccagagaccaaggaccatgctgtggacctgatccagaagggctacatgaggatccagcagttcaggaaggcagatggcagctatgctgcctggctgagccgggacagcagcacctggctgacagcctttgtgctgaaggtgctgagcctggcccaggagcaggtgggcggcagccctgagaagctgcaggagaccagcaactggctgctgagccagcagcaggctgatggcagcttccaggacccctgccctgtgctggaccgctccatgcagggcggcctggtgggcaatgatgagaccgtggccctgacagcctttgtgaccatcgccctgcaccacggcctggccgtgttccaggatgagggcgctgagcccctgaagcagagggtggaggccagcatcagcaaggccaacagcttcctgggggagaaggccagcgctggcctgctgggcgcccacgccgccgccatcacagcctatgccctgaccctgaccaaggcccctgtggacctgctgggcgtggcccacaacaacctgatggccatggcccaggagaccggggacaacctgtactggggctctgtgacaggcagccagagcaatgctgtgagccccaccccagcccccaggaaccccagcgaccccatgccccaggccccagccctgtggattgagaccacagcctatgccctgctgcacctgctgctgcacgagggcaaggccgagatggctgaccaggccgccgcctggctgacccggcagggcagcttccagggcggcttccgcagcacccaggacacagtgattgccctggatgccctgagcgcctactggatcgccagccacaccacagaggagcggggcctgaatgtgaccctgagcagcactggaagaaatggcttcaagagccacgccctgcagctgaacaaccggcagatccggggcctggaggaggagctgcagttcagcctgggcagcaagatcaacgtgaaggtgggcggcaacagcaagggcaccctgaaggtgctgcggacctacaacgtgctggacatgaagaacaccacctgccaggacctgcagatcgaggtgacagtgaagggccacgtggagtacaccatggaggccaatgaagattatgaggactatgaatatgatgagctgcctgccaaggatgatcctgatgcccccctgcagcctgtgacccccctgcagctgtttgagggcagaagaaacagaagaagaagagaggcccccaagctgaccagcctgagtgacagatatgtgagccactttgaaacagagggcccccacgtgctgctgtactttgacagcgtgcccaccagccgggagtgtgtgggctttgaggccgtgcaggaggtgcctgtgggcctggtgcagcctgccagcgccaccctgtatgactactacaaccctgagcggcgctgcagcgtcttctacggggcccccagcaagagccggctgctggccaccctgtgcagcgctgaggtgtgccagtgtgccgagggcaagtgcccccggcagaggcgggccctggagcggggcctgcaggatgaagatggctacaggatgaagtttgcctgctactacccccgggtggagtatggcttccaggtgaaggtgctgcgggaggacagccgggccgccttccggctgtttgagaccaagatcacccaggtgctgcacttcaccaaggatgtgaaggccgccgccaaccagatgaggaacttcctggtgcgggccagctgccgcctgcggctggagcccgggaaggagtacctgatcatgggcctggatggagccacctatgacctggagggccacccccagtacctgctggacagcaacagctggattgaggagatgcccagcgagcggctgtgccgcagcacccggcagagagctgcctgtgcccagctgaatgacttcctgcaggagtatggcacccagggctgccaggtgtag

SEQ ID NO: 148272 - DNA, 1536 bp, synthetic construct; identical to SEQ ID NO: 148269
  misc_feature 1..1536: note = Description of Artificial Sequence: Synthetic coding sequence
  source 1..1536: mol_type = other DNA

SEQ ID NO: 148273 - DNA, 813 bp, synthetic construct
  misc_feature 1..813: note = Description of Artificial Sequence: Synthetic coding sequence
  source 1..813: mol_type = other DNA
atgtgcccagaggacagcctgcaggtgcccctgaaggatgccaagagctgtggcctgcaccagctgctgcggggccctgaggtgcagctggtggcccacagcccctggctgaaggacagcctgagcaggaccaccaacatccagggcatcaacctgctcttcagcagcagaagaggccacctgttcctgcagacagaccagcccatctacaaccctggccagagggtgcgctacagagtgtttgccctggaccagaagatgaggcccagcacagacaccatcaccgtgatggtggagaacagccacggcctgcgggtgaggaagaaggaggtgtacatgcccagcagcatcttccaggatgactttgtgatcccagacatcagcgagcccggcacctggaagatcagcgcccgcttcagtgatggcctggagagcaacagcagcacccagtttgaggtgaagaagtatgtgctgcccaactttgaggtgaagatcaccccaggcaagccctacatcctgactgtgcccggccacctggatgagatgcagctggacatccaggcccgctacatctacggcaagcctgtgcagggcgtggcctacgtgcgcttcggcctgctggatgaagatggcaagaagaccttcttccggggcctggagagccagaccaagctggtgaatggccagagccacatcagcctgagcaaggccgagttccaggatgccctggagaagctgaacatgggcatcacagacctgcagggcctgcggctgtatgtggccgccgccatcatcgagtacccaggcggctag

SEQ ID NO: 148274 - DNA, 5235 bp, synthetic construct
  misc_feature 1..5235: note = Description of Artificial Sequence: Synthetic coding sequence
  source 1..5235: mol_type = other DNA
atgaggctgctgtggggcctcatctgggccagcagcttcttcaccctgagcctgcagaagccccggctgctgctcttcagccccagcgtggtgcacctgggcgtgcccctgtctgtgggcgtgcagctgcaggatgtgccccggggccaggtggtgaagggctctgtgttcctgaggaaccccagcagaaataatgtgccctgcagccccaaggtggacttcaccctgagcagcgagcgggactttgccctgctgagcctgcaggtgcccctgaaggatgccaagagctgtggcctgcaccagctgctgcggggccctgaggtgcagctggtggcccacagcccctggctgaaggacagcctgagcaggaccaccaacatccagggcatcaacctgctcttcagcagcagaagaggccacctgttcctgcagacagaccagcccatctacaaccctggccagagggtgcgctacagagtgtttgccctggaccagaagatgaggcccagcacagacaccatcaccgtgatggtggagaacagccacggcctgcgggtgaggaagaaggaggtgtacatgcccagcagcatcttccaggatgactttgtgatcccagacatcagcgagcccggcacctggaagatcagcgcccgcttcagtgatggcctggagagcaacagcagcacccagtttgaggtgaagaagtatgtgctgcccaactttgaggtgaagatcaccccaggcaagccctacatcctgactgtgcccggccacctggatgagatgcagctggacatccaggcccgctacatctacggcaagcctgtgcagggcgtggcctacgtgcgcttcggcctgctggatgaagatggcaagaagaccttcttccggggcctggagagccagaccaagctggtgaatggccagagccacatcagcctgagcaaggccgagttccaggatgccctggagaagctgaacatgggcatcacagacctgcagggcctgcggctgtatgtggccgccgccatcatcgagagccctggaggagagatggaggaggccgagctgacctcctggtactttgtgagcagccccttcagcctggacctgagcaagaccaagaggcacctggtgcctggggcccccttcctgctgcaggccctggtgcgggagatgagcggcagccctgccagcggcatccctgtgaaggtgtctgccaccgtgagcagccctggctctgtgcctgaggtgcaggacatccagcagaacacagatggcagcggccaggtgtccatccccatcatcatcccccagaccatcagcgagctgcagctgtctgtgtctgctggcagcccccacccagccatcgcccggctgactgtggccgcccctccttctgggggccctggcttcctgagcattgaaagaccagacagccggcccccccgggtgggggacaccctgaacctgaacctgcgggctgtgggcagcggggccaccttcagccactactactacatgatcctgagccggggccagatcgtgttcatgaaccgggagcccaagaggaccctgacctctgtgtctgtgtttgtggaccaccacctggcccccagcttctactttgtggccttctactaccatggagaccaccctgtggccaacagcctgcgggtggatgtgcaggccggggcctgtgagggcaagctggagctgtctgtggatggagccaagcagtacagaaatggagagagcgtgaagctgcacctggagacagacagcctggccctggtggccctgggcgccctggacacagccctgtatgctgctggcagcaagagccacaagcccctgaacatgggcaaggtgtttgaggccatgaacagctatgacctgggctgcggccctgggggcggggacagcgccctgcaggtgttccaggccgccggcctggccttcagtgatggagaccagtggaccctgagcaggaagaggctgagctgccccaaggagaagaccaccaggaagaagagaaatgtgaacttccagaaggccatcaatgagaagctgggccagtatgccagccccacagccaagcgctgctgccaggatggagtgacccggctgcccatgatgaggagctgtgagcagagagctgcccgggtgcagcagcctgactgccgggagcccttcctgagctgctgccagtttgctgagagcctgaggaagaagagccgggacaagggccaggccggcctgcagagggccctggagatcctgcaggaggaggacctgattgatgaagatgacatccctgtgcgctccttcttccctgagaactggctgtggagggtggagaccgtggaccgcttccagatcctgaccctgtggctgcctgacagcctgaccacctgggagatccacggcctgagcctgagcaagaccaagggcctgtgtgtggccacccctgtgcagctgcgggtcttccgggagttccacctgcacctgcggctgcccatgtctgtgagaagatttgagcagctggagctgcggcctgtgctgtacaactacctggacaagaacctgactgtgtctgtgcacgtgtcccctgtggagggcctgtgcctggccggcggcggcggcctggcccagcaggtgctggtgcctgctggcagcgcccggcctgtggccttctctgtggtgcccacagctgccacagctgtgtccctgaaggtggtggcccggggcagctttgagttccctgtgggagatgctgtgtccaaggtgctgcagatcgagaaggagggcgccatccaccgggaggagctggtgtatgagctgaaccccctggaccaccggggccgcaccctggagatccctggcaacagcgaccccaacatgatcccagatggagacttcaacagctatgtgcgggtgacagccagtgaccccctggacaccctgggcagcgagggcgccctgagccctggaggagtggccagcctgctgcggctgccccggggctgtggggagcagaccatgatctacctggcccccaccctggccgccagccgctacctggacaagacagagcagtggagcaccctgcccccagagaccaaggaccatgctgtggacctgatccagaagggctacatgaggatccagcagttcaggaaggcagatggcagctatgctgcctggctgagccggggcagcagcacctggctgacagcctttgtgctgaaggtgctgagcctggcccaggagcaggtgggcggcagccctgagaagctgcaggagaccagcaactggctgctgagccagcagcaggctgatggcagcttccaggacctgagccctgtgatccaccgctccatgcagggcggcctggtgggcaatgatgagaccgtggccctgacagcctttgtgaccatcgccctgcaccacggcctggccgtgttccaggatgagggcgctgagcccctgaagcagagggtggaggccagcatcagcaaggccagcagcttcctgggggagaaggccagcgctggcctgctgggcgcccacgccgccgccatcacagcctatgccctgaccctgaccaaggccccagctgacctgcggggcgtggcccacaacaacctgatggccatggcccaggagaccggggacaacctgtactggggctctgtgacaggcagccagagcaatgctgtgagccccaccccagcccccaggaaccccagcgaccccatgccccaggccccagccctgtggattgagaccacagcctatgccctgctgcacctgctgctgcacgagggcaaggccgagatggctgaccaggccgccgcctggctgacccggcagggcagcttccagggcggcttccgcagcacccaggacacagtgattgccctggatgccctgagcgcctactggatcgccagccacaccacagaggagcggggcctgaatgtgaccctgagcagcactggaagaaatggcttcaagagccacgccctgcagctgaacaaccggcagatccggggcctggaggaggagctgcagttcagcctgggcagcaagatcaacgtgaaggtgggcggcaacagcaagggcaccctgaaggtgctgcggacctacaacgtgctggacatgaagaacaccacctgccaggacctgcagatcgaggtgacagtgaagggccacgtggagtacaccatggaggccaatgaagattatgaggactatgaatatgatgagctgcctgccaaggatgatcctgatgcccccctgcagcctgtgacccccctgcagctgtttgagggcagaagaaacagaagaagaagagaggcccccaaggtggtggaggagcaggagagccgggtgcactacacagtgtgcatctggagaaatggcaaggtgggcctgagcggcatggccatcgcagatgtgaccctgctgagcggcttccacgccctgcgggctgacctggagaagctgaccagcctgagtgacagatatgtgagccactttgaaacagagggcccccacgtgctgctgtactttgacagcgtgcccaccagccgggagtgtgtgggctttgaggccgtgcaggaggtgcctgtgggcctggtgcagcctgccagcgccaccctgtatgactactacaaccctgagcggcgctgcagcgtcttctacggggcccccagcaagagccggctgctggccaccctgtgcagcgctgaggtgtgccagtgtgccgagggcaagtgcccccggcagaggcgggccctggagcggggcctgcaggatgaagatggctacaggatgaagtttgcctgctactacccccgggtggagtatggcttccaggtgaaggtgctgcgggaggacagccgggccgccttccggctgtttgagaccaagatcacccaggtgctgcacttcaccaaggatgtgaaggccgccgccaaccagatgaggaacttcctggtgcgggccagctgccgcctgcggctggagcccgggaaggagtacctgatcatgggcctggatggagccacctatgacctggagggccacccccagtacctgctggacagcaacagctggattgaggagatgcccagcgagcggctgtgccgcagcacccggcagagagctgcctgtgcccagctgaatgacttcctgcaggagtatggcacccagggctgccaggtgtag

SEQ ID NO: 148275 - DNA, 5097 bp, synthetic construct
  misc_feature 1..5097: note = Description of Artificial Sequence: Synthetic coding sequence
  source 1..5097: mol_type = other DNA
atgaggctgctgtggggcctcatctgggccagcagcttcttcaccctgagcctgcagaagccccggctgctgctcttcagccccagcgtggtgcacctgggcgtgcccctgtctgtgggcgtgcagctgcaggatgtgccccggggccaggtggtgaagggctctgtgttcctgaggaaccccagcagaaataatgtgccctgcagccccaaggtggacttcaccctgagcagcgagcgggactttgccctgctgagcctgcaggtgcccctgaaggatgccaagagctgtggcctgcaccagctgctgcggggccctgaggtgcagctggtggcccacagcccctggctgaaggacagcctgagcaggaccaccaacatccagggcatcaacctgctcttcagcagcagaagaggccacctgttcctgcagacagaccagcccatctacaaccctggccagagggtgcgctacagagtgtttgccctggaccagaagatgaggcccagcacagacaccatcaccgtgatggtggagaacagccacggcctgcgggtgaggaagaaggaggtgtacatgcccagcagcatcttccaggatgactttgtgatcccagacatcagcgagcccggcacctggaagatcagcgcccgcttcagtgatggcctggagagcaacagcagcacccagtttgaggtgaagaagtatgtgctgcccaactttgaggtgaagatcaccccaggcaagccctacatcctgactgtgcccggccacctggatgagatgcagctggacatccaggcccgctacatctacggcaagcctgtgcagggcgtggcctacgtgcgcttcggcctgctggatgaagatggcaagaagaccttcttccggggcctggagagccagaccaagctggtgaatggccagagccacatcagcctgagcaaggccgagttccaggatgccctggagaagctgaacatgggcatcacagacctgcagggcctgcggctgtatgtggccgccgccatcatcgagagccctggaggagagatggaggaggccgagctgacctcctggtactttgtgagcagccccttcagcctggacctgagcaagaccaagaggcacctggtgcctggggcccccttcctgctgcaggccctggtgcgggagatgagcggcagccctgccagcggcatccctgtgaaggtgtctgccaccgtgagcagccctggctctgtgcctgaggtgcaggacatccagcagaacacagatggcagcggccaggtgtccatccccatcatcatcccccagaccatcagcgagctgcagctgtctgtgtctgctggcagcccccacccagccatcgcccggctgactgtggccgcccctccttctgggggccctggcttcctgagcattgaaagaccagacagccggcccccccgggtgggggacaccctgaacctgaacctgcgggctgtgggcagcggggccaccttcagccactactactacatgatcctgagccggggccagatcgtgttcatgaaccgggagcccaagaggaccctgacctctgtgtctgtgtttgtggaccaccacctggcccccagcttctactttgtggccttctactaccatggagaccaccctgtggccaacagcctgcgggtggatgtgcaggccggggcctgtgagggcaagctggagctgtctgtggatggagccaagcagtacagaaatggagagagcgtgaagctgcacctggagacagacagcctggccctggtggccctgggcgccctggacacagccctgtatgctgctggcagcaagagccacaagcccctgaacatgggcaaggtgtttgaggccatgaacagctatgacctgggctgcggccctgggggcggggacagcgccctgcaggtgttccaggccgccggcctggccttcagtgatggagaccagtggaccctgagcaggaagaggctgagctgccccaaggagaagaccaccaggaagaagagaaatgtgaacttccagaaggccatcaatgagaagctgggccagtatgccagccccacagccaagcgctgctgccaggatggagtgacccggctgcccatgatgaggagctgtgagcagagagctgcccgggtgcagcagcctgactgccgggagcccttcctgagctgctgccagtttgctgagagcctgaggaagaagagccgggacaagggccaggccggcctgcagagggccctggagatcctgcaggaggaggacctgattgatgaagatgacatccctgtgcgctccttcttccctgagaactggctgtggagggtggagaccgtggaccgcttccagatcctgaccctgtggctgcctgacagcctgaccacctgggagatccacggcctgagcctgagcaagaccaagggcctgtgtgtggccacccctgtgcagctgcgggtcttccgggagttccacctgcacctgcggctgcccatgtctgtgagaagatttgagcagctggagctgcggcctgtgctgtacaactacctggacaagaacctgactgtgtctgtgcacgtgtcccctgtggagggcctgtgcctggccggcggcggcggcctggcccagcaggtgctggtgcctgctggcagcgcccggcctgtggccttctctgtggtgcccacagctgccacagctgtgtccctgaaggtggtggcccggggcagctttgagttccctgtgggagatgctgtgtccaaggtgctgcagatcgagaaggagggcgccatccaccgggaggagctggtgtatgagctgaaccccctggaccaccggggccgcaccctggagatccctggcaacagcgaccccaacatgatcccagatggagacttcaacagctatgtgcgggtgacagccagtgaccccctggacaccctgggcagcgagggcgccctgagccctggaggagtggccagcctgctgcggctgccccggggctgtggggagcagaccatgatctacctggcccccaccctggccgccagccgctacctggacaagacagagcagtggagcaccctgcccccagagaccaaggaccatgctgtggacctgatccagaagggctacatgaggatccagcagttcaggaaggcagatggcagctatgctgcctggctgagccggggcagcagcacctggctgacagcctttgtgctgaaggtgctgagcctggcccaggagcaggtgggcggcagccctgagaagctgcaggagaccagcaactggctgctgagccagcagcaggctgatggcagcttccaggacctgagccctgtgatccaccgctccatgcagggcggcctggtgggcaatgatgagaccgtggccctgacagcctttgtgaccatcgccctgcaccacggcctggccgtgttccaggatgagggcgctgagcccctgaagcagagggtggaggccagcatcagcaaggccagcagcttcctgggggagaaggccagcgctggcctgctgggcgcccacgccgccgccatcacagcctatgccctgaccctgaccaaggccccagctgacctgcggggcgtggcccacaacaacctgatggccatggcccaggagaccggggacaacctgtactggggctctgtgacaggcagccagagcaatgctgtgagccccaccccagcccccaggaaccccagcgaccccatgccccaggccccagccctgtggattgagaccacagcctatgccctgctgcacctgctgctgcacgagggcaaggccgagatggctgaccaggccgccgcctggctgacccggcagggcagcttccagggcggcttccgcagcacccaggacacagtgattgccctggatgccctgagcgcctactggatcgccagccacaccacagaggagcggggcctgaatgtgaccctgagcagcactggaagaaatggcttcaagagccacgccctgcagctgaacaaccggcagatccggggcctggaggaggagctgcagttcagcctgggcagcaagatcaacgtgaaggtgggcggcaacagcaagggcaccctgaaggtgctgcggacctacaacgtgctggacatgaagaacaccacctgccaggacctgcagatcgaggtgacagtgaagggccacgtggagtacaccatggaggccaatgaagattatgaggactatgaatatgatgagctgcctgccaaggatgatcctgatgcccccctgcagcctgtgacccccctgcagctgtttgagggcagaagaaacagaagaagaagagaggcccccaagctgaccagcctgagtgacagatatgtgagccactttgaaacagagggcccccacgtgctgctgtactttgacagcgtgcccaccagccgggagtgtgtgggctttgaggccgtgcaggaggtgcctgtgggcctggtgcagcctgccagcgccaccctgtatgactactacaaccctgagcggcgctgcagcgtcttctacggggcccccagcaagagccggctgctggccaccctgtgcagcgctgaggtgtgccagtgtgccgagggcaagtgcccccggcagaggcgggccctggagcggggcctgcaggatgaagatggctacaggatgaagtttgcctgctactacccccgggtggagtatggcttccaggtgaaggtgctgcgggaggacagccgggccgccttccggctgtttgagaccaagatcacccaggtgctgcacttcaccaaggatgtgaaggccgccgccaaccagatgaggaacttcctggtgcgggccagctgccgcctgcggctggagcccgggaaggagtacctgatcatgggcctggatggagccacctatgacctggagggccacccccagtacctgctggacagcaacagctggattgaggagatgcccagcgagcggctgtgccgcagcacccggcagagagctgcctgtgcccagctgaatgacttcctgcaggagtatggcacccagggctgccaggtgtag

SEQ ID NO: 148276 - DNA, 5235 bp, synthetic construct; identical to SEQ ID NO: 148274
  misc_feature 1..5235: note = Description of Artificial Sequence: Synthetic coding sequence
  source 1..5235: mol_type = other DNA

SEQ ID NO: 148277 - DNA, 5235 bp, synthetic construct
  misc_feature 1..5235: note = Description of Artificial Sequence: Synthetic coding sequence
  source 1..5235: mol_type = other DNA
atgaggctgctgtggggcctcatctgggccagcagcttcttcaccctgagcctgcagaagccccggctgctgctcttcagccccagcgtggtgcacctgggcgtgcccctgtctgtgggcgtgcagctgcaggatgtgccccggggccaggtggtgaagggctctgtgttcctgaggaaccccagcagaaataatgtgccctgcagccccaaggtggacttcaccctgagcagcgagcgggactttgccctgctgagcctgcaggtgcccctgaaggatgccaagagctgtggcctgcaccagctgctgcggggccctgaggtgcagctggtggcccacagcccctggctgaaggacagcctgagcaggaccaccaacatccagggcatcaacctgctcttcagcagcagaagaggccacctgttcctgcagacagaccagcccatctacaaccctggccagagggtgcgctacagagtgtttgccctggaccagaagatgaggcccagcacagacaccatcaccgtgatggtggagaacagccacggcctgcgggtgaggaagaaggaggtgtacatgcccagcagcatcttccaggatgactttgtgatcccagacatcagcgagcccggcacctggaagatcagcgcccgcttcagtgatggcctggagagcaacagcagcacccagtttgaggtgaagaagtatgtgctgcccaactttgaggtgaagatcaccccaggcaagccctacatcctgactgtgcccggccacctggatgagatgcagctggacatccaggcccgctacatctacggcaagcctgtgcagggcgtggcctacgtgcgcttcggcctgctggatgaagatggcaagaagaccttcttccggggcctggagagccagaccaagctggtgaatggccagagccacatcagcctgagcaaggccgagttccaggatgccctggagaagctgaacatgggcatcacagacctgcagggcctgcggctgtatgtggccgccgccatcatcgagagccctggaggagagatggaggaggccgagctgacctcctggtactttgtgagcagccccttcagcctggacctgagcaagaccaagaggcacctggtgcctggggcccccttcctgctgcaggccctggtgcgggagatgagcggcagccctgccagcggcatccctgtgaaggtgtctgccaccgtgagcagccctggctctgtgcctgaggtgcaggacatccagcagaacacagatggcagcggccaggtgtccatccccatcatcatcccccagaccatcagcgagctgcagctgtctgtgtctgctggcagcccccacccagccatcgcccggctgactgtggccgcccctccttctgggggccctggcttcctgagcattgaaagaccagacagccggcccccccgggtgggggacaccctgaacctgaacctgcgggctgtgggcagcggggccaccttcagccactactactacatgatcctgagccggggccagatcgtgttcatgaaccgggagcccaagaggaccctgacctctgtgtctgtgtttgtggaccaccacctggcccccagcttctactttgtggccttctactaccatggagaccaccctgtggccaacagcctgcgggtggatgtgcaggccggggcctgtgagggcaagctggagctgtctgtggatggagccaagcagtacagaaatggagagagcgtgaagctgcacctggagacagacagcctggccctggtggccctgggcgccctggacacagccctgtatgctgctggcagcaagagccacaagcccctgaacatgggcaaggtgtttgaggccatgaacagctatgacctgggctgcggccctgggggcggggacagcgccctgcaggtgttccaggccgccggcctggccttcagtgatggagaccagtggaccctgagcaggaagaggctgagctgccccaaggagaagaccaccaggaagaagagaaatgtgaacttccagaaggccatcaatgagaagctgggccagtatgccagccccacagccaagcgctgctgccaggatggagtgacccggctgcccatgatgaggagctgtgagcagagagctgcccgggtgcagcagcctgactgccgggagcccttcctgagctgctgccagtttgctgagagcctgaggaagaagagccgggacaagggccaggccggcctgcagagggccctggagatcctgcaggaggaggacctgattgatgaagatgacatccctgtgcgctccttcttccctgagaactggctgtggagggtggagaccgtggaccgcttccagatcctgaccctgtggctgcctgacagcctgaccacctgggagatccacggcctgagcctgagcaagaccaagggcctgtgtgtggccacccctgtgcagctgcgggtcttccgggagttccacctgcacctgcggctgcccatgtctgtgagaagatttgagcagctggagctgcggcctgtgctgtacaactacctggacaagaacctgactgtgtctgtgcacgtgtcccctgtggagggcctgtgcctggccggcggcggcggcctggcccagcaggtgctggtgcctgctggcagcgcccggcctgtggccttctctgtggtgcccacagctgctgctgctgtgtccctgaaggtggtggcccggggcagctttgagttccctgtgggagatgctgtgtccaaggtgctgcagatcgagaaggagggcgccatccaccgggaggagctggtgtatgagctgaaccccctggaccaccggggccgcaccctggagatccctggcaacagcgaccccaacatgatcccagatggagacttcaacagctatgtgcgggtgacagccagtgaccccctggacaccctgggcagcgagggcgccctgagccctggaggagtggccagcctgctgcggctgccccggggctgtggggagcagaccatgatctacctggcccccaccctggccgccagccgctacctggacaagacagagcagtggagcaccctgcccccagagaccaaggaccatgctgtggacctgatccagaagggctacatgaggatccagcagttcaggaaggcagatggcagctatgctgcctggctgagccggggcagcagcacctggctgacagcctttgtgctgaaggtgctgagcctggcccaggagcaggtgggcggcagccctgagaagctgcaggagaccagcaactggctgctgagccagcagcaggctgatggcagcttccaggacctgagccctgtgatccaccgctccatgcagggcggcctggtgggcaatgatgagaccgtggccctgacagcctttgtgaccatcgccctgcaccacggcctggccgtgttccaggatgagggcgctgagcccctgaagcagagggtggaggccagcatcagcaaggccaacagcttcctgggggagaaggccagcgctggcctgctgggcgcccacgccgccgccatcacagcctatgccctgaccctgaccaaggccccagctgacctgcggggcgtggcccacaacaacctgatggccatggcccaggagaccggggacaacctgtactggggctctgtgacaggcagccagagcaatgctgtgagccccaccccagcccccaggaaccccagcgaccccatgccccaggccccagccctgtggattgagaccacagcctatgccctgctgcacctgctgctgcacgagggcaaggccgagatggctgaccaggccgccgcctggctgacccggcagggcagcttccagggcggcttccgcagcacccaggacacagtgattgccctggatgccctgagcgcctactggatcgccagccacaccacagaggagcggggcctgaatgtgaccctgagcagcactggaagaaatggcttcaagagccacgccctgcagctgaacaaccggcagatccggggcctggaggaggagctgcagttcagcctgggcagcaagatcaacgtgaaggtgggcggcaacagcaagggcaccctgaaggtgctgcggacctacaacgtgctggacatgaagaacaccacctgccaggacctgcagatcgaggtgacagtgaagggccacgtggagtacaccatggaggccaatgaagattatgaggactatgaatatgatgagctgcctgccaaggatgatcctgatgcccccctgcagcctgtgacccccctgcagctgtttgagggcagaagaaacagaagaagaagagaggcccccaaggtggtggaggagcaggagagccgggtgcactacacagtgtgcatctggagaaatggcaaggtgggcctgagcggcatggccatcgcagatgtgaccctgctgagcggcttccacgccctgcgggctgacctggagaagctgaccagcctgagtgacagatatgtgagccactttgaaacagagggcccccacgtgctgctgtactttgacagcgtgcccaccagccgggagtgtgtgggctttgaggccgtgcaggaggtgcctgtgggcctggtgcagcctgccagcgccaccctgtatgactactacaaccctgagcggcgctgcagcgtcttctacggggcccccagcaagagccggctgctggccaccctgtgcagcgctgaggtgtgccagtgtgccgagggcaagtgcccccggcagaggcgggccctggagcggggcctgcaggatgaagatggctacaggatgaagtttgcctgctactacccccgggtggagtatggcttccaggtgaaggtgctgcgggaggacagccgggccgccttccggctgtttgagaccaagatcacccaggtgctgcacttcaccaaggatgtgaaggccgccgccaaccagatgaggaacttcctggtgcgggccagctgccgcctgcggctggagcccgggaaggagtacctgatcatgggcctggatggagccacctatgacctggagggccacccccagtacctgctggacagcaacagctggattgaggagatgcccagcgagcggctgtgccgcagcacccggcagagagctgcctgtgcccagctgaatgacttcctgcaggagtatggcacccagggctgccaggtgtag

SEQ ID NO: 148278 - DNA, 807 bp, synthetic construct
  misc_feature 1..807: note = Description of Artificial Sequence: Synthetic coding sequence
  source 1..807: mol_type = other DNA
atgtgcccagaggacagcctgcaggtgcccctgaaggatgccaagagctgtggcctgcaccagctgctgcggggccctgaggtgcagctggtggcccacagcccctggctgaaggacagcctgagcaggaccaccaacatccagggcatcaacctgctcttcagcagcagaagaggccacctgttcctgcagacagaccagcccatctacaaccctggccagagggtgcgctacagagtgtttgccctggaccagaagatgaggcccagcacagacaccatcaccgtgatggtggagaacagccacggcctgcgggtgaggaagaaggaggtgtacatgcccagcagcatcttccaggatgactttgtgatcccagacatcagcgagcccggcacctggaagatcagcgcccgcttcagtgatggcctggagagcaacagcagcacccagtttgaggtgaagaagtatgtgctgcccaactttgaggtgaagatcaccccaggcaagccctacatcctgactgtgcccggccacctggatgagatgcagctggacatccaggcccgctacatctacggcaagcctgtgcagggcgtggcctacgtgcgcttcggcctgctggatgaagatggcaagaagaccttcttccggggcctggagagccagaccaagctggtgaatggccagagccacatcagcctgagcaaggccgagttccaggatgccctggagaagctgaacatgggcatcacagacctgcagggcctgcggctgtatgtggccgccgccatcatcgagagcccctag

SEQ ID NO: 148279 - DNA, 5097 bp, synthetic construct
  misc_feature 1..5097: note = Description of Artificial Sequence: Synthetic coding sequence
  source 1..5097: mol_type = other DNA
atgaggctgctgtggggcctcatctgggccagcagcttcttcaccctgagcctgcagaagccccggctgctgctcttcagccccagcgtggtgcacctgggcgtgcccctgtctgtgggcgtgcagctgcaggatgtgccccggggccaggtggtgaagggctctgtgttcctgaggaaccccagcagaaataatgtgccctgcagccccaaggtggacttcaccctgagcagcgagcgggactttgccctgctgagcctgcaggtgcccctgaaggatgccaagagctgtggcctgcaccagctgctgcggggccctgaggtgcagctggtggcccacagcccctggctgaaggacagcctgagcaggaccaccaacatccagggcatcaacctgctcttcagcagcagaagaggccacctgttcctgcagacagaccagcccatctacaaccctggccagagggtgcgctacagagtgtttgccctggaccagaagatgaggcccagcacagacaccatcaccgtgatggtggagaacagccacggcctgcgggtgaggaagaaggaggtgtacatgcccagcagcatcttccaggatgactttgtgatcccagacatcagcgagcccggcacctggaagatcagcgcccgcttcagtgatggcctggagagcaacagcagcacccagtttgaggtgaagaagtatgtgctgcccaactttgaggtgaagatcaccccaggcaagccctacatcctgactgtgcccggccacctggatgagatgcagctggacatccaggcccgctacatctacggcaagcctgtgcagggcgtggcctacgtgcgcttcggcctgctggatgaagatggcaagaagaccttcttccggggcctggagagccagaccaagctggtgaatggccagagccacatcagcctgagcaaggccgagttccaggatgccctggagaagctgaacatgggcatcacagacctgcagggcctgcggctgtatgtggccgccgccatcatcgagagccctggaggagagatggaggaggccgagctgacctcctggtactttgtgagcagccccttcagcctggacctgagcaagaccaagaggcacctggtgcctggggcccccttcctgctgcaggccctggtgcgggagatgagcggcagccctgccagcggcatccctgtgaaggtgtctgccaccgtgagcagccctggctctgtgcctgaggtgcaggacatccagcagaacacagatggcagcggccaggtgtccatccccatcatcatcccccagaccatcagcgagctgcagctgtctgtgtctgctggcagcccccacccagccatcgcccggctgactgtggccgcccctccttctgggggccctggcttcctgagcattgaaagaccagacagccggcccccccgggtgggggacaccctgaacctgaacctgcgggctgtgggcagcggggccaccttcagccactactactacatgatcctgagccggggccagatcgtgttcatgaaccgggagcccaagaggaccctgacctctgtgtctgtgtttgtggaccaccacctggcccccagcttctactttgtggccttctactaccatggagaccaccctgtggccaacagcctgcgggtggatgtgcaggccggggcctgtgagggcaagctggagctgtctgtggatggagccaagcagtacagaaatggagagagcgtgaagctgcacctggagacagacagcctggccctggtggccctgggcgccctggacacagccctgtatgctgctggcagcaagagccacaagcccctgaacatgggcaaggtgtttgaggccatgaacagctatgacctgggctgcggccctgggggcggggacagcgccctgcaggtgttccaggccgccggcctggccttcagtgatggagaccagtggaccctgagcaggaagaggctgagctgccccaaggagaagaccaccaggaagaagagaaatgtgaacttccagaaggccatcaatgagaagctgggccagtatgccagccccacagccaagcgctgctgccaggatggagtgacccggctgcccatgatgaggagctgtgagcagagagctgcccgggtgcagcagcctgactgccgggagcccttcctgagctgctgccagtttgctgagagcctgaggaagaagagccgggacaagggccaggccggcctgcagagggccctggagatcctgcaggaggaggacctgattgatgaagatgacatccctgtgcgctccttcttccctgagaactggctgtggagggtggagaccgtggaccgcttccagatcctgaccctgtggctgcctgacagcctgaccacctgggagatccacggcctgagcctgagcaagaccaagggcctgtgtgtggccacccctgtgcagctgcgggtcttccgggagttccacctgcacctgcggctgcccatgtctgtgagaagatttgagcagctggagctgcggcctgtgctgtacaactacctggacaagaacctgactgtgtctgtgcacgtgtcccctgtggagggcctgtgcctggccggcggcggcggcctggcccagcaggtgctggtgcctgctggcagcgcccggcctgtggccttctctgtggtgcccacagctgctgctgctgtgtccctgaaggtggtggcccggggcagctttgagttccctgtgggagatgctgtgtccaaggtgctgcagatcgagaaggagggcgccatccaccgggaggagctggtgtatgagctgaaccccctggaccaccggggccgcaccctggagatccctggcaacagcgaccccaacatgatcccagatggagacttcaacagctatgtgcgggtgacagccagtgaccccctggacaccctgggcagcgagggcgccctgagccctggaggagtggccagcctgctgcggctgccccggggctgtggggagcagaccatgatctacctggcccccaccctggccgccagccgctacctggacaagacagagcagtggagcaccctgcccccagagaccaaggaccatgctgtggacctgatccagaagggctacatgaggatccagcagttcaggaaggcagatggcagctatgctgcctggctgagccggggcagcagcacctggctgacagcctttgtgctgaaggtgctgagcctggcccaggagcaggtgggcggcagccctgagaagctgcaggagaccagcaactggctgctgagccagcagcaggctgatggcagcttccaggacctgagccctgtgatccaccgctccatgcagggcggcctggtgggcaatgatgagaccgtggccctgacagcctttgtgaccatcgccctgcaccacggcctggccgtgttccaggatgagggcgctgagcccctgaagcagagggtggaggccagcatcagcaaggccaacagcttcctgggggagaaggccagcgctggcctgctgggcgcccacgccgccgccatcacagcctatgccctgaccctgaccaaggccccagctgacctgcggggcgtggcccacaacaacctgatggccatggcccaggagaccggggacaacctgtactggggctctgtgacaggcagccagagcaatgctgtgagccccaccccagcccccaggaaccccagcgaccccatgccccaggccccagccctgtggattgagaccacagcctatgccctgctgcacctgctgctgcacgagggcaaggccgagatggctgaccaggccgccgcctggctgacccggcagggcagcttccagggcggcttccgcagcacccaggacacagtgattgccctggatgccctgagcgcctactggatcgccagccacaccacagaggagcggggcctgaatgtgaccctgagcagcactggaagaaatggcttcaagagccacgccctgcagctgaacaaccggcagatccggggcctggaggaggagctgcagttcagcctgggcagcaagatcaacgtgaaggtgggcggcaacagcaagggcaccctgaaggtgctgcggacctacaacgtgctggacatgaagaacaccacctgccaggacctgcagatcgaggtgacagtgaagggccacgtggagtacaccatggaggccaatgaagattatgaggactatgaatatgatgagctgcctgccaaggatgatcctgatgcccccctgcagcctgtgacccccctgcagctgtttgagggcagaagaaacagaagaagaagagaggcccccaagctgaccagcctgagtgacagatatgtgagccactttgaaacagagggcccccacgtgctgctgtactttgacagcgtgcccaccagccgggagtgtgtgggctttgaggccgtgcaggaggtgcctgtgggcctggtgcagcctgccagcgccaccctgtatgactactacaaccctgagcggcgctgcagcgtcttctacggggcccccagcaagagccggctgctggccaccctgtgcagcgctgaggtgtgccagtgtgccgagggcaagtgcccccggcagaggcgggccctggagcggggcctgcaggatgaagatggctacaggatgaagtttgcctgctactacccccgggtggagtatggcttccaggtgaaggtgctgcgggaggacagccgggccgccttccggctgtttgagaccaagatcacccaggtgctgcacttcaccaaggatgtgaaggccgccgccaaccagatgaggaacttcctggtgcgggccagctgccgcctgcggctggagcccgggaaggagtacctgatcatgggcctggatggagccacctatgacctggagggccacccccagtacctgctggacagcaacagctggattgaggagatgcccagcgagcggctgtgccgcagcacccggcagagagctgcctgtgcccagctgaatgacttcctgcaggagtatggcacccagggctgccaggtgtag

SEQ ID NO: 148280 - DNA, 813 bp, synthetic construct; identical to SEQ ID NO: 148267
  misc_feature 1..813: note = Description of Artificial Sequence: Synthetic coding sequence
  source 1..813: mol_type = other DNA

SEQ ID NO: 148281 - DNA, 5097 bp, synthetic construct; identical to SEQ ID NO: 148275
  misc_feature 1..5097: note = Description of Artificial Sequence: Synthetic coding sequence
  source 1..5097: mol_type = other DNA

SEQ ID NO: 148282 - DNA, 1536 bp, synthetic construct; identical to SEQ ID NO: 148269
  misc_feature 1..1536: note = Description of Artificial Sequence: Synthetic coding sequence
  source 1..1536: mol_type = other DNA

SEQ ID NO: 148283 - DNA, 1953 bp, synthetic construct
  misc_feature 1..1953: note = Description of Artificial Sequence: Synthetic coding sequence
  source 1..1953: mol_type = other DNA
atgggcagccagtgccggggctggcacatgtgtgccctgggcagccagcagcaggctgatggcagcttccaggacctgagccctgtgatccaccgctccatgcagggcggcctggtgggcaatgatgagaccgtggccctgacagcctttgtgaccatcgccctgcaccacggcctggccgtgttccaggatgagggcgctgagcccctgaagcagagggtggaggccagcatcagcaaggccagcagcttcctgggggagaaggccagcgctggcctgctgggcgcccacgccgccgccatcacagcctatgccctgaccctgaccaaggccccagctgacctgcggggcgtggcccacaacaacctgatggccatggcccaggagaccggggacaacctgtactggggctctgtgacaggcagccagagcaatgctgtgagccccaccccagcccccaggaaccccagcgaccccatgccccaggccccagccctgtggattgagaccacagcctatgccctgctgcacctgctgctgcacgagggcaaggccgagatggctgaccaggccgccgcctggctgacccggcagggcagcttccagggcggcttccgcagcacccaggacacagtgattgccctggatgccctgagcgcctactggatcgccagccacaccacagaggagcggggcctgaatgtgaccctgagcagcactggaagaaatggcttcaagagccacgccctgcagctgaacaaccggcagatccggggcctggaggaggagctgcagttcagcctgggcagcaagatcaacgtgaaggtgggcggcaacagcaagggcaccctgaaggtgctgcggacctacaacgtgctggacatgaagaacaccacctgccaggacctgcagatcgaggtgacagtgaagggccacgtggagtacaccatggaggccaatgaagattatgaggactatgaatatgatgagctgcctgccaaggatgatcctgatgcccccctgcagcctgtgacccccctgcagctgtttgagggcagaagaaacagaagaagaagagaggcccccaaggtggtggaggagcaggagagccgggtgcactacacagtgtgcatctggagaaatggcaaggtgggcctgagcggcatggccatcgcagatgtgaccctgctgagcggcttccacgccctgcgggctgacctggagaagctgaccagcctgagtgacagatatgtgagccactttgaaacagagggcccccacgtgctgctgtactttgacagcgtgcccaccagccgggagtgtgtgggctttgaggccgtgcaggaggtgcctgtgggcctggtgcagcctgccagcgccaccctgtatgactactacaaccctgagcggcgctgcagcgtcttctacggggcccccagcaagagccggctgctggccaccctgtgcagcgctgaggtgtgccagtgtgccgagggcaagtgcccccggcagaggcgggccctggagcggggcctgcaggatgaagatggctacaggatgaagtttgcctgctactacccccgggtggagtatggcttccaggtgaaggtgctgcgggaggacagccgggccgccttccggctgtttgagaccaagatcacccaggtgctgcacttcaccaaggatgtgaaggccgccgccaaccagatgaggaacttcctggtgcgggccagctgccgcctgcggctggagcccgggaaggagtacctgatcatgggcctggatggagccacctatgacctggagggccacccccagtacctgctggacagcaacagctggattgaggagatgcccagcgagcggctgtgccgcagcacccggcagagagctgcctgtgcccagctgaatgacttcctgcaggagtatggcacccagggctgccaggtgtag

SEQ ID NO: 148284 - DNA, 291 bp, synthetic construct
  misc_feature 1..291: note = Description of Artificial Sequence: Synthetic coding sequence
  source 1..291: mol_type = other DNA
atgcctggccccaccccatctggcaccaacgtgggcagcagcggccgcagccccagcaaggctgtggccgcccgggctgctggcagcacagtgcggcagaggaagaatgccagctgtggcaccaggtctgctggccgcaccaccagcgctggcaccggcggcatgtggaggttctacacagaggacagccctggcctgaaggtgggccctgtgcctgtgctggtgatgagcctgctcttcatcgcctctgtgttcatgctgcacatctggggcaagtacaccaggagctag

SEQ ID NO: 148285 - DNA, 3318 bp, synthetic construct
  misc_feature 1..3318: note = Description of Artificial Sequence: Synthetic coding sequence
  source 1..3318: mol_type = other DNA
ggccgggccggggaggtgcgggccctgagcagcggggcccagaggcggggcagccactttgtggtgctgtgccgcctgccccggggccgggcccgggtggtgggcgccagcctgagccacgcccccctgcccctgcgctactgctggaagggccggggcggcgtgtcccggctcttctgcagccagagggccaggatgcctggcagcctgggccgggaggccagcggccgggccggccccaccggctgtggggcctttgccttcggcctgcgctgccgctacgtgatcagcgcccccaagatcttccgggtgggcgccagcgagaacatcgtcatccaggtgtatggctacacagaggcctttgatgccaccatcagcatcaagagctacccagacaagaagttctcctacagcagcggccacgtgcacctgagcagcgagaacaagttccagaacagcgccatcctgaccatccagcccaagcagctgcccggcggccagaaccctgtgtcctatgtgtacctggaggtggtgtccaagcacttcagcaagagcaagaggatgcccatcacctatgacaatggcttcctgttcatccacacagacaagcctgtgtacaccccagaccagagcgtgaaggtgcgggtgtacagcctgaatgatgacctgaagccagccaagcgggagaccgtgctgaccttcattgatcctgagggcagcgaggtggacatggtggaggagattgaccacatcggcatcatctccttcccagacttcaagatccccagcaaccccaggtatggcatgtggaccatcaaggccaagtacaaggaggacttcagcaccactggaacagcctactttgaggtgaaggagtatgtgctgccccacttctctgtgtccattgagcctgagtacaacttcatcggctacaagaacttcaagaactttgagatcaccatcaaggcccgctacttctacaacaaggtggtgacagaagcagatgtgtacatcaccttcggcatccgggaggacctgaaggatgaccagaaggagatgatgcagacagccatgcagaacaccatgctgatcaatggaattgcccaggtgacctttgacagcgagacagctgtgaaggagctgagctactacagcctggaggacctgaacaacaagtacctgtacatcgctgtgacagtgattgagagcactggaggcttcagcgaggaggccgagatccctggcatcaagtatgtgctgagcccctacaagctgaacctggtggccacccccctcttcctgaagccaggcatcccctaccccatcaaggtgcaggtgaaggacagcctggaccagctggtgggcggcgtgcctgtgaccctgaatgcccagaccattgatgtgaaccaggagaccagtgacctggaccccagcaagtctgtgaccagggtggatgatggagtggccagctttgtgctgaacctgcccagcggcgtgacagtgctggagttcaacgtgaagacagatgccccagacctgcctgaggagaaccaggcccgggagggctaccgggccatcgcctacagcagcctgagccagagctacctgtacatcgactggacagacaaccacaaggccctgctggtgggggagcacctgaacatcatcgtgacccccaagagcccctacatcgacaagatcacccactacaactacctgatcctgagcaagggcaagatcatccacttcggcacccgggagaagttcagtgatgccagctaccagagcatcaacatccctgtgacccagaacatggtgcccagcagccggctgctggtgtactacatcgtgactggagagcagacagctgagctggtgtctgattctgtgtggctgaacatcgaggagaagtgtggcaaccagctgcaggtgcacctgagcccagatgctgatgcctacagccctggccagacagtgtccctgaacatggccaccggcatggacagctgggtggccctggccgctgtggacagcgctgtgtatggagtgcagagaggagccaagaagcccctggagagggtcttccagttcctggagaagagtgacctgggctgtggggccggcggcggcctgaacaatgccaacgtgttccacctggccggcctgaccttcctgaccaatgccaatgctgatgacagccaggagaatgatgagccctgcaaggagatcctgcggcccaggaggaccctgcagaagaagattgaggagattgctgccaagtacaagcacagcgtggtgaagaagtgctgctatgatggagcctgtgtgaacaatgatgagacctgtgagcagagagctgcccgcatcagcctgggcccccgctgcatcaaggccttcacagagtgctgcgtggtggccagccagctgcgggccaacatcagccacaaggacatgcagctgggccgcctgcacatgaagaccctgctgcctgtgtccaagccagagatccgcagctacttccctgagagctggctgtgggaggtgcacctggtgcccaggaggaagcagctgcagtttgccctgcctgacagcctgaccacctgggagatccagggcgtgggcatcagcaacacaggcatctgtgtggccgacacagtgaaggccaaggtgttcaaggatgtgttcctggagatgaacatcccctacagcgtggtgcggggggagcagatccagctgaagggcaccgtgtacaactaccgcaccagcggcatgcagttctgtgtgaagatgtctgctgtggagggcatctgcaccagcgagagccctgtgattgaccaccagggcaccaagagcagcaaatgtgtgcggcagaaggtggagggcagcagcagccacctggtgaccttcaccgtgctgcccctggagatcggcctgcacaacatcaacttcagcctggagacctggtttgggaaggagatcctggtgaagaccctgcgggtggtgcctgagggcgtgaagcgggagagctacagcggcgtgaccctggacccccggggcatctacggcaccatcagcaggaggaaggagttcccctaccgcatccccctggacctggtgcccaagacagagatcaagaggatcctgtctgtgaagggcctgctggtgggggagatcctgtctgctgtgctgagccaggagggcatcaacatcctgacccacctgcccaagggcagcgctgaggccgagctgatgtctgtggtgcctgtgttctacgtgtttcctggcaacaggaagagcctggagcacttctccttctag

SEQ ID NO: 148286 - DNA, 2805 bp, synthetic construct
  misc_feature 1..2805: note = Description of Artificial Sequence: Synthetic coding sequence
  source 1..2805: mol_type = other DNA
atggccaggagatctgtgctgtacttcatcctgctgaatgccctgatcaacaagggccaggcctgcttctgtgaccactacgcctggacccagtggaccagctgcagcaagacctgcaacagcggcacccagagccgccaccggcagatcgtggtggacaagtactaccaggagaacttctgtgagcagatctgcagcaagcaggagacccgggagtgcaactggcagcgctgccccatcaactgcctgctgggggactttggcccctggagcgactgtgacccctgcatcgagaagcagagcaaggtgcgctctgtgctgcggcccagccagtttggaggccagccctgcacagcccccctggtggccttccagccctgcatccccagcaagctgtgcaagattgaggaggccgactgcaagaacaagttccgctgtgacagcggccgctgcatcgccaggaagctggagtgcaatggagaaaatgactgtggggacaacagtgatgagcgggactgtggccgcaccaaggctgtgtgcaccaggaagtacaaccccatccccagcgtgcagctgatgggaaatggcttccacttcctggccggggagcccagaggagaggtgctggacaacagcttcaccggcggcatctgcaagacagtgaagagcagcaggaccagcaacccctacagagtgcctgccaacctggagaatgtgggctttgaggtgcagacagcagaagatgacctgaagacagacttctacaaggacctgaccagcctgggccacaatgaaaaccagcagggcagcttcagcagccagggcggcagcagcttctctgtgcccatcttctacagcagcaagagaagtgagaacatcaaccacaacagcgccttcaagcaggccatccaggccagccacaagaaggacagcagcttcatccgcatccacaaggtgatgaaggtgctgaacttcaccaccaaggccaaggacctgcacctgagtgatgtgttcctgaaggccctgaaccacctgcccctggagtacaacagcgccctgtacagccgcatctttgatgactttggcacccactacttcaccagcggcagcctgggcggcgtgtatgacctgctgtaccagttcagcagcgaggagctgaagaacagcggcctgacagaggaggaggccaagcactgtgtgcgcatcgagaccaagaagagggtgctgtttgccaagaagaccaaggtggagcaccgctgcaccaccaacaagctgtctgagaagcatgagggcagcttcatccagggcgctgagaagagcatcagcctcatccggggcggccgctcagaatatggagctgccctggcctgggagaagggcagcagcggcctggaggagaagaccttcagcgagtggctggagagcgtgaaggagaacccagctgtgattgactttgagctggcccccatcgtggacctggtgaggaacatcccctgtgctgtgaccaagaggaacaacctgaggaaggccctgcaggagtatgctgccaagtttgacccctgccagtgtgccccctgccccaacaacggccggcccaccctgtctggaacagagtgcctgtgtgtgtgccagagcggcacctacggggagaactgtgagaagcagagcccagactacaagagcaatgctgtggatggccagtggggctgctggagctcctggagcacctgtgatgccacctacaagaggagcaggacccgggagtgcaacaacccagccccccagagaggaggcaagagatgtgagggggagaagaggcaggaggaggactgcaccttcagcatcatggagaacaacggccagccctgcatcaatgatgatgaggagatgaaggaggtggacctgcctgagattgaggccgacagcggctgcccccagcctgtgcccccagaaaatggcttcatcagaaatgagaagcagctgtacctggtgggggaggatgtggagatcagctgcctgaccggctttgagaccgtgggctaccagtacttccgctgcctgcctgatggcacctggaggcagggagatgtggagtgccagaggacagagtgcatcaagcctgtggtgcaggaggtgctgaccatcacccccttccagaggctgtaccgcatcggggagagcattgagctgacctgccccaagggctttgtggtggccggccccagccgctacacctgccagggcaacagctggaccccacccatcagcaacagcctgacctgtgagaaggacaccctgaccaagctgaagggccactgccagctgggccagaagcagagcggcagcgagtgcatctgcatgagccctgaggaggactgcagccaccacagcgaggacctgtgtgtgtttgacacagacagcaatgactacttcaccagccctgcctgcaagttcctggccgagaagtgcctgaacaaccagcagctgcacttcctgcacatcggcagctgccaggacggccggcagctggagtggggcctggagaggacccggctgagcagcaacagcaccaagaaggagagctgtggctatgacacctgctatgactgggagaagtgcagcgccagcaccagcaaatgtgtgtgcctgctgcccccccagtgcttcaagggcggcaaccagctgtactgtgtgaagatgggcagcagcaccagcgagaagaccctgaacatctgtgaggtgggcaccatccgctgtgccaacaggaagatggagatcctgcaccctgggaagtgcctggcctag

SEQ ID NO: 148287 - DNA, 2805 bp, synthetic construct; identical to SEQ ID NO: 148286
  misc_feature 1..2805: note = Description of Artificial Sequence: Synthetic coding sequence
  source 1..2805: mol_type = other DNA

SEQ ID NO: 148288 - DNA, 2532 bp, synthetic construct
  misc_feature 1..2532: note = Description of Artificial Sequence: Synthetic coding sequence
  source 1..2532: mol_type = other DNA
atgaaggtgatcagcctcttcatcctggtgggcttcatcggggagttccagagcttcagcagcgccagcagccctgtgaactgccagtgggacttctacgccccctggagcgagtgcaatggctgcaccaagacccagaccaggagaagatctgtggccgtgtatggccagtatggaggccagccctgtgtgggcaatgcctttgagacccagagctgtgagcccacccggggctgccccacagaggagggctgtggggagcgcttccgctgcttcagcggccagtgcatcagcaagagcctggtgtgcaatggagacagcgactgtgatgaagattctgcagatgaggacagatgtgaggacagcgagcggcggcccagctgtgacatcgacaagcccccacccaacatcgagctgactggaaatggctacaatgagctgaccggccagttcaggaacagagtcatcaacaccaagagctttggaggccagtgcaggaaggtgttttctggagatggcaaggacttctaccgcctgtctggaaatgtgctgagctacaccttccaggtgaagatcaacaatgacttcaactatgagttctacaacagcacctggagctatgtgaagcacaccagcacagagcacaccagcagcagcaggaagaggagcttcttccgcagcagcagcagcagcagccgcagctacaccagccacaccaatgagatccacaagggcaagagctaccagctgctggtggtggagaacacagtggaggtggcccagttcatcaacaacaaccctgagttcctgcagctggccgagcccttctggaaggagctgagccacctgcccagcctgtatgactacagcgcctacagaaggctgattgaccagtatggcacccactacctgcagagcggcagcctgggcggggagtacagagtgctcttctacgtggacagcgagaagctgaagcagaatgacttcaacagcgtggaggagaagaagtgcaagagcagcggctggcactttgtggtgaagttcagcagccacggctgcaaggagctggagaatgccctgaaggccgccagcggcacccagaacaacgtgctgcggggggagcccttcatccggggcggcggggccggcttcatcagcggcctgagctacctggagctggacaacccagctggcaacaagaggcgctacagcgcctgggccgagagcgtgaccaacctgccccaggtgatcaagcagaagctgacccccctgtatgagctggtgaaggaggtgccctgtgcctctgtgaagaagctgtacctgaagtgggccctggaggagtacctggatgaatttgacccctgccactgccggccctgccagaatggaggcctggccaccgtggagggcacccactgcctgtgccactgcaagccctacaccttcggggccgcctgtgagcagggcgtgctggtgggcaaccaggccggcggcgtggatggcggctggagctgctggagctcctggagcccctgtgtgcagggcaagaagaccaggagccgggagtgcaacaaccccccaccttctgggggcggccgcagctgtgtgggggagaccacagagagcacccagtgtgaagatgaggagctggagcacctgcggctgctggagccccactgcttccccctgagcctggtgcccacagagttctgccccagccccccagccctgaaggatggctttgtgcaggatgagggcaccatgtttcctgtgggcaagaatgtggtgtacacctgcaatgaaggctacagcctcatcggcaaccctgtggcccgctgtggggaggacctgcgctggctggtgggggagatgcactgccagaagatcgcctgtgtgctgcctgtgctgatggatggcatccagagccacccccagaagcccttctacacagtgggggagaaggtgacagtgtcctgcagcggcggcatgagcctggagggccccagcgccttcctgtgtggcagcagcctgaagtggagccctgagatgaagaatgcccgctgtgtgcagaaggagaaccccctgacccaggccgtgcccaagtgccagcgctgggagaagctgcagaacagccgctgtgtgtgcaagatgccctatgaatgtggccccagcctggatgtgtgtgcccaggatgagaggagcaagaggatcctgcccctgactgtgtgcaagatgcacgtgctgcactgccagggcaggaactacaccctgaccggccgggacagctgcaccctgcctgccagcgctgagaaggcctgtggggcctgccccctgtggggcaaatgtgatgctgagagcagcaaatgtgtgtgccgggaggcctctgaatgtgaggaggagggcttcagcatctgtgtggaggtgaatggcaaggagcagaccatgtctgaatgtgaggccggggccctgcgctgccggggccagagcatctctgtgaccagcatccggccctgtgccgctgagacccagtag

SEQ ID NO: 148289 - DNA, 1461 bp, synthetic construct
  misc_feature 1..1461: note = Description of Artificial Sequence: Synthetic coding sequence
  source 1..1461: mol_type = other DNA
atgaaggtgatcagcctcttcatcctggtgggcttcatcggggagttccagagcttcagcagcgccagcagccctgtgaactgccagtgggacttctacgccccctggagcgagtgcaatggctgcaccaagacccagaccaggagaagatctgtggccgtgtatggccagtatggaggccagccctgtgtgggcaatgcctttgagacccagagctgtgagcccacccggggctgccccacagaggagggctgtggggagcgcttccgctgcttcagcggccagtgcatcagcaagagcctggtgtgcaatggagacagcgactgtgatgaagattctgcagatgaggacagatgtgaggacagcgagcggcggcccagctgtgacatcgacaagcccccacccaacatcgagctgactggaaatggctacaatgagctgaccggccagttcaggaacagagtgctcttctacgtggacagcgagaagctgaagcagaatgacttcaacagcgtggaggagaagaagtgcaagagcagcggctggcactttgtggtgaagttcagcagccacggctgcaaggagctggagaatgccctgaaggccgccagcggcacccagaacaacgtgctgcggggggagcccttcatccggggcggcggggccggcttcatcagcggcctgagctacctggagctggacaacccagctggcaacaagaggcgctacagcgcctgggccgagagcgtgaccaacctgccccaggtgatcaagcagaagctgacccccctgtatgagctggtgaaggaggtgccctgtgcctctgtgaagaagctgtacctgaagtgggccctggaggagtacctggatgaatttgacccctgccactgccggccctgccagaatggaggcctggccaccgtggagggcacccactgcctgtgccactgcaagccctacaccttcggggccgcctgtgagcagggcgtgctggtgggcaaccaggccggcggcgtggatggcggctggagctgctggagctcctggagcccctgtgtgcagggcaagaagaccaggagccgggagtgcaacaaccccccaccttctgggggcggccgcagctgtgtgggggagaccacagagagcacccagtgtgaagatgaggagctggagcacctgcggctgctggagccccactgcttccccctgagcctggtgcccacagagttctgccccagccccccagccctgaaggatggctttgtgcaggatgagggcaccatgtttcctgtgggcaagaatgtggtgtacacctgcaatgaaggctacagcctcatcggcaaccctgtggcccgctgtggggaggacctgcgctggctggtgggggagatgcactgccagaatggcaagatcagcaactggatgaaggtgaatgagaccctgctggtggagcaccactag

SEQ ID NO: 148290 - DNA, 1032 bp, synthetic construct
  misc_feature 1..1032: note = Description of Artificial Sequence: Synthetic coding sequence
  source 1..1032: mol_type = other DNA
atgaaggtgatcagcctcttcatcctggtgggcttcatcggggagttccagagcttcagcagcgccagcagccctgtgaactgccagtgggacttctacgccccctggagcgagtgcaatggctgcaccaagacccagaccaggagaagatctgtggccgtgtatggccagtatggaggccagccctgtgtgggcaatgcctttgagacccagagctgtgagcccacccggggctgccccacagaggagggctgtggggagcgcttccgctgcttcagcggccagtgcatcagcaagagcctggtgtgcaatggagacagcgactgtgatgaagattctgcagatgaggacagatgtgaggacagcgagcggcggcccagctgtgacatcgacaagcccccacccaacatcgagctgactggaaatggctacaatgagctgaccggccagttcaggaacagagtcatcaacaccaagagctttggaggccagtgcaggaaggtgttttctggagatggcaaggacttctaccgcctgtctggaaatgtgctgagctacaccttccaggtgaagatcaacaatgacttcaactatgagttctacaacagcacctggagctatgtgaagcacaccagcacagagcacaccagcagcagcaggaagaggagcttcttccgcagcagcagcagcagcagccgcagctacaccagccacaccaatgagatccacaagggcaagagctaccagctgctggtggtggagaacacagtggaggtggcccagttcatcaacaacaaccctgagttcctgcagctggccgagcccttctggaaggagctgagccacctgcccagcctgtatgactacagcgcctacagaaggctgattgaccagtatggcacccactacctgcagagcggcagcctgggcggggagtacagagtgctcttctacgtggacagcgagaagctgaagcagaatgacttcaacagcgtggagaagaagaagaagaagaagaagaagaagaagtag

SEQ ID NO: 148291 - DNA, 1755 bp, synthetic construct
  misc_feature 1..1755: note = Description of Artificial Sequence: Synthetic coding sequence
  source 1..1755: mol_type = other DNA
atgtttgctgtggtgttcttcatcctgagcctgatgacctgccagcccggggtgacagcccaggagaaggtgaaccagagggtgagaagagctgccaccccagctgctgtgacctgccagctgagcaactggagcgagtggacagactgcttcccctgccaggacaagaagtaccgccacaggagcctgctgcagcccaacaagtttggaggcaccatctgcagcggggacatctgggaccaggccagctgcagcagcagcaccacctgtgtgcggcaggcccagtgtggccaggacttccagtgcaaggagaccggccgctgcctgaagaggcacctggtgtgcaatggagaccaggactgcctggatggcagtgatgaagatgactgtgaagatgtgcgggccattgatgaggactgcagccagtatgagcccatccctggcagccagaaggccgccctgggctacaacatcctgacccaggaggatgcccagagcgtgtatgatgccagctactatggaggccagtgtgaaacagtgtacaacggggagtggagggagctgcgctatgacagcacctgtgagcggctgtactatggagatgatgagaagtacttcaggaagccctacaacttcctgaagtaccactttgaggccctggccgacaccggcatcagcagcgagttctatgacaatgccaatgacctgctgagcaaggtgaagaaggacaagagtgacagctttggagtgaccatcggcatcggccctgctggcagccccctgctggtgggcgtgggcgtgagccacagccaggacaccagcttcctgaatgagctgaacaagtacaatgagaagaagttcatcttcacccgcatcttcaccaaggtgcagacagcccacttcaagatgaggaaggatgacatcatgctggatgagggcatgctgcagagcctgatggagctgcctgaccagtacaactacggcatgtatgccaagttcatcaatgactatggcacccactacatcaccagcggctccatgggcggcatctatgagtacatcctggtgattgacaaggccaagatggagagcctgggcatcaccagccgggacatcaccacctgcttcggcggcagcctgggcatccagtatgaggacaagatcaacgtgggcggcggcctgagcggggaccactgcaagaagtttggaggcggcaagacagagcgggccaggaaggccatggctgtggaggacatcatcagccgggtgcggggcggcagcagcggctggagcggcggcctggcccagaacagaagcaccatcacctaccgctcctggggccgcagcctgaagtacaaccctgtggtgattgactttgagatgcagcccatccacgaggtgctgcggcacaccagcctgggccccctggaggccaagaggcagaacctgcggcgggccctggaccagtacctgatggagttcaatgcctgccgctgtggcccctgcttcaacaatggagtgcccatcctggagggcaccagctgccgctgccagtgccgcctgggcagcctgggcgccgcctgtgagcagacccagacagaaggagccaaggcagatggctcctggagctgctggagctcctggagcgtgtgcagagctggcatccaggagaggagaagagaatgtgacaacccagccccccagaatggaggagccagctgccccggcaggaaggtgcagacccaggcctgctag

SEQ ID NO: 148292 - DNA, 1776 bp, synthetic construct
  misc_feature 1..1776: note = Description of Artificial Sequence: Synthetic coding sequence
  source 1..1776: mol_type = other DNA
atgaagaacagcaggacctgggcctggagggcccctgtggagctgttcctgctgtgtgccgccctgggctgcctgagcctgcccggcagcagaggagagcggccccacagctttggcagcaatgctgtgaacaagagctttgccaagagccggcagatgaggtctgtggatgtgaccctgatgcccatcgactgtgagctgagctcctggagctcctggaccacctgtgacccctgccagaagaagcgctaccgctatgcctacctgctgcagcccagccagttccacggggagccctgcaacttcagtgacaaggaggtggaggactgtgtgaccaaccggccctgtggcagccaggtgcgctgtgagggctttgtgtgtgcccagacaggccgctgtgtgaacagaaggctgctgtgcaatggagacaatgactgtggggaccagagtgatgaggccaactgccgccgcatctacaagaagtgccagcacgagatggaccagtactggggcatcggcagcctggccagcggcatcaacctcttcaccaacagctttgagggccctgtgctggaccaccgctactatgccggcggctgcagcccccactacatcctgaacacccgcttcaggaagccctacaacgtggagagctacaccccccagacccagggcaagtatgagttcatcctgaaggagtatgagagctacagcgactttgaaagaaatgtgacagagaagatggccagcaagagcggcttctcctttggcttcaagatccctggcatctttgagctgggcatcagcagccagagcgaccggggcaagcactacatccggaggaccaagcgcttcagccacaccaagagcgtcttcctgcacgcccggagtgacctggaggtggcccactacaagctgaagcccaggagcctgatgctgcactatgagttcctgcagagggtgaagaggctgcccctggagtacagctatggagagtacagagacctcttccgggactttggcacccactacatcacagaggccgtgctgggcggcatctatgagtacaccctggtgatgaacaaggaggccatggagcggggggactacaccctgaacaacgtgcacgcctgtgccaagaatgacttcaagattggaggagccatcgaggaggtgtatgtgtccctgggcgtgtctgtgggcaagtgccggggcatcctgaatgagatcaaggacaggaacaagagggacaccatggtggaggacctggtggtgctggtgcggggcggggccagcgagcacatcaccaccctggcctaccaggagctgcccacagctgacctgatgcaggagtggggagatgctgtgcagtacaacccagccatcatcaaggtgaaggtggagcccctgtatgagctggtgacagccacagactttgcctacagcagcacagtgcggcagaacatgaagcaggccctggaggagttccagaaggaggtgagcagctgccactgtgccccctgccagggcaatggagtgcctgtgctgaagggcagccgctgtgactgcatctgccctgtgggcagccagggcctggcctgtgaggtgtcctacaggaagaacacccccattgatggcaagtggaactgctggagcaactggagcagctgcagcggccgcaggaagacccggcagaggcagtgcaacaaccccccaccccagaatggaggcagcccctgcagcggccctgccagcgagaccctggactgcagctag

SEQ ID NO: 148293 - DNA, 1590 bp, synthetic construct
  misc_feature 1..1590: note = Description of Artificial Sequence: Synthetic coding sequence
  source 1..1590: mol_type = other DNA
atggacacctgcatgaccctggccttcaccctgagcggccgcttcttcatgctgctgagccagtaccgctatgcctacctgctgcagcccagccagttccacggggagccctgcaacttcagtgacaaggaggtggaggactgtgtgaccaaccggccctgtggcagccaggtgcgctgtgagggctttgtgtgtgcccagacaggccgctgtgtgaacagaaggctgctgtgcaatggagacaatgactgtggggaccagagtgatgaggccaactgccgccgcatctacaagaagtgccagcacgagatggaccagtactggggcatcggcagcctggccagcggcatcaacctcttcaccaacagctttgagggccctgtgctggaccaccgctactatgccggcggctgcagcccccactacatcctgaacacccgcttcaggaagccctacaacgtggagagctacaccccccagacccagggcaagtatgagttcatcctgaaggagtatgagagctacagcgactttgaaagaaatgtgacagagaagatggccagcaagagcggcttctcctttggcttcaagatccctggcatctttgagctgggcatcagcagccagagcgaccggggcaagcactacatccggaggaccaagcgcttcagccacaccaagagcgtcttcctgcacgcccggagtgacctggaggtggcccactacaagctgaagcccaggagcctgatgctgcactatgagttcctgcagagggtgaagaggctgcccctggagtacagctatggagagtacagagacctcttccgggactttggcacccactacatcacagaggccgtgctgggcggcatctatgagtacaccctggtgatgaacaaggaggccatggagcggggggactacaccctgaacaacgtgcacgcctgtgccaagaatgacttcaagattggaggagccatcgaggaggtgtatgtgtccctgggcgtgtctgtgggcaagtgccggggcatcctgaatgagatcaaggacaggaacaagagggacaccatggtggaggacctggtggtgctggtgcggggcggggccagcgagcacatcaccaccctggcctaccaggagctgcccacagctgacctgatgcaggagtggggagatgctgtgcagtacaacccagccatcatcaaggtgaaggtggagcccctgtatgagctggtgacagccacagactttgcctacagcagcacagtgcggcagaacatgaagcaggccctggaggagttccagaaggaggtgagcagctgccactgtgccccctgccagggcaatggagtgcctgtgctgaagggcagccgctgtgactgcatctgccctgtgggcagccagggcctggcctgtgaggtgtcctacaggaagaacacccccattgatggcaagtggaactgctggagcaactggagcagctgcagcggccgcaggaagacccggcagaggcagtgcaacaaccccccaccccagaatggaggcagcccctgcagcggccctgccagcgagaccctggactgcagctag

SEQ ID NO: 148294 - DNA, 1620 bp, synthetic construct
  misc_feature 1..1620: note = Description of Artificial Sequence: Synthetic coding sequence
  source 1..1620: mol_type = other DNA
atgaggtctgtggatgtgaccctgatgcccatcgactgtgagctgagctcctggagctcctggaccacctgtgacccctgccagaagaagcgctaccgctatgcctacctgctgcagcccagccagttccacggggagccctgcaacttcagtgacaaggaggtggaggactgtgtgaccaaccggccctgtggcagccaggtgcgctgtgagggctttgtgtgtgcccagacaggccgctgtgtgaacagaaggctgctgtgcaatggagacaatgactgtggggaccagagtgatgaggccaactgccgccgcatctacaagaagtgccagcacgagatggaccagtactggggcatcggcagcctggccagcggcatcaacctcttcaccaacagctttgagggccctgtgctggaccaccgctactatgccggcggctgcagcccccactacatcctgaacacccgcttcaggaagccctacaacgtggagagctacaccccccagacccagggcaagtatgagttcatcctgaaggagtatgagagctacagcgactttgaaagaaatgtgacagagaagatggccagcaagagcggcttctcctttggcttcaagatccctggcatctttgagctgggcatcagcagccagagcgaccggggcaagcactacatccggaggaccaagcgcttcagccacaccaagagcgtcttcctgcacgcccggagtgacctggaggtggcccactacaagctgaagcccaggagcctgatgctgcactatgagttcctgcagagggtgaagaggctgcccctggagtacagctatggagagtacagagacctcttccgggactttggcacccactacatcacagaggccgtgctgggcggcatctatgagtacaccctggtgatgaacaaggaggccatggagcggggggactacaccctgaacaacgtgcacgcctgtgccaagaatgacttcaagattggaggagccatcgaggaggtgtatgtgtccctgggcgtgtctgtgggcaagtgccggggcatcctgaatgagatcaaggacaggaacaagagggacaccatggtggaggacctggtggtgctggtgcggggcggggccagcgagcacatcaccaccctggcctaccaggagctgcccacagctgacctgatgcaggagtggggagatgctgtgcagtacaacccagccatcatcaaggtgaaggtggagcccctgtatgagctggtgacagccacagactttgcctacagcagcacagtgcggcagaacatgaagcaggccctggaggagttccagaaggaggtgagcagctgccactgtgccccctgccagggcaatggagtgcctgtgctgaagggcagccgctgtgactgcatctgccctgtgggcagccagggcctggcctgtgaggtgtcctacaggaagaacacccccattgatggcaagtggaactgctggagcaactggagcagctgcagcggccgcaggaagacccggcagaggcagtgcaacaaccccccaccccagaatggaggcagcccctgcagcggccctgccagcgagaccctggactgcagctag

SEQ ID NO: 148295 - DNA, 675 bp, synthetic construct
  misc_feature 1..675: note = Description of Artificial Sequence: Synthetic coding sequence
  source 1..675: mol_type = other DNA
atggccacccaccacaccctgtggatgggcctggccctgctgggcgtgctgggggacctgcaggccgcccctgaggcccaggtgtctgtgcagcccaacttccagcaggacaagttcctgggccgctggttctctgctggcctggccagcaacagctcctggctgcgggagaagaaggccgccctgtccatgtgcaagtctgtggtggccccagccacagatggcggcctgaacctgaccagcaccttcctgaggaagaaccagtgtgagaccaggaccatgctgctgcagcctgctggcagcctgggcagctacagctaccgcagcccccgggagtggggcctgcaccggcccccaggccccagcctgggcgccaccctggccggcaccaccctgggccagcccccagctgctgagatccatggagtgggggactggggcagcacctacagcgtgtctgtggtggagacagattatgaccagtatgccctgctgtacagccagggcagcaaaggacctggagaggacttcaggatggccaccctgtacagcaggacccagacccccagggctgagctgaaggagaagttcaccgccttctgcaaggcccagggcttcacagaggacaccatcgtgttcctgccccagacagacaagtgcatgacagagcagtag

SEQ ID NO: 148296 - DNA, 495 bp, synthetic construct
  misc_feature 1..495: note = Description of Artificial Sequence: Synthetic coding sequence
  source 1..495: mol_type = other DNA
atgctgcccccaggcacagccaccctgctgaccctgctgctggccgccggcagcctgggccagaagccccagaggcccaggaggcctgccagccccatcagcaccatccagcccaaggccaactttgatgcccagcagtttgctggcacctggctgctggtggccgtgggcagcgcctgccgcttcctgcaggagcagggccacagagctgaggccaccaccctgcacgtggccccccagggcacagccatggctgtgtccaccttcaggaagctggatggcatctgctggcaggtgcggcagctgtatggagacaccggggtgctgggccgcttcctgctgcaggccagagatgcccggggagctgtgcacgtggtggtggccgagacagactaccagagctttgctgtgctgtacctggagagagctggccagctgtctgtgaagctgtatggagcccagggcgtggtgacagacaggcctggggtgggctag

SEQ ID NO: 148297 - DNA, 1680 bp, synthetic construct
  misc_feature 1..1680: note = Description of Artificial Sequence: Synthetic coding sequence
  source 1..1680: mol_type = other DNA
atgtctgcctgccgcagctttgctgtggccatctgcatcctggagatcagcatcctgacagcccagtacaccaccagctatgaccctgagctgacagagagcagcggcagcgccagccacatcgactgcaggatgagcccctggagcgagtggagccagtgtgacccctgcctgcggcagatgttccgcagccgcagcattgaggtgtttggccagttcaacgggaagcgctgcacagatgctgtgggggaccggcggcagtgtgtgcccacagagccctgtgaagatgctgaagatgactgtggaaatgacttccagtgcagcacaggccgctgcatcaagatgaggctgcgctgcaatggagacaatgactgtggggacttcagtgatgaagatgactgtgagagcgagccccggcccccctgccgggacagagtggtggaggagagcgagctggccaggacagctggctacggcatcaacatcctgggcatggaccccctgagcaccccatttgacaatgagttctacaacggcctgtgcaacagagacagagatggcaacaccctgacctactaccgccggccctggaatgtggccagcctcatctatgagaccaagggggagaagaacttcagaacagagcactatgaggagcagatcgaggccttcaagagcatcatccaggagaagaccagcaacttcaatgctgccatcagcctgaagttcacccccacagagaccaacaaggccgagcagtgctgtgaggagacagccagcagcatcagcctgcacggcaagggcagcttccgcttctcctacagcaagaatgagacctaccagctgttcctgagctacagcagcaagaaggagaagatgttcctgcacgtgaagggggagatccacctgggccgctttgtgatgaggaacagagatgtggtgctgaccaccacctttgtggatgacatcaaggccctgcccaccacctatgagaagggggagtactttgccttcctggagacctacggcacccactacagcagcagcggcagcctgggcggcctgtatgagctgatctacgtgctggacaaggcctccatgaagaggaagggcgtggagctgaaggacatcaagcgctgcctgggctaccacctggatgtgtccctggccttcagcgagatctctgtgggcgctgagttcaacaaggatgactgtgtgaagagaggagagggccgggctgtgaacatcaccagcgagaacctgattgatgatgtggtgtccctcatccggggcggcaccaggaaatatgcctttgagctgaaggagaagctgctgcggggcaccgtgattgatgtgacagactttgtgaactgggccagcagcatcaatgatgcccctgtgctgatcagccagaagctgagccccatctacaacctggtgcctgtgaagatgaagaatgcccacctgaagaagcagaacctggagcgggccatcgaggactacatcaatgagttctctgtgaggaagtgccacacctgccagaatggaggcaccgtcatcctgatggatggcaagtgcctgtgtgcctgccccttcaagtttgagggcatcgcctgtgagatcagcaagcagaagatcagcgagggcctgcctgccctggagttccccaatgagaagtag

SEQ ID NO: 148298 - DNA, 1770 bp, synthetic construct
  misc_feature 1..1770: note = Description of Artificial Sequence: Synthetic coding sequence
  source 1..1770: mol_type = other DNA
atgggcagcaacctgagcccccagctgtgcctgatgcccttcatcctgggcctgctgagcggcggcgtgaccaccaccccctggagcctggcccagccccagggcagctgcagcctggagggcgtggagatcaagggcggcagcttccggctgctgcaggagggccaggccctggagtatgtgtgccccagcggcttctacccctaccctgtgcagaccaggacctgccgcagcacaggctcctggagcaccctgaagacccaggaccagaagacagtgaggaaggcagaatgtcgggccatccactgcccccggccccatgactttgaaaatggagagtactggcccaggagcccctactacaacgtgtctgatgagatctccttccactgctatgatggctacaccctgcggggcagcgccaacagaacctgccaggtgaatggccgctggagcggccagacagccatctgtgacaacggggccggctactgcagcaaccctggcatccccatcggcaccaggaaggtgggcagccagtaccgcctggaggacagcgtgacctaccactgcagccggggcctgaccctgcggggcagccagaggaggacctgccaggagggcggctcctggagcggcacagagcccagctgccaggacagcttcatgtatgacaccccccaggaggtggccgaggccttcctgagcagcctgacagagaccatcgagggcgtggatgctgaagatggccacggccctggagagcagcagaagaggaagatcgtgctggaccccagcggctccatgaacatctacctggtgctggatggcagtgacagcattggagccagcaacttcaccggggccaagaagtgcctggtgaacctgattgagaaggtggccagctatggagtgaagcccaggtatggcctggtgacctacgccacctaccccaagatctgggtgaaggtgtctgaggccgacagcagcaatgctgactgggtgaccaagcagctgaatgagatcaactatgaggaccacaagctgaagagcggcaccaacaccaagaaggccctgcaggccgtgtacagcatgatgtcctggccagatgatgtgcccccagagggctggaacagaaccaggcatgtgatcatcctgatgacagatggcctgcacaacatgggcggggaccccatcaccgtgattgatgagatccgggacctgctgtacatcggcaaggacaggaagaacccccgggaggactacctggatgtgtatgtgtttggagtgggccccctggtgaaccaggtgaacatcaatgccctggccagcaagaaggacaatgagcagcacgtgttcaaggtgaaggacatggagaacctggaggatgtgttctaccagatgattgatgagagccagagcctgagcctgtgtggcatggtgtgggagcacaggaagggcacagactaccacaagcagccctggcaggccaagatcagcgtcatccggcccagcaagggccacgagagctgcatgggcgctgtggtgtctgagtactttgtgctgacagctgcccactgcttcaccgtggatgacaaggagcacagcatcaaggtgtctgtgggcggggagaagagggacctggagattgaggtggtgctcttccaccccaactacaacatcaacgggaagaaggaggccggcatccctgagttctatgactatgatgtggccctgatcaagctgaagaacaagctgaagtatggatag

SEQ ID NO: 148299 - DNA, 1770 bp, synthetic construct; identical to SEQ ID NO: 148298
  misc_feature 1..1770: note = Description of Artificial Sequence: Synthetic coding sequence
  source 1..1770: mol_type = other DNA

SEQ ID NO: 148300 - DNA, 2295 bp, synthetic construct
  misc_feature 1..2295: note = Description of Artificial Sequence: Synthetic coding sequence
  source 1..2295: mol_type = other DNA
atgggcagcaacctgagcccccagctgtgcctgatgcccttcatcctgggcctgctgagcggcggcgtgaccaccaccccctggagcctggcccggccccagggcagctgcagcctggagggcgtggagatcaagggcggcagcttccggctgctgcaggagggccaggccctggagtatgtgtgccccagcggcttctacccctaccctgtgcagaccaggacctgccgcagcacaggctcctggagcaccctgaagacccaggaccagaagacagtgaggaaggcagaatgtcgggccatccactgcccccggccccatgactttgaaaatggagagtactggcccaggagcccctactacaacgtgtctgatgagatctccttccactgctatgatggctacaccctgcggggcagcgccaacagaacctgccaggtgaatggccgctggagcggccagacagccatctgtgacaacggggccggctactgcagcaaccctggcatccccatcggcaccaggaaggtgggcagccagtaccgcctggaggacagcgtgacctaccactgcagccggggcctgaccctgcggggcagccagaggaggacctgccaggagggcggctcctggagcggcacagagcccagctgccaggacagcttcatgtatgacaccccccaggaggtggccgaggccttcctgagcagcctgacagagaccatcgagggcgtggatgctgaagatggccacggccctggagagcagcagaagaggaagatcgtgctggaccccagcggctccatgaacatctacctggtgctggatggcagtgacagcattggagccagcaacttcaccggggccaagaagtgcctggtgaacctgattgagaaggtggccagctatggagtgaagcccaggtatggcctggtgacctacgccacctaccccaagatctgggtgaaggtgtctgaggccgacagcagcaatgctgactgggtgaccaagcagctgaatgagatcaactatgaggaccacaagctgaagagcggcaccaacaccaagaaggccctgcaggccgtgtacagcatgatgtcctggccagatgatgtgcccccagagggctggaacagaaccaggcatgtgatcatcctgatgacagatggcctgcacaacatgggcggggaccccatcaccgtgattgatgagatccgggacctgctgtacatcggcaaggacaggaagaacccccgggaggactacctggatgtgtatgtgtttggagtgggccccctggtgaaccaggtgaacatcaatgccctggccagcaagaaggacaatgagcagcacgtgttcaaggtgaaggacatggagaacctggaggatgtgttctaccagatgattgatgagagccagagcctgagcctgtgtggcatggtgtgggagcacaggaagggcacagactaccacaagcagccctggcaggccaagatcagcgtcatccggcccagcaagggccacgagagctgcatgggcgctgtggtgtctgagtactttgtgctgacagctgcccactgcttcaccgtggatgacaaggagcacagcatcaaggtgtctgtgggcggggagaagagggacctggagattgaggtggtgctcttccaccccaactacaacatcaacgggaaggaggaggccggcatccctgagttctatgactatgatgtggccctgatcaagctgaagaacaagctgaagtatggccagaccatccggcccatctgcctgccctgcacagagggcaccacccgggccctgcggctgccccccaccaccacctgccagcagcagaaggaggagctgctgcctgcccaggacatcaaggccctgtttgtgtctgaggaggagaagaagctgaccaggaaggaggtgtacatcaagaatggagacaagaagggcagctgtgaaagagatgcccagtatgcccctggctatgacaaggtgaaggacatcagcgaggtggtgaccccccgcttcctgtgcacaggaggagtgagcccctatgctgaccccaacacctgccgcggggacagcggcggccccctcatcgtgcacaagaggagccgcttcatccaggtgggcgtcatctcctggggcgtggtggatgtgtgcaagaaccagaagaggcagaagcaggtgcctgcccacgcccgggacttccacatcaacctcttccaggtgctgccctggctgaaggagaagctgcaggatgaggacctgggcttcctgtag

SEQ ID NO: 148301 - DNA, 2295 bp, synthetic construct
  misc_feature 1..2295: note = Description of Artificial Sequence: Synthetic coding sequence
  source 1..2295: mol_type = other DNA
atgggcagcaacctgagcccccagctgtgcctgatgcccttcatcctgggcctgctgagcggcggcgtgaccaccaccccctggagcctggcccggccccagggcagctgcagcctggagggcgtggagatcaagggcggcagcttccggctgctgcaggagggccaggccctggagtatgtgtgccccagcggcttctacccctaccctgtgcagaccaggacctgccgcagcacaggctcctggagcaccctgaagacccaggaccagaagacagtgaggaaggcagaatgtcgggccatccactgcccccggccccatgactttgaaaatggagagtactggcccaggagcccctactacaacgtgtctgatgagatctccttccactgctatgatggctacaccctgcggggcagcgccaacagaacctgccaggtgaatggccgctggagcggccagacagccatctgtgacaacggggccggctactgcagcaaccctggcatccccatcggcaccaggaaggtgggcagccagtaccgcctggaggacagcgtgacctaccactgcagccggggcctgaccctgcggggcagccagaggaggacctgccaggagggcggctcctggagcggcacagagcccagctgccaggacagcttcatgtatgacaccccccaggaggtggccgaggccttcctgagcagcctgacagagaccatcgagggcgtggatgctgaagatggccacggccctggagagcagcagaagaggaagatcgtgctggaccccagcggctccatgaacatctacctggtgctggatggcagtgacagcattggagccagcaacttcaccggggccaagaagtgcctggtgaacctgattgagaaggtggccagctatggagtgaagcccaggtatggcctggtgacctacgccacctaccccaagatctgggtgaaggtgtctgaggccgacagcagcaatgctgactgggtgaccaagcagctgaatgagatcaactatgaggaccacaagctgaagagcggcaccaacaccaagaaggccctgcaggccgtgtacagcatgatgtcctggccagatgatgtgcccccagagggctggaacagaaccaggcatgtgatcatcctgatgacagatggcctgcacaacatgggcggggaccccatcaccgtgattgatgagatccgggacctgctgtacatcggcaaggacaggaagaacccccgggaggactacctggatgtgtatgtgtttggagtgggccccctggtgaaccaggtgaacatcaatgccctggccagcaagaaggacaatgagcagcacgtgttcaaggtgaaggacatggagaacctggaggatgtgttctaccagatgattgatgagagccagagcctgagcctgtgtggcatggtgtgggagcacaggaagggcacagactaccacaagcagccctggcaggccaagatcagcgtcatccggcccagcaagggccacgagagctgcatgggcgctgtggtgtctgagtactttgtgctgacagctgcccactgcttcaccgtggatgacaaggagcacagcatcaaggtgtctgtgggcggggagaagagggacctggagattgaggtggtgctcttccaccccaactacaacatcaacgggaagaaggaggccggcatccctgagttctatgactatgatgtggccctgatcaagctgaagaacaagctgaagtatggccagaccatccggcccatctgcctgccctgcacagagggcaccacccgggccctgcggctgccccccaccaccacctgccagcagcagaaggaggagctgctgcctgcccaggacatcaaggccctgtttgtgtctgaggaggagaagaagctgaccaggaaggaggtgtacatcaagaatggagacaagaagggcagctgtgaaagagatgcccagtatgcccctggctatgacaaggtgaaggacatcagcgaggtggtgaccccccgcttcctgtgcacaggaggagtgagcccctatgctgaccccaacacctgccgcggggacagcggcggccccctcatcgtgcacaagaggagccgcttcatccaggtgggcgtcatctcctggggcgtggtggatgtgtgcaagaaccagaagaggcagaagcaggtgcctgcccacgcccgggacttccacatcaacctcttccaggtgctgccctggctgaaggagaagctgcaggatgaggacctgggcttcctgtag

SEQ ID NO: 148302 - DNA, 2295 bp, synthetic construct; identical to SEQ ID NO: 148301
  misc_feature 1..2295: note = Description of Artificial Sequence: Synthetic coding sequence
  source 1..2295: mol_type = other DNA

SEQ ID NO: 148303 - DNA, 2295 bp, synthetic construct; identical to SEQ ID NO: 148300
  misc_feature 1..2295: note = Description of Artificial Sequence: Synthetic coding sequence
  source 1..2295: mol_type = other DNA

SEQ ID NO: 148304 - DNA, 2295 bp, synthetic construct; identical to SEQ ID NO: 148301
  misc_feature 1..2295: note = Description of Artificial Sequence: Synthetic coding sequence
  source 1..2295: mol_type = other DNA

SEQ ID NO: 148305 - DNA, 2295 bp, synthetic construct; identical to SEQ ID NO: 148301
  misc_feature 1..2295: note = Description of Artificial Sequence: Synthetic coding sequence
  source 1..2295: mol_type = other DNA

SEQ ID NO: 148306 - DNA, 2295 bp, synthetic construct; identical to SEQ ID NO: 148301
  misc_feature 1..2295: note = Description of Artificial Sequence: Synthetic coding sequence
  source 1..2295: mol_type = other DNA

SEQ ID NO: 148307 - DNA, 2295 bp, synthetic construct; identical to SEQ ID NO: 148301
  misc_feature 1..2295: note = Description of Artificial Sequence: Synthetic coding sequence
  source 1..2295: mol_type = other DNA

SEQ ID NO: 148308 - DNA, 2295 bp, synthetic construct; identical to SEQ ID NO: 148301
  misc_feature 1..2295: note = Description of Artificial Sequence: Synthetic coding sequence
  source 1..2295: mol_type = other DNA

SEQ ID NO: 148309 - DNA, 2295 bp, synthetic construct; identical to SEQ ID NO: 148301
  misc_feature 1..2295: note = Description of Artificial Sequence: Synthetic coding sequence
  source 1..2295: mol_type = other DNA

SEQ ID NO: 148310 - DNA, 2295 bp, synthetic construct; identical to SEQ ID NO: 148301
  misc_feature 1..2295: note = Description of Artificial Sequence: Synthetic coding sequence
  source 1..2295: mol_type = other DNA

SEQ ID NO: 148311 - DNA, 435 bp, synthetic construct
  misc_feature 1..435: note = Description of Artificial Sequence: Synthetic coding sequence
  source 1..435: mol_type = other DNA
atgggcagcaacctgagcccccagctgtgcctgatgcccttcatcctgggcctgctgagcggcggcgtgaccaccaccccctggagcctggcccggccccagggcagctgcagcctggagggcgtggagatcaagggcggcagcttccggctgctgcaggagggccaggccctggagtatgtgtgccccagcggcttctacccctaccctgtgcagaccaggacctgccgcagcacaggctcctggagcaccctgaagacccaggaccagaagacagtgaggaaggcagaatgtcgggccatccactgcccccggccccatgactttgaaaatggagagtactggcccaggagcccctactacaacgtgtctgatgagatctccttccactgctatgatggctacaccctgcggggcagcgccaacagaacatag

SEQ ID NO: 148312 - DNA, 3801 bp, synthetic construct
  misc_feature 1..3801: note = Description of Artificial Sequence: Synthetic coding sequence
  source 1..3801: mol_type = other DNA
atgggccccctgatggtgctcttctgcctgctcttcctgtacccaggcctggccgacagcgcccccagctgcccccagaatgtgaacatcagcggcggcaccttcaccctgagccacggctgggcccctggcagcctgctgacctacagctgcccccagggcctgtaccccagccctgccagccggctgtgcaagagcagcggccagtggcagacccctggggccaccaggagcctgagcaaggctgtgtgcaagccaggccactgccccaaccctggcatcagcctgggcgctgtgaggacaggcttccgctttggacatggagacaaggtgcgctaccgctgcagcagcaacctggtgctgaccggcagcagcgagcgggagtgccagggcaatggagtgtggagcggcacagagcccatctgccggcagccctacagctatgacttcccagaagatgtggccccagccctgggcaccagcttcagccacatgctgggcgccaccaaccccacccagaagaccaaggaccatgaaaatggcaccggcaccaacacctacgccgccctgaacagcgtgtacctgatgatgaacaaccagatgaggctgctgggcatggagaccatggcctggcaggagatcagacatgccatcatcctgctgacagatggcaagagcaacatgggcggcagccccaagacagctgtggaccacatccgggagatcctgaacatcaaccagaagagaaatgactacctggacatctatgccatcggcgtgggcaagctggatgtggactggagggagctgaatgagctgggcagcaagaaggatggagagagacatgccttcatcctgcaggacaccaaggccctgcaccaggtgtttgagcacatgctggatgtgtccaagctgacagacaccatctgtggggtgggcaacatgtctgccaatgccagtgaccaggagaggaccccctggcacgtgaccatcaagcccaagagccaggagacctgccgcggggccctgatcagtgaccagtgggtgctgacagctgcccactgcttcagagatggaaatgaccacagcctgtggagggtgaatgtgggggaccccaagagccagtggggcaaggagttcctgattgagaaggctgtgatcagccctggctttgatgtgtttgccaagaagaaccagggcatcctggagttctatggagatgacatcgccctgctgaagctggcccagaaggtgaagatgagcacccacgcccggcccatctgcctgccctgcaccatggaggccaacctggccctgcggcggccccagggcagcacctgccgggaccatgaaaatgagctgctgaacaagcagagcgtgcctgcccactttgtggccctgaatggcagcaagctgaacatcaacctgaagatgggcgtggagtggaccagctgtgccgaggtggtgtcccaggagaagaccatgttccccaacctgacagatgtgcgggaggtggtgacagaccagttcctgtgcagcggcacccaggaggatgagagcccctgcaagggcgtgaccaccaccccctggagcctggcccggccccagggcagctgcagcctggagggcgtggagatcaagggcggcagcttccggctgctgcaggagggccaggccctggagtatgtgtgccccagcggcttctacccctaccctgtgcagaccaggacctgccgcagcacaggctcctggagcaccctgaagacccaggaccagaagacagtgaggaaggcagaatgtcgggccatccactgcccccggccccatgactttgaaaatggagagtactggcccaggagcccctactacaacgtgtctgatgagatctccttccactgctatgatggctacaccctgcggggcagcgccaacagaacctgccaggtgaatggccgctggagcggccagacagccatctgtgacaacggggccggctactgcagcaaccctggcatccccatcggcaccaggaaggtgggcagccagtaccgcctggaggacagcgtgacctaccactgcagccggggcctgaccctgcggggcagccagaggaggacctgccaggagggcggctcctggagcggcacagagcccagctgccaggacagcttcatgtatgacaccccccaggaggtggccgaggccttcctgagcagcctgacagagaccatcgagggcgtggatgctgaagatggccacggccctggagagcagcagaagaggaagatcgtgctggaccccagcggctccatgaacatctacctggtgctggatggcagtgacagcattggagccagcaacttcaccggggccaagaagtgcctggtgaacctgattgagaaggtggccagctatggagtgaagcccaggtatggcctggtgacctacgccacctaccccaagatctgggtgaaggtgtctgaggccgacagcagcaatgctgactgggtgaccaagcagctgaatgagatcaactatgaggaccacaagctgaagagcggcaccaacaccaagaaggccctgcaggccgtgtacagcatgatgtcctggccagatgatgtgcccccagagggctggaacagaaccaggcatgtgatcatcctgatgacagatggcctgcacaacatgggcggggaccccatcaccgtgattgatgagatccgggacctgctgtacatcggcaaggacaggaagaacccccgggaggactacctggatgtgtatgtgtttggagtgggccccctggtgaaccaggtgaacatcaatgccctggccagcaagaaggacaatgagcagcacgtgttcaaggtgaaggacatggagaacctggaggatgtgttctaccagatgattgatgagagccagagcctgagcctgtgtggcatggtgtgggagcacaggaagggcacagactaccacaagcagccctggcaggccaagatcagcgtcatccggcccagcaagggccacgagagctgcatgggcgctgtggtgtctgagtactttgtgctgacagctgcccactgcttcaccgtggatgacaaggagcacagcatcaaggtgtctgtgggcggggagaagagggacctggagattgaggtggtgctcttccaccccaactacaacatcaacgggaagaaggaggccggcatccctgagttctatgactatgatgtggccctgatcaagctgaagaacaagctgaagtatggccagaccatccggcccatctgcctgccctgcacagagggcaccacccgggccctgcggctgccccccaccaccacctgccagcagcagaaggaggagctgctgcctgcccaggacatcaaggccctgtttgtgtctgaggaggagaagaagctgaccaggaaggaggtgtacatcaagaatggagacaagaagggcagctgtgaaagagatgcccagtatgcccctggctatgacaaggtgaaggacatcagcgaggtggtgaccccccgcttcctgtgcacaggaggagtgagcccctatgctgaccccaacacctgccgcggggacagcggcggccccctcatcgtgcacaagaggagccgcttcatccaggtgggcgtcatctcctggggcgtggtggatgtgtgcaagaaccagaagaggcagaagcaggtgcctgcccacgcccgggacttccacatcaacctcttccaggtgctgccctggctgaaggagaagctgcaggatgaggacctgggcttcctgtag

SEQ ID NO: 148313 - DNA, 3801 bp, synthetic construct
  misc_feature 1..3801: note = Description of Artificial Sequence: Synthetic coding sequence
  source 1..3801: mol_type = other DNA
atgggccccctgatggtgctcttctgcctgctcttcctgtacccaggcctggccgacagcgcccccagctgcccccagaatgtgaacatcagcggcggcaccttcaccctgagccacggctgggcccctggcagcctgctgacctacagctgcccccagggcctgtaccccagccctgccagccggctgtgcaagagcagcggccagtggcagacccctggggccaccaggagcctgagcaaggctgtgtgcaagccaggccactgccccaaccctggcatcagcctgggcgctgtgaggacaggcttccgctttggacatggagacaaggtgcgctaccgctgcagcagcaacctggtgctgaccggcagcagcgagcgggagtgccagggcaatggagtgtggagcggcacagagcccatctgccggcagccctacagctatgacttcccagaagatgtggccccagccctgggcaccagcttcagccacatgctgggcgccaccaaccccacccagaagaccaaggaccatgaaaatggcaccggcaccaacacctacgccgccctgaacagcgtgtacctgatgatgaacaaccagatgaggctgctgggcatggagaccatggcctggcaggagatcagacatgccatcatcctgctgacagatggcaagagcaacatgggcggcagccccaagacagctgtggaccacatccgggagatcctgaacatcaaccagaagagaaatgactacctggacatctatgccatcggcgtgggcaagctggatgtggactggagggagctgaatgagctgggcagcaagaaggatggagagagacatgccttcatcctgcaggacaccaaggccctgcaccaggtgtttgagcacatgctggatgtgtccaagctgacagacaccatctgtggggtgggcaacatgtctgccaatgccagtgaccaggagaggaccccctggcacgtgaccatcaagcccaagagccaggagacctgccgcggggccctgatcagtgaccagtgggtgctgacagctgcccactgcttcagagatggaaatgaccacagcctgtggagggtgaatgtgggggaccccaagagccagtggggcaaggagttcctgattgagaaggctgtgatcagccctggctttgatgtgtttgccaagaagaaccagggcatcctggagttctatggagatgacatcgccctgctgaagctggcccagaaggtgaagatgagcacccacgcccggcccatctgcctgccctgcaccatggaggccaacctggccctgcggcggccccagggcagcacctgccgggaccatgaaaatgagctgctgaacaagcagagcgtgcctgcccactttgtggccctgaatggcagcaagctgaacatcaacctgaagatgggcgtggagtggaccagctgtgccgaggtggtgtcccaggagaagaccatgttccccaacctgacagatgtgcgggaggtggtgacagaccagttcctgtgcagcggcacccaggaggatgagagcccctgcaagggcgtgaccaccaccccctggagcctggcccggccccagggcagctgcagcctggagggcgtggagatcaagggcggcagcttccggctgctgcaggagggccaggccctggagtatgtgtgccccagcggcttctacccctaccctgtgcagaccaggacctgccgcagcacaggctcctggagcaccctgaagacccaggaccagaagacagtgaggaaggcagaatgtcgggccatccactgcccccggccccatgactttgaaaatggagagtactggcccaggagcccctactacaacgtgtctgatgagatctccttccactgctatgatggctacaccctgcggggcagcgccaacagaacctgccaggtgaatggccgctggagcggccagacagccatctgtgacaacggggccggctactgcagcaaccctggcatccccatcggcaccaggaaggtgggcagccagtaccgcctggaggacagcgtgacctaccactgcagccggggcctgaccctgcggggcagccagaggaggacctgccaggagggcggctcctggagcggcacagagcccagctgccaggacagcttcatgtatgacaccccccaggaggtggccgaggccttcctgagcagcctgacagagaccatcgagggcgtggatgctgaagatggccacggccctggagagcagcagaagaggaagatcgtgctggaccccagcggctccatgaacatctacctggtgctggatggcagtgacagcattggagccagcaacttcaccggggccaagaagtgcctggtgaacctgattgagaaggtggccagctatggagtgaagcccaggtatggcctggtgacctacgccacctaccccaagatctgggtgaaggtgtctgaggccgacagcagcaatgctgactgggtgaccaagcagctgaatgagatcaactatgaggaccacaagctgaagagcggcaccaacaccaagaaggccctgcaggccgtgtacagcatgatgtcctggccagatgatgtgcccccagagggctggaacagaaccaggcatgtgatcatcctgatgacagatggcctgcacaacatgggcggggaccccatcaccgtgattgatgagatccgggacctgctgtacatcggcaaggacaggaagaacccccgggaggactacctggatgtgtatgtgtttggagtgggccccctggtgaaccaggtgaacatcaatgccctggccagcaagaaggacaatgagcagcacgtgttcaaggtgaaggacatggagaacctggaggatgtgttctaccagatgattgatgagagccagagcctgagcctgtgtggcatggtgtgggagcacaggaagggcacagactaccacaagcagccctggcaggccaagatcagcgtcatccggcccagcaagggccacgagagctgcatgggcgctgtggtgtctgagtactttgtgctgacagctgcccactgcttcaccgtggatgacaaggagcacagcatcaaggtgtctgtgggcggggagaagagggacctggagattgaggtggtgctcttccaccccaactacaacatcaacgggaaggaggaggccggcatccctgagttctatgactatgatgtggccctgatcaagctgaagaacaagctgaagtatggccagaccatccggcccatctgcctgccctgcacagagggcaccacccgggccctgcggctgccccccaccaccacctgccagcagcagaaggaggagctgctgcctgcccaggacatcaaggccctgtttgtgtctgaggaggagaagaagctgaccaggaaggaggtgtacatcaagaatggagacaagaagggcagctgtgaaagagatgcccagtatgcccctggctatgacaaggtgaaggacatcagcgaggtggtgaccccccgcttcctgtgcacaggaggagtgagcccctatgctgaccccaacacctgccgcggggacagcggcggccccctcatcgtgcacaagaggagccgcttcatccaggtgggcgtcatctcctggggcgtggtggatgtgtgcaagaaccagaagaggcagaagcaggtgcctgcccacgcccgggacttccacatcaacctcttccaggtgctgccctggctgaaggagaagctgcaggatgaggacctgggcttcctgtag

SEQ ID NO: 148314 - DNA, 3801 bp, synthetic construct; identical to SEQ ID NO: 148312
  misc_feature 1..3801: note = Description of Artificial Sequence: Synthetic coding sequence
  source 1..3801: mol_type = other DNA

SEQ ID NO: 148315 - DNA, 3801 bp, synthetic construct; identical to SEQ ID NO: 148312
  misc_feature 1..3801: note = Description of Artificial Sequence: Synthetic coding sequence
  source 1..3801: mol_type = other DNA

SEQ ID NO: 148316 - DNA, 3801 bp, synthetic construct; identical to SEQ ID NO: 148312
  misc_feature 1..3801: note = Description of Artificial Sequence: Synthetic coding sequence
  source 1..3801: mol_type = other DNA

SEQ ID NO: 148317 - DNA, 3801 bp, synthetic construct; identical to SEQ ID NO: 148312
  misc_feature 1..3801: note = Description of Artificial Sequence: Synthetic coding sequence
  source 1..3801: mol_type = other DNA

SEQ ID NO: 148318 - DNA, 762 bp, synthetic construct
  misc_feature 1..762: note = Description of Artificial Sequence: Synthetic coding sequence
  source 1..762: mol_type = other DNA
atgcacagctgggagcggctggccgtgctggtgctgctgggcgccgccgcctgtgccgccccaccccggggccgcatcctgggcggccgggaggccgaggcccacgcccggccctacatggcctctgtgcagctgaatggagcccacctgtgtggcggcgtgctggtggccgagcagtgggtgctgtctgctgcccactgcctggaggatgctgctgatggcaaggtgcaggtgctgctgggcgcccacagcctgagccagcctgagcccagcaagaggctgtatgatgtgctgcgggctgtgccccacccagacagccagcctgacaccatcgaccatgacctgctgctgctgcagctgtctgagaaggccaccctgggccctgctgtgcggcccctgccctggcagagggtggacagagatgtggcccctggcaccctgtgtgatgtggccggctggggcatcgtgaaccacgccggcagaagaccagacagcctgcagcacgtgctgctgcctgtgctggaccgggccacctgcaacagaaggacccaccatgatggagccatcacagagcggctgatgtgtgccgagagcaacagaagagacagctgcaagggggacagcggcggccccctggtgtgtggcggcgtgctggagggcgtggtgaccagcggcagccgggtgtgtggcaacaggaagaagccaggcatctacaccagggtggccagctatgctgcctggattgacagcgtgctggcctag

SEQ ID NO: 148319 - DNA, 993 bp, synthetic construct
  misc_feature 1..993: note = Description of Artificial Sequence: Synthetic coding sequence
  source 1..993: mol_type = other DNA
atgtggctgctggtgtctgtcatcctgatcagccgcatcagctctgtgggcggggaggccaccttctgtgacttccccaagatcaaccacggcatcctgtatgatgaggagaagtacaagcccttcagccaggtgcccactggagaggtgttctactacagctgtgagtacaactttgtgagccccagcaagagcttctggacccgcatcacctgcacagaggagggctggagccccacccccaagtgcctgcggctgtgcttcttcccctttgtggagaatggccacagcgagagcagcggccagacccacctggagggggacacagtgcagatcatctgcaacacaggctaccgcctgcagaacaatgaaaacaacatcagctgtgtggagcggggctggagcaccccacccaagtgccgcagcacagacaccagctgtgtgaacccccccaccgtgcagaatgcccacatcctgagccggcagatgagcaagtaccccagcggggagcgggtgcgctatgaatgtcgcagcccctatgagatgtttggagatgaggaggtgatgtgcctgaatggaaactggacagagcccccccagtgcaaggacagcactggaaaatgtggccccccaccacccatcgacaacggggacatcaccagcttccccctgtctgtgtatgccccagccagctctgtggagtaccagtgccagaacctgtaccagctggagggcaacaagaggatcacctgcagaaatggccagtggagcgagccccccaagtgcctgcacccctgcgtcatcagccgggagatcatggagaactacaacatcgccctgcgctggacagccaagcagaagctgtacctgaggactggagagagcgctgagtttgtgtgcaagaggggctaccgcctgagcagccgcagccacaccctgcggaccacctgctgggatggcaagctggagtaccccacctgtgccaagaggtag

SEQ ID NO: 148320 - DNA, 813 bp, synthetic construct
  misc_feature 1..813: note = Description of Artificial Sequence: Synthetic coding sequence
  source 1..813: mol_type = other DNA
atgtggctgctggtgtctgtcatcctgatcagccgcatcagctctgtgggcggggaggccatgttctgtgacttccccaagatcaaccacggcatcctgtatgatgaggagaagtacaagcccttcagccaggtgcccactggagaggtgttctactacagctgtgagtacaactttgtgagccccagcaagagcttctggacccgcatcacctgtgccgaggagggctggagccccacccccaagtgcctgcggctgtgcttcttcccctttgtggagaatggccacagcgagagcagcggccagacccacctggagggggacacagtgcagatcatctgcaacacaggctaccgcctgcagaacaatgaaaacaacatcagctgtgtggagcggggctggagcaccccacccaagtgccgcagcaccatctctgctgagaagtgtggccccccaccacccatcgacaatggagacatcaccagcttcctgctgtctgtgtatgcccctggcagctctgtggagtaccagtgccagaacctgtaccagctggagggcaacaaccagatcacctgcagaaatggccagtggagcgagccccccaagtgcctggacccctgtgtgatcagccaggagatcatggagaagtacaacatcaagctgaagtggaccaaccagcagaagctgtacagcaggactggagacatcgtggagtttgtgtgcaagagcggctaccaccccaccaagagccacagcttccgggccatgtgccagaatggcaagctggtgtaccccagctgtgaggagaagtag

SEQ ID NO: 148321 - DNA, 813 bp, synthetic construct; identical to SEQ ID NO: 148320
  misc_feature 1..813: note = Description of Artificial Sequence: Synthetic coding sequence
  source 1..813: mol_type = other DNA

SEQ ID NO: 148322 - DNA, 993 bp, synthetic construct
  misc_feature 1..993: note = Description of Artificial Sequence: Synthetic coding sequence
  source 1..993: mol_type = other DNA
atgctgctgctgatcaacgtcatcctgaccctgtgggtgtcctgtgccaacggccaggtgaagccctgtgacttcccagacatcaagcacggcggcctcttccacgagaacatgagaagaccctacttccctgtggccgtgggcaagtactacagctactactgtgatgagcactttgagaccccatctggcagctactgggactacatccactgcacccagaatggctggagccctgctgtgccctgcctgaggaagtgctacttcccctacctggagaatggctacaaccagaactacggcaggaagtttgtgcagggcaacagcacagaggtggcctgccaccctggctacggcctgcccaaggcccagaccaccgtgacctgcacagagaagggctggagccccaccccccgctgcatccgggtgaggacctgcagcaagagtgacattgaaattgaaaatggcttcatcagcgagagcagcagcatctacatcctgaacaaggagatccagtacaagtgcaagccaggctacgccacagcagatggcaacagcagcggcagcatcacctgcctgcagaatggctggagcgcccagcccatctgcatcaacagcagcgagaagtgtggccccccaccacccatcagcaatggagacaccaccagcttcctgctgaaggtgtatgtgccccagagccgggtggagtaccagtgccagccctactatgagctgcagggcagcaactacgtgacctgcagcaatggagagtggagcgagcccccacgctgcatccacccctgcatcatcacagaggagaacatgaacaagaacaacatcaagctgaagggccgcagtgacaggaagtactatgccaagacaggagacaccatcgagttcatgtgcaagctgggctacaatgccaacaccagcatcctgtccttccaggccgtgtgccgggagggcatcgtggagtacccccgctgtgagtag

SEQ ID NO: 148323 - DNA, 588 bp, synthetic construct
  misc_feature 1..588: note = Description of Artificial Sequence: Synthetic coding sequence
  source 1..588: mol_type = other DNA
atgctgctgctgatcaacgtcatcctgaccctgtgggtgtcctgtgccaacggccaggtgaagccctgtgacttcccagacatcaagcacggcggcctcttccacgagaacatgagaagaccctacttccctgtggccgtgggcaagtactacagctactactgtgatgagcactttgagaccccatctggcagctactgggactacatccactgcacccagaatggctggagccctgctgtgccctgcctgaggaagtgctacttcccctacctggagaatggctacaaccagaactacggcaggaagtttgtgcagggcaacagcacagaggtggcctgccaccctggctacggcctgcccaaggcccagaccaccgtgacctgcacagagaagggctggagccccaccccccgctgcatccgggtgaggacctgcagcaagagtgacattgaaattgaaaatggcttcatcagcgagagcagcagcatctacatcctgaacaaggagatccagtacaagtgcaagccaggctacgccacagcagatggcaacagcagtgacatggtgttctgcatctcctactag

SEQ ID NO: 148324 - DNA, 810 bp, synthetic construct
  misc_feature 1..810: note = Description of Artificial Sequence: Synthetic coding sequence
  source 1..810: mol_type = other DNA
atgctgctgctgatcaacgtcatcctgaccctgtgggtgtcctgtgccaacggccaggtgaagccctgtgacttcccagacatcaagcacggcggcctcttccacgagaacatgagaagaccctacttccctgtggccgtgggcaagtactacagctactactgtgatgagcactttgagaccccatctggcagctactgggactacatccactgcacccagaatggctggagccctgctgtgccctgcctgaggaagtgctacttcccctacctggagaatggctacaaccagaactacggcaggaagtttgtgcagggcaacagcacagaggtggcctgccaccctggctacggcctgcccaaggcccagaccaccgtgacctgcacagagaagggctggagccccaccccccgctgcatccgggtgaacagcagcgagaagtgtggccccccaccacccatcagcaatggagacaccaccagcttcctgctgaaggtgtatgtgccccagagccgggtggagtaccagtgccagccctactatgagctgcagggcagcaactacgtgacctgcagcaatggagagtggagcgagcccccacgctgcatccacccctgcatcatcacagaggagaacatgaacaagaacaacatcaagctgaagggccgcagtgacaggaagtactatgccaagacaggagacaccatcgagttcatgtgcaagctgggctacaatgccaacaccagcatcctgtccttccaggccgtgtgccgggagggcatcgtggagtacccccgctgtgagtag

SEQ ID NO: 148325 - DNA, 996 bp, synthetic construct
  misc_feature 1..996: note = Description of Artificial Sequence: Synthetic coding sequence
  source 1..996: mol_type = other DNA
atgctgctgctgatcaacgtcatcctgaccctgtgggtgtcctgtgccaacggccaggaggtgaagccctgtgacttccctgagatccagcacggcggcctgtactacaagagcctgcggcggctgtacttccctgctgctgctggccagagctacagctactactgtgaccagaactttgtgacccccagcggcagctactgggactacatccactgcacccaggacggctggagccccaccgtgccctgcctgcggacctgcagcaagagtgacattgaaattgaaaatggcttcatcagcgagagcagcagcatctacatcctgaacaaggagatccagtacaagtgcaagccaggctacgccacagcagatggcaacagcagcggcagcatcacctgcctgcagaatggctggagcgcccagcccatctgcatcaagttctgtgacatgcctgtgtttgagaacagccgggccaagagcaatggcatgaggttcaagctgcatgacaccctggactatgaatgttatgatggctatgagatctcctatggcaacaccaccggcagcatcgtgtgtggagaagatggctggagccacttccccacctgctacaacagcagcgagaagtgtggccccccaccacccatcagcaatggagacaccaccagcttcctgctgaaggtgtatgtgccccagagccgggtggagtaccagtgccagagctactatgagctgcagggcagcaactacgtgacctgcagcaatggagagtggagcgagcccccacgctgcatccacccctgcatcatcacagaggagaacatgaacaagaacaacatccagctgaagggcaagagtgacatcaagtactatgccaagacaggagacaccatcgagttcatgtgcaagctgggctacaatgccaacacctctgtgctgtccttccaggccgtgtgccgggagggcatcgtggagtacccccgctgtgagtag

SEQ ID NO: 148326 - DNA, 1734 bp, synthetic construct
  misc_feature 1..1734: note = Description of Artificial Sequence: Synthetic coding sequence
  source 1..1734: mol_type = other DNA
atgctgctgctgatcaacgtcatcctgaccctgtgggtgtcctgtgccaacggccaggtgaagccctgtgacttccctgagatccagcacggcggcctgtactacaagagcctgcggcggctgtacttccctgctgctgctggccagagctacagctactactgtgaccagaactttgtgaccccatctggcagctactgggactacatccactgcacccaggacggctggagccccaccgtgccctgcctgcggacctgcagcaagagtgatgtggagattgaaaatggcttcatcagcgagagcagcagcatctacatcctgaatgaggagacccagtacaactgcaagccaggctacgccacagctgagggcaacagcagcggcagcatcacctgcctgcagaatggctggagcacccagcccatctgcatcaagttctgtgacatgcctgtgtttgagaacagccgggccaagagcaatggcatgtggttcaagctgcatgacaccctggactatgagtgctatgatggctatgagagcagctatggcaacaccacagacagcatcgtgtgtggggaggatggctggagccacctgcccacctgctacaacagcagcgagaactgtggccccccaccacccatcagcaatggagacaccaccagcttcccccagaaggtgtacctgccctggagccgggtggagtaccagtgccagagctactatgagctgcagggcagcaaatatgtgacctgcagcaatggagactggagcgagcccccacgctgcatctccatgaagccctgtgagttccctgagatccagcacggccacctgtactatgagaacacccggcggccctacttccctgtggccaccggccagagctacagctactactgtgaccagaactttgtgacccccagcggcagctactgggactacatccactgcacccaggacggctggctgcccaccgtgccctgcctgcggacctgcagcaagagtgacattgaaattgaaaatggcttcatcagcgagagcagcagcatctacatcctgaacaaggagatccagtacaagtgcaagccaggctacgccacagcagatggcaacagcagcggcagcatcacctgcctgcagaatggctggagcgcccagcccatctgcatcaagttctgtgacatgcctgtgtttgagaacagccgggccaagagcaatggcatgaggttcaagctgcatgacaccctggactatgaatgttatgatggctatgagatctcctatggcaacaccaccggcagcatcgtgtgtggagaagatggctggagccacttccccacctgctacaacagcagcgagaagtgtggccccccaccacccatcagcaatggagacaccaccagcttcctgctgaaggtgtatgtgccccagagccgggtggagtaccagtgccagagctactatgagctgcagggcagcaactacgtgacctgcagcaatggagagtggagcgagcccccacgctgcatccacccctgcatcatcacagaggagaacatgaacaagaacaacatccagctgaagggcaagagtgacatcaagtactatgccaagacaggagacaccatcgagttcatgtgcaagctgggctacaatgccaacacctctgtgctgtccttccaggccgtgtgccgggagggcatcgtggagtacccccgctgtgagtag

SEQ ID NO: 148327 - DNA, 996 bp, synthetic construct
  misc_feature 1..996: note = Description of Artificial Sequence: Synthetic coding sequence
  source 1..996: mol_type = other DNA
atgctgctgctgatcaacgtcatcctgaccctgtgggtgtcctgtgccaacggccaggccatgaagccctgtgagttccctgagatccagcacggccacctgtactatgagaacacccggcggccctacttccctgtggccaccggccagagctacagctactactgtgaccagaactttgtgacccccagcggcagctactgggactacatccactgcacccaggacggctggctgcccaccgtgccctgcctgcggacctgcagcaagagtgacattgaaattgaaaatggcttcatcagcgagagcagcagcatctacatcctgaacaaggagatccagtacaagtgcaagccaggctacgccacagcagatggcaacagcagcggcagcatcacctgcctgcagaatggctggagcgcccagcccatctgcatcaagttctgtgacatgcctgtgtttgagaacagccgggccaagagcaatggcatgaggttcaagctgcatgacaccctggactatgaatgttatgatggctatgagatctcctatggcaacaccaccggcagcatcgtgtgtggagaagatggctggagccacttccccacctgctacaacagcagcgagaagtgtggccccccaccacccatcagcaatggagacaccaccagcttcctgctgaaggtgtatgtgccccagagccgggtggagtaccagtgccagagctactatgagctgcagggcagcaactacgtgacctgcagcaatggagagtggagcgagcccccacgctgcatccacccctgcatcatcacagaggagaacatgaacaagaacaacatccagctgaagggcaagagtgacatcaagtactatgccaagacaggagacaccatcgagttcatgtgcaagctgggctacaatgccaacacctctgtgctgtccttccaggccgtgtgccgggagggcatcgtggagtacccccgctgtgagtag

SEQ ID NO: 148328 - DNA, 996 bp, synthetic construct
  misc_feature 1..996: note = Description of Artificial Sequence: Synthetic coding sequence
  source 1..996: mol_type = other DNA
atgctgctgctgatcaacgtcatcctgaccctgtgggtgtcctgtgccaacggccaggaggtgaagccctgtgacttccctgagatccagcacggcggcctgtactacaagagcctgcggcggctgtacttccctgctgctgctggccagagctacagctactactgtgaccagaactttgtgacccccagcggcagctactgggactacatccactgcacccaggacggctggctgcccaccgtgccctgcctgcggacctgcagcaagagtgacattgaaattgaaaatggcttcatcagcgagagcagcagcatctacatcctgaacaaggagatccagtacaagtgcaagccaggctacgccacagcagatggcaacagcagcggcagcatcacctgcctgcagaatggctggagcgcccagcccatctgcatcaagttctgtgacatgcctgtgtttgagaacagccgggccaagagcaatggcatgaggttcaagctgcatgacaccctggactatgaatgttatgatggctatgagatctcctatggcaacaccaccggcagcatcgtgtgtggagaagatggctggagccacttccccacctgctacaacagcagcgagaagtgtggccccccaccacccatcagcaatggagacaccaccagcttcctgctgaaggtgtatgtgccccagagccgggtggagtaccagtgccagagctactatgagctgcagggcagcaactacgtgacctgcagcaatggagagtggagcgagcccccacgctgcatccacccctgcatcatcacagaggagaacatgaacaagaacaacatccagctgaagggcaagagtgacatcaagtactatgccaagacaggagacaccatcgagttcatgtgcaagctgggctacaatgccaacacctctgtgctgtccttccaggccgtgtgccgggagggcatcgtggagtacccccgctgtgagtag

SEQ ID NO: 148329 - DNA, 1752 bp, synthetic construct
  misc_feature 1..1752: note = Description of Artificial Sequence: Synthetic coding sequence
  source 1..1752: mol_type = other DNA
atgaagctgctgcacgtgttcctgctcttcctgtgcttccacctgcgcttctgcaaggtgacctacaccagccaggaggacctggtggagaagaagtgcctggccaagaagtacacccacctgagctgtgacaaggtgttctgccagccctggcagcgctgcatcgagggcacctgtgtgtgcaagctgccctaccagtgccccaagaatggaacagctgtgtgtgccaccaacagaagaagcttccccacctactgccagcagaagagcctggagtgcctgcaccctggcaccaagttcctgaacaacggcacctgcacagctgagggcaagttctctgtgtccctgaagcacggcaacacagattctgagggcatcgtggaggtgaagctggtggaccaggacaagaccatgttcatctgcaagagctcctggagcatgagggaggccaacgtggcctgcctggacctgggcttccagcagggcgctgacacccagaggcgcttcaagctgagtgacctgagcatcaacagcacagagtgcctgcacgtgcactgccggggcctggagaccagcctggctgaatgtaccttcaccaagaggaggaccatgggctaccaggactttgctgatgtggtgtgctacacccagaaggctgacagccccatggatgacttcttccagtgtgtgaatggcaagtacatcagccagatgaaggcctgtgatggcatcaatgactgtggggaccagagtgatgagctgtgctgcaaggcctgccagggcaagggcttccactgcaagagcggcgtgtgcatccccagccagtaccagtgcaatggagaggtggactgcatcaccggggaggatgaggtgggctgtgccggctttgcctctgtgacccaggaggagacagagatcctgacagctgacatggatgctgagcggcggcgcatcaagagcctgctgcccaagctgagctgtggggtgaagaacaggatgcacatccggaggaagagaattgtgggcggcaagagggcccagctgggggacctgccctggcaggtggccatcaaggatgccagcggcatcacctgtggcggcatctacatcggcggctgctggatcctgacagctgcccactgcctgcgggccagcaagacccaccgctaccagatctggaccaccgtggtggactggatccacccagacctgaagagaattgtgattgaatatgtggaccgcatcatcttccacgagaactacaatgccggcacctaccagaatgacatcgccctgattgagatgaagaaggatggcaacaagaaggactgtgagctgcccaggagcatcccagcctgtgtgccctggagcccctacctgttccagcccaatgacacctgcatcgtgtctggctggggccgggagaaggacaatgaaagagtcttcagcctgcagtggggcgaggtgaagctgatcagcaactgcagcaagttctacggcaaccgcttctatgagaaggagatggagtgtgccggcacctatgatggcagcattgatgcctgcaagggggacagcggcggccccctggtgtgcatggatgccaacaacgtgacctacgtgtggggcgtggtgtcctggggcgagaactgtgggaagccagagttccctggggtgtacaccaaggtggccaactactttgactggatctcctaccacgtgggccggcccttcatcagccagtacaacgtgtag

SEQ ID NO: 148330 - DNA, 1776 bp, synthetic construct
  misc_feature 1..1776: note = Description of Artificial Sequence: Synthetic coding sequence
  source 1..1776: mol_type = other DNA
atgaagctgctgcacgtgttcctgctcttcctgtgcttccacctgcgcttctgcaaggtgacctacaccagccaggaggacctggtggagaagaagtgcctggccaagaagtacacccacctgagctgtgacaaggtgttctgccagccctggcagcgctgcatcgagggcacctgtgtgtgcaagctgccctaccagtgccccaagaatggaacagctgtgtgtgccaccaacagaagaagcttccccacctactgccagcagaagagcctggagtgcctgcaccctggcaccaagttcctgaacaacggcacctgcacagctgagggcaagttctctgtgtccctgaagcacggcaacacagattctgagggcatcgtggaggtgaagctggtggaccaggacaagaccatgttcatctgcaagagctcctggagcatgagggaggccaacgtggcctgcctggacctgggcttccagcagggcgctgacacccagaggcgcttcaagctgagtgacctgagcatcaacagcacagagtgcctgcacgtgcactgccggggcctggagaccagcctggctgaatgtaccttcaccaagaggaggaccatgggctaccaggactttgctgatgtggtgtgctacacccagaaggctgacagccccatggatgacttcttccagtgtgtgaatggcaagtacatcagccagatgaaggcctgtgatggcatcaatgactgtggggaccagagtgatgagctgtgctgcaaggcctgccagggcaagggcttccactgcaagagcggcgtgtgcatccccagccagtaccagtgcaatggagaggtggactgcatcaccggggaggatgaggtgggctgtgccgccgcccggcaccccaccatccagggctttgcctctgtgacccaggaggagacagagatcctgacagctgacatggatgctgagcggcggcgcatcaagagcctgctgcccaagctgagctgtggggtgaagaacaggatgcacatccggaggaagagaattgtgggcggcaagagggcccagctgggggacctgccctggcaggtggccatcaaggatgccagcggcatcacctgtggcggcatctacatcggcggctgctggatcctgacagctgcccactgcctgcgggccagcaagacccaccgctaccagatctggaccaccgtggtggactggatccacccagacctgaagagaattgtgattgaatatgtggaccgcatcatcttccacgagaactacaatgccggcacctaccagaatgacatcgccctgattgagatgaagaaggatggcaacaagaaggactgtgagctgcccaggagcatcccagcctgtgtgccctggagcccctacctgttccagcccaatgacacctgcatcgtgtctggctggggccgggagaaggacaatgaaagagtcttcagcctgcagtggggcgaggtgaagctgatcagcaactgcagcaagttctacggcaaccgcttctatgagaaggagatggagtgtgccggcacctatgatggcagcattgatgcctgcaagggggacagcggcggccccctggtgtgcatggatgccaacaacgtgacctacgtgtggggcgtggtgtcctggggcgagaactgtgggaagccagagttccctggggtgtacaccaaggtggccaactactttgactggatctcctaccacgtgggccggcccttcatcagccagtacaacgtgtag

SEQ ID NO: 148331 - DNA, 1731 bp, synthetic construct
  misc_feature 1..1731: note = Description of Artificial Sequence: Synthetic coding sequence
  source 1..1731: mol_type = other DNA
atgaagctgctgcacgtgttcctgctcttcctgtgcttccacctgcgcttctgcaaggtgacctacaccagccaggaggacctggtggagaagaagtgcctggccaagaagtacacccacctgagctgtgacaaggtgttctgccagccctggcagcgctgcatcgagggcacctgtgtgtgcaagctgccctaccagtgccccaagaatggaacagctgtgtgtgccaccaacagaagaagcttccccacctactgccagcagaagagcctggagtgcctgcaccctggcaccaagttcctgaacaacggcacctgcacagctgagggcaagttctctgtgtccctgaagcacggcaacacagattctgagggcatcgtggaggtgaagctggtggaccaggacaagaccatgttcatctgcaagagctcctggagcatgagggaggccaacgtggcctgcctggacctgggcttccagcagggcgctgacacccagaggcgcttcaagctgagtgacctgagcatcaacagcacagagtgcctgcacgtgcactgccggggcctggagaccagcctggctgaatgtaccttcaccaagaggaggaccatgggctaccaggactttgctgatgtggtgtgctacacccagaaggctgacagccccatggatgacttcttccagtgtgtgaatggcaagtacatcagccagatgaaggcctgtgatggcatcaatgactgtggggaccagagtgatgagctgtgctgcaaggcctgccagggcaagggcttccactgcaagagcggcgtgtgcatccccagccagtaccagtgcaatggagaggtggactgcatcaccggggaggatgaggtgggctgtgccgaggagacagagatcctgacagctgacatggatgctgagcggcggcgcatcaagagcctgctgcccaagctgagctgtggggtgaagaacaggatgcacatccggaggaagagaattgtgggcggcaagagggcccagctgggggacctgccctggcaggtggccatcaaggatgccagcggcatcacctgtggcggcatctacatcggcggctgctggatcctgacagctgcccactgcctgcgggccagcaagacccaccgctaccagatctggaccaccgtggtggactggatccacccagacctgaagagaattgtcatcgagtatgtggaccgcatcatcttccacgagaactacaatgccggcacctaccagaatgacatcgccctgattgagatgaagaaggatggcaacaagaaggactgtgagctgcccaggagcatcccagcctgtgtgccctggagcccctacctgttccagcccaatgacacctgcatcgtgtctggctggggccgggagaaggacaatgaaagagtcttcagcctgcagtggggcgaggtgaagctgatcagcaactgcagcaagttctacggcaaccgcttctatgagaaggagatggagtgtgccggcacctatgatggcagcattgatgcctgcaagggggacagcggcggccccctggtgtgcatggatgccaacaacgtgacctacgtgtggggcgtggtgtcctggggcgagaactgtgggaagccagagttccctggggtgtacaccaaggtggccaactactttgactggatctcctaccacgtgggccggcccttcatcagccagtacaacgtgtag

SEQ ID NO: 148332 - DNA, 966 bp, synthetic construct
  misc_feature 1..966: note = Description of Artificial Sequence: Synthetic coding sequence
  source 1..966: mol_type = other DNA
caggtgacctacaccagccaggaggacctggtggagaagaagtgcctggccaagaagtacacccacctgagctgtgacaaggtgttctgccagccctggcagcgctgcatcgagggcacctgtgtgtgcaagctgccctaccagtgccccaagaatggaacagctgtgtgtgccaccaacagaagaagcttccccacctactgccagcagaagagcctggagtgcctgcaccctggcaccaagttcctgaacaacggcacctgcacagctgagggcaagttctctgtgtccctgaagcacggcaacacagattctgagggcatcgtggaggtgaagctggtggaccaggacaagaccatgttcatctgcaagagctcctggagcatgagggaggccaacgtggcctgcctggacctgggcttccagcagggcgctgacacccagaggcgcttcaagctgagtgacctgagcatcaacagcacagagtgcctgcacgtgcactgccggggcctggagaccagcctggctgaatgtaccttcaccaagaggaggaccatgggctaccaggactttgctgatgtggtgtgctacacccagaaggctgacagccccatggatgacttcttccagtgtgtgaatggcaagtacatcagccagatgaaggcctgtgatggcatcaatgactgtggggaccagagtgatgagctgtgctgcaaggcctgccagggcaagggcttccactgcaagagcggcgtgtgcatccccagccagtaccagtgcaatggagaggtggactgcatcaccggggaggatgaggtgggctgtgccgcctttgctgagctgtgcatcgaggagacagagatcctgacagctgacatggatgctgagcggcggcgcatcaagagcctgctgcccaagctgagctgtggggtgaagaacaggatgcacatccggaggaagaggtag

SEQ ID NO: 148333 - DNA, 1134 bp, synthetic construct
  misc_feature 1..1134: note = Description of Artificial Sequence: Synthetic coding sequence
  source 1..1134: mol_type = other DNA
atgaagctgctgcacgtgttcctgctcttcctgtgcttccacctgcgcttctgcaaggtgacctacaccagccaggaggacctggtggagaagaagtgcctggccaagaagtacacccacctgagctgtgacaaggtgttctgccagccctggcagcgctgcatcgagggcacctgtgtgtgcaagctgccctaccagtgccccaagaatggaacagctgtgtgtgccaccaacagaagaagcttccccacctactgccagcagaagagcctggagtgcctgcaccctggcaccaagttcctgaacaacggcacctgcacagctgagggcaagttctctgtgtccctgaagcacggcaacacagattctgagggcatcgtggaggtgaagctggtggaccaggacaagaccatgttcatctgcaagagctcctggagcatgagggaggccaacgtggcctgcctggacctgggcttccagcagggcgctgacacccagaggcgcttcaagctgagtgacctgagcatcaacagcacagagtgcctgcacgtgcactgccggggcctggagaccagcctggctgaatgtaccttcaccaagaggaggaccatgggctaccaggactttgctgatgtggtgtgctacacccagaaggctgacagccccatggatgacttcttccagtgtgtgaatggcaagtacatcagccagatgaaggcctgtgatggcatcaatgactgtggggaccagagtgatgagctgtgctgcaaggcctgccagggcaagggcttccactgcaagagcggcgtgtgcatccccagccagtaccagtgcaatggagaggtggactgcatcaccggggaggatgaggtgggctgtgccggctttgcctctgtgacccaggaggagacagagatcctgacagctgacatggatgctgagcggcggcgcatcaagagcctgctgcccaagctgagctgtggggtgaagaacaggatgcacatccggaggaagagaattgtgggcggcaagagggcccagctgggcaagatgaagcagatcagcctggacatcttcaagggcctgcaccgggtgtatgccatcctggagttctgctgcatcatcctgaagtag

SEQ ID NO: 148334 - DNA, 405 bp, synthetic construct
  misc_feature 1..405: note = Description of Artificial Sequence: Synthetic coding sequence
  source 1..405: mol_type = other DNA
atggagtttgtgatgaagcaggccctgggcggggccaccaaggacatgggcaagatgctgggcggagatgaggagaaggaccctgatgctgccaagaaggaggaggagcggcaggaggccctgcggcaggccgaggaggagaggaaggccaagtatgccaagatggaggccgagcgggaggccgtgcggcagggcatccgggacaagtatggcatcaagaagaaggaggagcgggaggccgaggcccaggccgccatggaggccaacagcgagggcagcctgacccggcccaagaaggccatccccccaggctgtggagatgaggtggaggaggaggatgagagcatcctggacaccgtcatcaagtacctgcccggccccctgcaggacatgctgaagaagtag

SEQ ID NO: 148335 - DNA, 405 bp, synthetic construct
  misc_feature 1..405: note = Description of Artificial Sequence: Synthetic coding sequence
  source 1..405: mol_type = other DNA
atggactttgtgatgaagcaggccctgggcggggccaccaaggacatgggcaagatgctgggcggggaggaggagaaggaccctgatgcccagaagaaggaggaggagcggcaggaggccctgcggcagcaggaggaggagaggaaggccaagcacgccaggatggaggccgagcgggagaaggtgcggcagcagatccgggacaagtatggcctgaagaagaaggaggagaaggaggccgaggagaaggccgccctggagcagccctgtgagggcagcctgacccggcccaagaaggccatcccagctggctgtggagatgaggaggaggaggaggaggagagcatcctggacacagtgctgaagtacctgcccggccccctgcaggacatgttcaagaagtag

SEQ ID NO: 148336 - DNA, 405 bp, synthetic construct; identical to SEQ ID NO: 148335
  misc_feature 1..405: note = Description of Artificial Sequence: Synthetic coding sequence
  source 1..405: mol_type = other DNA

SEQ ID NO: 148337 - DNA, 555 bp, synthetic construct
  misc_feature 1..555: note = Description of Artificial Sequence: Synthetic coding sequence
  source 1..555: mol_type = other DNA
atggactttgtgatgaagcaggccctgggcggggccaccaaggacatgggcaagatgctgggcggggaggaggagaaggaccctgatgcccagaagaaggaggaggagcggcaggaggccctgcggcagcaggaggaggagaggaaggccaagcacgccaggatggaggccgagcgggagaaggtgcggcagcagatccgggacaagtatggcctgaagaagaaggaggagaaggaggccgaggagaaggccgccctgcggggccggggcggcggcggccgcggggagcaccctggccacggggcccagatcccagcccgggctgctgctggccacgtgcaggaggtgacccggcccccagccccagcctacagcacctgctactacttcttcctggtgctgtccttcctgttcatccggctgagcctgaacagcgagggggagaacctgtcctggcccctgcccctcttccctggccagggcctgctgcccctgagcagccccagccacctgcccagcagccagggcatccacctgcaccccacccccaagtag

SEQ ID NO: 148338 - DNA, 234 bp, synthetic construct
  misc_feature 1..234: note = Description of Artificial Sequence: Synthetic coding sequence
  source 1..234: mol_type = other DNA
atggactttgtgatgaagcaggccctgggcggggccaccaaggacatgggcaagatgctgggcggggaggaggagaaggaccctgatgcccagaagaaggaggaggagcggcaggaggccctgcggcagcaggaggaggagaggaaggccaagcacgccaggatggaggccgagcgggagaaggtgcggcagcagatccgggacaagtatggcctgaagaagaaggaggagtag

SEQ ID NO: 148339 - DNA, 336 bp, synthetic construct
  misc_feature 1..336: note = Description of Artificial Sequence: Synthetic coding sequence
  source 1..336: mol_type = other DNA
atggactttgtgatgaagcaggccctgggcggggccaccaaggacatgggcaagatgctgggcggggaggaggagaaggaccctgatgcccagaagaaggaggaggagcggcaggaggccctgcggcagcaggaggaggagaggaaggccaagcacgccaggatggaggccgagcgggagaaggtgcggcagcagatccgggacaagtatggcctgaagaagaaggaggagaaggaggccgaggagaaggccgccctggagcagccctgtgagggcagcctgacccggcccaagaaggccatcccagctggctgtggagatgaggaggaggagtag

SEQ ID NO: 148340 - DNA, 360 bp, synthetic construct
  misc_feature 1..360: note = Description of Artificial Sequence: Synthetic coding sequence
  source 1..360: mol_type = other DNA
atggactttgtgatgaagcaggccctgggcggggccaccaaggacatgggcaagatgctgggcggggaggaggagaaggaccctgatgcccagaagaaggaggaggagcggcaggaggccctgcggcagcaggaggaggagaggaaggccaagcacgccaggatggaggccgagcgggagaaggtgcggcagcagatccgggacaagtatggcctgaagaagaaggaggagaaggaggccgaggagaaggccgccctggagcagccctgtgagggcagcctgacccggcccaagaaggccatcccagctggctgtggagatgaggaggaggaggaggaggagagcatcctggacacctag

SEQ ID NO: 148341 - DNA, 114 bp, synthetic construct
  misc_feature 1..114: note = Description of Artificial Sequence: Synthetic coding sequence
  source 1..114: mol_type = other DNA
atggactttgtgatgaagcaggccctgggcggggccaccaaggacatgggcaagatgctgggcggggaggaggagaaggaccctgatgcccagaagaaggaggaggagaggtag

SEQ ID NO: 148342 - DNA, 405 bp, synthetic construct; identical to SEQ ID NO: 148335
  misc_feature 1..405: note = Description of Artificial Sequence: Synthetic coding sequence
  source 1..405: mol_type = other DNA

SEQ ID NO: 148343 - DNA, 21 bp, synthetic construct
  misc_feature 1..21: note = Description of Artificial Sequence: Synthetic coding sequence
  source 1..21: mol_type = other DNA
atggactttgtgatgaagtag

SEQ ID NO: 148344 - DNA, 2943 bp, synthetic construct
  misc_feature 1..2943: note = Description of Artificial Sequence: Synthetic coding sequence
  source 1..2943: mol_type = other DNA
atggccacagctgccaccagccctgccctgaagaggctggacctgcgggaccctgctgccctgtttgagacccatggagctgaggagatccggggcctggagcggcaggtgcgggcagaaattgagcacaagaaggaggagctgcggcagatggtgggggagcgctacagagacctgattgaggccgctgacaccatcggccagatgaggcgctgtgctgtgggcctggtggatgctgtgaaggccacagaccagtactgtgcccggctgcggcaggccggcagcgctgccccccggcccccccgggcccagcagccccagcagcccagccaggagaagttctacagcatggccgcccagatcaagctgctgctggagatccctgagaagatctggagctccatggaggccagccagtgcctgcacgccacccagctgtacctgctgtgctgccacctgcacagcctgctgcagctggacagcagcagcagccgctacagccctgtgctgagccgcttccccatcctgatccggcaggtggccgccgccagccacttccgcagcaccatcctgcacgagagcaagatgctgctgaagtgccagggcgtgtctgaccaggccgtggccgaggccctgtgcagcatcatgctgctggaggagagcagcccccggcaggccctgacagacttcctgctggccaggaaggccaccatccagaagctgctgaaccagccccaccacggggccggcatcaaggcccagatctgcagcctggtggagctgctggccaccaccctgaagcaggcccacgccctcttctacaccctgcctgagggcctgctgcctgaccctgccctgccctgtggcctgctcttcagcaccctggagaccatcaccggccagcaccctgctgggaagggcaccggggtgctgcaggaggagatgaagctgtgctcctggttcaagcacctgcctgccagcatcgtggagttccagcccaccctgcggaccctggcccaccccatcagccaggagtacctgaaggacaccctgcagaagtggatccacatgtgcaatgaagacatcaagaatggcatcaccaacctgctgatgtatgtgaagtccatgaagggcctggccggcatcagagatgccatgtgggagctgctgaccaatgaaagcaccaaccacagctgggatgtgctgtgccggcggctgctggagaagcccctgctcttctgggaggacatgatgcagcagctgttcctggaccggctgcagaccctgaccaaggagggctttgacagcatcagcagcagcagcaaggagctgctggtgtctgccctgcaggagctggagagcagcaccagcaacagccccagcaacaagcacatccactttgagtacaacatgagcctcttcctgtggagcgagagccccaatgacctgcccagtgatgctgcctgggtgtctgtggccaacagaggccagtttgccagcagcggcctgtccatgaaggcccaggccatcagcccctgtgtgcagaacttctgcagcgccctggacagcaagctgaaggtgaagctggatgacctgctggcctacctgcccagtgatgacagcagcctgcccaaggatgtgagccccacccaggccaagagcagcgcctttgacagatatgcagatgctggcaccgtgcaggagatgctgcggacccagagcgtggcctgcatcaagcacatcgtggactgcatccgggcagagctgcagagcattgaggagggcgtgcagggccagcaggatgccctgaacagcgccaagctgcacagcgtgctcttcatggcccggctgtgccagagcctgggggagctgtgcccccacctgaagcagtgcatcctgggcaagtctgagagcagcgagaagccagcccgggagttccgggccctgaggaagcagggcaaggtgaagacccaggagatcatccccacccaggccaagtggcaggaggtgaaggaggtgctgctgcagcagagcgtgatgggctaccaggtgtggagcagcgctgtggtgaaggtgctgattcatggcttcacccagagcctgctgctggatgatgctggctctgtgctggccacagccacctcctgggatgagctggagatccaggaggaggccgagagcggcagctctgtgaccagcaagatccggctgcctgcccagcccagctggtacgtgcagagcttcctgttcagcctgtgccaggagatcaacagagtgggcggccacgccctgcccaaggtgaccctgcaggagatgctgaagagctgcatggtgcaggtggtggccgcctatgagaagctgtctgaggagaagcagatcaagaaggagggcgccttccctgtgacccagaacagagccctgcagctgctgtatgacctgcgctacctgaacatcgtgctgacagccaagggagatgaggtgaagagcggccgcagcaagccagacagccgcatcgagaaggtgacagaccacctggaggccctgattgacccctttgacctggatgtgttcaccccccacctgaacagcaacctgcaccggctggtgcagaggacctctgtgctgtttggcctggtgactggaacagagaaccagctggcccccaggagcagcaccttcaacagccaggagccccacaacatcctgcccctggccagcagccagatccgcttcggcctgctgcccctgtccatgaccagcaccaggaaggccaagagcaccaggaacatcgagaccaaggcccaggtggtgcccccagcccggagcacagctggggaccccaccgtgcccggcagcctcttccggcagctggtgtctgaggaggacaacaccagcgcccccagcctcttcaagctgggctggctgagctccatgaccaagtag

SEQ ID NO: 148345 - DNA, 2823 bp, synthetic construct
  misc_feature 1..2823: note = Description of Artificial Sequence: Synthetic coding sequence
  source 1..2823: mol_type = other DNA
atggccacagctgccaccagccctgccctgaagaggctggacctgcgggaccctgctgccctgtttgagacccatggagctgaggagatccggggcctggagcggcaggtgcgggcagaaattgagcacaagaaggaggagctgcggcagatggtgggggagcgctacagagacctgattgaggccgctgacaccatcggccagatgaggcgctgtgctgtgggcctggtggatgctgtgaaggccacagaccagtactgtgcccggctgcggcaggccggcagcgctgccccccggcccccccgggcccagcagccccagcagcccagccaggagaagttctacagcatggccgcccagatcaagctgctgctggagatccctgagaagatctggagctccatggaggccagccagtgcctgcacgccacccagctgtacctgctgtgctgccacctgcacagcctgctgcagctggacagcagcagcagccgctacagccctgtgctgagccgcttccccatcctgatccggcaggtggccgccgccagccacttccgcagcaccatcctgcacgagagcaagatgctgctgaagtgccagggcgtgtctgaccaggccgtggccgaggccctgtgcagcatcatgctgctggaggagagcagcccccggcaggccctgacagacttcctgctggccaggaaggccaccatccagaagctgctgaaccagccccaccacggggccggcatcaaggcccagatctgcagcctggtggagctgctggccaccaccctgaagcaggcccacgccctcttctacaccctgcctgagggcctgctgcctgaccctgccctgccctgtggcctgctcttcagcaccctggagaccatcaccggccagcaccctgctgggaagggcaccggggtgctgcaggaggagatgaagctgtgctcctggttcaagcacctgcctgccagcatcgtggagttccagcccaccctgcggaccctggcccaccccatcagccaggagtacctgaaggacaccctgcagaagtggatccacatgtgcaatgaagacatcaagaatggcatcaccaacctgctgatgtatgtgaagtccatgaagggcctggccggcatcagagatgccatgtgggagctgctgaccaatgaaagcaccaaccacagctgggatgtgctgtgccggcggctgctggagaagcccctgctcttctgggaggacatgatgcagcagctgttcctggaccggctgcagaccctgaccaaggagggctttgacagcatcagcagcagcagcaaggagctgctggtgtctgccctgcaggagctggagagcagcaccagcaacagccccagcaacaagcacatccactttgagtacaacatgagcctcttcctgtggagcgagagccccaatgacctgcccagtgatgctgcctgggtgtctgtggccaacagaggccagtttgccagcagcggcctgtccatgaaggcccaggccatcagcccctgtgtgcagaacttctgcagcgccctggacagcaagctgaaggtgaagctggatgacctgctggcctacctgcccagtgatgacagcagcctgcccaaggatgtgagccccacccaggccaagagcagcgcctttgacagatatgcagatgctggcaccgtgcaggagatgctgcggacccagagcgtggcctgcatcaagcacatcgtggactgcatccgggcagagctgcagagcattgaggagggcgtgcagggccagcaggatgccctgaacagcgccaagctgcacagcgtgctcttcatggcccggctgtgccagagcctgggggagctgtgcccccacctgaagcagtgcatcctgggcaagtctgagagcagcgagaagccagcccgggagttccgggccctgaggaagcagggcaaggtgaagacccaggagatcatccccacccaggccaagtggcaggaggtgaaggaggtgctgctgcagcagagcgtgatgggctaccaggtgtggagcagcgctgtggtgaaggtgctgattcatggcttcacccagagcctgctgctggatgatgctggctctgtgctggccacagccacctcctgggatgagctggagatccaggaggaggccgagagcggcagctctgtgaccagcaagatccggctgcctgcccagcccagctggtacgtgcagagcttcctgttcagcctgtgccaggagatcaacagagtgggcggccacgccctgcccaaggtgaccctgcaggagatgctgaagagctgcatggtgcaggtggtggccgcctatgagaagctgtctgaggagaagcagatcaagaaggagggcgccttccctgtgacccagaacagagccctgcagctgctgtatgacctgcgctacctgaacatcgtgctgacagccaagggagatgaggtgaagagcggccgcagcaagccagacagccgcatcgagaaggtgacagaccacctggaggccctgattgacccctttgacctggatgtgttcaccccccacctgaacagcaacctgcaccggctggtgcagaggacctctgtgctgtttggcctggtgactggaacagagaaccagctggcccccaggagcagcaccttcaacagccaggagccccacaacatcctgcccctggccagcagccagatccgcttcggcctgctgcccctgtccatgaccagcaccaggaaggccaagagcaccaggaacatcgagaccaaggcccagtatgatgccaactgctag

SEQ ID NO: 148346 - DNA, 2214 bp, synthetic construct
  misc_feature 1..2214: note = Description of Artificial Sequence: Synthetic coding sequence
  source 1..2214: mol_type = other DNA
atggagaagagcaggatgaacctgcccaagggccctgacaccctgtgctttgacaaggatgagttcatgaaggaggactttgatgtggaccactttgtgtctgactgcaggaagagggtgcagctggaggagctgagagatgacctggagctgtactacaagctgctgaagacagccatggtggagctgatcaacaaggactatgctgactttgtgaacctgagcaccaacctggtgggcatggacaaggccctgaaccagctgtctgtgcccctgggccagctgcgggaggaggtgctgagcctgcggagctctgtgtctgagggcatccgggctgtggatgagaggatgagcaagcaggaggacatcaggaagaagaagatgtgtgtgctgcggctcatccaggtgatccgctctgtggagaagattgagaagatcctgaacagccagagcagcaaggagaccagcgccctggaggccagcagccccctgctgaccggccagatcctggagagaattgccacagagttcaaccagctgcagttccacgctgtgcagagcaagggcatgcccctgctggacaaggtgcggcccagaattgctggcatcacagccatgctgcagcagagcctggagggcctgctgctggagggcctgcagaccagtgatgtggacatcatccgccactgcctgcggacctacgccaccatcgacaagaccagagatgctgaggccctggtgggccaggtgctggtgaagccctacattgatgaagtcatcatcgagcagtttgtggagagccaccccaacggcctgcaggtgatgtacaacaagctgctggagtttgtgccccaccactgccgcctgctgcgggaggtgactggaggagccatcagcagcgagaagggcaacacagtgcccggctatgacttcctggtgaacagcgtgtggccccagatcgtgcagggcctggaggagaagctgcccagcctcttcaaccctggcaacccagatgccttccacgagaagtacaccatctccatggactttgtgcggcggctggagcggcagtgtggcagccaggcctctgtgaagaggctgcgggcccacccagcctaccacagcttcaacaagaagtggaacctgcctgtgtacttccagatccgcttccgggagattgctggcagcctggaggccgccctgacagatgtgctggaggatgccccagctgagagcccctactgcctgctggccagccacaggacctggagcagcctgcggcgctgctggagcgatgagatgttcctgcccctgctggtgcaccggctgtggaggctgaccctgcagatcctggcccgctacagcgtgtttgtgaatgagctgagcctgcggcccatcagcaatgaaagccccaaggagatcaagaagcccctggtgacaggcagcaaggagcccagcatcacccagggcaacacagaggaccagggcagcggccccagcgagaccaagcctgtggtgtccatcagcaggacccagctggtgtatgtggtggccgacctggacaagctgcaggagcagctgcctgagctgctggagatcatcaagcccaagctggagatgattggcttcaagaacttcagcagcatcagcgccctggaggacagccagagcagcttcagcgcctgtgtgcccagcctgagcagcaagatcatccaggacctgagtgacagctgcttcggcttcctgaagagcgccctggaggtgccccggctgtacagaaggaccaacaaggaggtgcccaccacagccagcagctatgtggacagcgccctgaagcccctcttccagctgcagagcggccacaaggacaagctgaagcaggccatcatccagcagtggctggagggcaccctgtctgagagcacccacaagtactatgagaccgtgtctgatgtgctgaacagcgtgaagaagatggaggagagcctgaagaggctgaagcaggccaggaagaccaccccagccaaccctgtgggccccagcggcggcatgtctgatgatgacaagatccggctgcagctggccctggatgtggagtacctgggggagcagatccagaagctgggcctgcaggccagtgacatcaagagcttcagcgccctggccgagctggtggccgccgccaaggaccaggccacagctgagcagccctag

SEQ ID NO: 148347 - DNA, 2217 bp, synthetic construct
  misc_feature 1..2217: note = Description of Artificial Sequence: Synthetic coding sequence
  source 1..2217: mol_type = other DNA
atggagaagagcaggatgaacctgcccaagggccctgacaccctgtgctttgacaaggatgagttcatgaaggaggactttgatgtggaccactttgtgtctgactgcaggaagagggtgcagctggaggagctgagagatgacctggagctgtactacaagctgctgaagacagccatggtggagctgatcaacaaggactatgctgactttgtgaacctgagcaccaacctggtgggcatggacaaggccctgaaccagctgtctgtgcccctgggccagctgcgggaggaggtgctgagcctgcggagctctgtgtctgagggcatccgggctgtggatgagaggatgagcaagcaggaggacatcaggaagaagaagatgtgtgtgctgcggctcatccaggtgatccgctctgtggagaagattgagaagatcctgaacagccagagcagcaaggagaccagcgccctggaggccagcagccccctgctgaccggccagatcctggagagaattgccacagagttcaaccagctgcagttccacgctgtgcagagcaagggcatgcccctgctggacaaggtgcggcccagaattgctggcatcacagccatgctgcagcagagcctggagggcctgctgctggagggcctgcagaccagtgatgtggacatcatccgccactgcctgcggacctacgccaccatcgacaagaccagagatgctgaggccctggtgggccaggtgctggtgaagccctacattgatgaagtcatcatcgagcagtttgtggagagccaccccaacggcctgcaggtgatgtacaacaagctgctggagtttgtgccccaccactgccgcctgctgcgggaggtgactggaggagccatcagcagcgagaagggcaacacagtgcccggctatgacttcctggtgaacagcgtgtggccccagatcgtgcagggcctggaggagaagctgcccagcctcttcaaccctggcaacccagatgccttccacgagaagtacaccatctccatggactttgtgcggcggctggagcggcagtgtggcagccaggcctctgtgaagaggctgcgggcccacccagcctaccacagcttcaacaagaagtggaacctgcctgtgtacttccagatccgcttccgggagattgctggcagcctggaggccgccctgacagatgtgctggaggatgccccagctgagagcccctactgcctgctggccagccacaggacctggagcagcctgcggcgctgctggagcgatgagatgttcctgcccctgctggtgcaccggctgtggaggctgaccctgcagatcctggcccgctacagcgtgtttgtgaatgagctgagcctgcggcccatcagcaatgaaagccccaaggagatcaagaagcccctggtgacaggcagcaaggagcccagcatcacccagggcaacacagaggaccagggcagcggccccagcgagaccaagcctgtggtgtccatcagcaggacccagctggtgtatgtggtggccgacctggacaagctgcaggagcagctgcctgagctgctggagatcatcaagcccaagctggagatgattggcttcaagaacttcagcagcatctctgctgccctggaggacagccagagcagcttcagcgcctgtgtgcccagcctgagcagcaagatcatccaggacctgagtgacagctgcttcggcttcctgaagagcgccctggaggtgccccggctgtacagaaggaccaacaaggaggtgcccaccacagccagcagctatgtggacagcgccctgaagcccctcttccagctgcagagcggccacaaggacaagctgaagcaggccatcatccagcagtggctggagggcaccctgtctgagagcacccacaagtactatgaaacagtgtctgatgtgctgaacagcgtgaagaagatggaggagagcctgaagaggctgaagcaggccaggaagaccaccccagccaaccctgtgggccccagcggcggcatgtctgatgatgacaagatccggctgcagctggccctggatgtggagtacctgggggagcagatccagaagctgggcctgcaggccagtgacatcaagagcttcagcgccctggccgagctggtggccgccgccaaggaccaggccacagctgagcagccctag

SEQ ID NO: 148348 - DNA, 2040 bp, synthetic construct
  misc_feature 1..2040: note = Description of Artificial Sequence: Synthetic coding sequence
  source 1..2040: mol_type = other DNA
atggtggagctgatcaacaaggactatgctgactttgtgaacctgagcaccaacctggtgggcatggacaaggccctgaaccagctgtctgtgcccctgggccagctgcgggaggaggtgctgagcctgcggagctctgtgtctgagggcatccgggctgtggatgagaggatgagcaagcaggaggacatcaggaagaagaagatgtgtgtgctgcggctcatccaggtgatccgctctgtggagaagattgagaagatcctgaacagccagagcagcaaggagaccagcgccctggaggccagcagccccctgctgaccggccagatcctggagcgcatcgccacagagttcaaccagctgcagttccacgctgtgcagagcaagggcatgcccctgctggacaaggtgcggcccagaattgctggcatcacagccatgctgcagcagagcctggagggcctgctgctggagggcctgcagaccagtgatgtggacatcatccgccactgcctgcggacctacgccaccatcgacaagaccagagatgctgaggccctggtgggccaggtgctggtgaagccctacattgatgaggtgatcatcgagcagtttgtggagagccaccccaacggcctgcaggtgatgtacaacaagctgctggagtttgtgccccaccactgccgcctgctgcgggaggtgactggaggagccatcagcagcgagaagggcaacacagtgcccggctatgacttcctggtgaacagcgtgtggccccagatcgtgcagggcctggaggagaagctgcccagcctcttcaaccctggcaacccagatgccttccacgagaagtacaccatctccatggactttgtgcggcggctggagcggcagtgtggcagccaggcctctgtgaagaggctgcgggcccacccagcctaccacagcttcaacaagaagtggaacctgcctgtgtacttccagatccgcttccgggagattgctggcagcctggaggccgccctgacagatgtgctggaggatgccccagctgagagcccctactgcctgctggccagccacaggacctggagcagcctgcggcgctgctggagcgatgagatgttcctgcccctgctggtgcaccggctgtggaggctgaccctgcagatcctggcccgctacagcgtgtttgtgaatgagctgagcctgcggcccatcagcaatgaaagccccaaggagatcaagaagcccctggtgacaggcagcaaggagcccagcatcacccagggcaacacagaggaccagggcagcggccccagcgagaccaagcctgtggtgtccatcagcaggacccagctggtgtatgtggtggccgacctggacaagctgcaggagcagctgcctgagctgctggagatcatcaagcccaagctggagatgattggcttcaagaacttcagcagcatctctgctgccctggaggacagccagagcagcttcagcgcctgtgtgcccagcctgagcagcaagatcatccaggacctgagtgacagctgcttcggcttcctgaagagcgccctggaggtgccccggctgtacagaaggaccaacaaggaggtgcccaccacagccagcagctatgtggacagcgccctgaagcccctcttccagctgcagagcggccacaaggacaagctgaagcaggccatcatccagcagtggctggagggcaccctgtctgagagcacccacaagtactatgagaccgtgtctgatgtgctgaacagcgtgaagaagatggaggagagcctgaagaggctgaagcaggccaggaagaccaccccagccaaccctgtgggccccagcggcggcatgtctgatgatgacaagatccggctgcagctggccctggatgtggagtacctgggggagcagatccagaagctgggcctgcaggccagtgacatcaagagcttcagcgccctggccgagctggtggccgccgccaaggaccaggccacagctgagcagccctag

SEQ ID NO: 148349 - DNA, 1869 bp, synthetic construct
  misc_feature 1..1869: note = Description of Artificial Sequence: Synthetic coding sequence
  source 1..1869: mol_type = other DNA
atgagcaagcaggaggacatcaggaagaagaagatgtgtgtgctgcggctcatccaggtgatccgctctgtggagaagattgagaagatcctgaacagccagagcagcaaggagaccagcgccctggaggccagcagccccctgctgaccggccagatcctggagagaattgccacagagttcaaccagctgcagttccacgctgtgcagagcaagggcatgcccctgctggacaaggtgcggcccagaattgctggcatcacagccatgctgcagcagagcctggagggcctgctgctggagggcctgcagaccagtgatgtggacatcatccgccactgcctgcggacctacgccaccatcgacaagaccagagatgctgaggccctggtgggccaggtgctggtgaagccctacattgatgaagtcatcatcgagcagtttgtggagagccaccccaacggcctgcaggtgatgtacaacaagctgctggagtttgtgccccaccactgccgcctgctgcgggaggtgactggaggagccatcagcagcgagaagggcaacacagtgcccggctatgacttcctggtgaacagcgtgtggccccagatcgtgcagggcctggaggagaagctgcccagcctcttcaaccctggcaacccagatgccttccacgagaagtacaccatctccatggactttgtgcggcggctggagcggcagtgtggcagccaggcctctgtgaagaggctgcgggcccacccagcctaccacagcttcaacaagaagtggaacctgcctgtgtacttccagatccgcttccgggagattgctggcagcctggaggccgccctgacagatgtgctggaggatgccccagctgagagcccctactgcctgctggccagccacaggacctggagcagcctgcggcgctgctggagcgatgagatgttcctgcccctgctggtgcaccggctgtggaggctgaccctgcagatcctggcccgctacagcgtgtttgtgaatgagctgagcctgcggcccatcagcaatgaaagccccaaggagatcaagaagcccctggtgacaggcagcaaggagcccagcatcacccagggcaacacagaggaccagggcagcggccccagcgagaccaagcctgtggtgtccatcagcaggacccagctggtgtatgtggtggccgacctggacaagctgcaggagcagctgcctgagctgctggagatcatcaagcccaagctggagatgattggcttcaagaacttcagcagcatctctgctgccctggaggacagccagagcagcttcagcgcctgtgtgcccagcctgagcagcaagatcatccaggacctgagtgacagctgcttcggcttcctgaagagcgccctggaggtgccccggctgtacagaaggaccaacaaggaggtgcccaccacagccagcagctatgtggacagcgccctgaagcccctcttccagctgcagagcggccacaaggacaagctgaagcaggccatcatccagcagtggctggagggcaccctgtctgagagcacccacaagtactatgaaacagtgtctgatgtgctgaacagcgtgaagaagatggaggagagcctgaagaggctgaagcaggccaggaagaccaccccagccaaccctgtgggccccagcggcggcatgtctgatgatgacaagatccggctgcagctggccctggatgtggagtacctgggggagcagatccagaagctgggcctgcaggccagtgacatcaagagcttcagcgccctggccgagctggtggccgccgccaaggaccaggccacagctgagcagccctag

SEQ ID NO: 148350 - DNA, 1284 bp, synthetic construct
  misc_feature 1..1284: note = Description of Artificial Sequence: Synthetic coding sequence
  source 1..1284: mol_type = other DNA
atgggctttgccatggaggacacagaggacatcagccagaaccacttcggccacctgtgcatcttcaagtggggccactggaagaaggacctgaagtacaccatctccatggactttgtgcggcggctggagcggcagtgtggcagccaggcctctgtgaagaggctgcgggcccacccagcctaccacagcttcaacaagaagtggaacctgcctgtgtacttccagatccgcttccgggagattgctggcagcctggaggccgccctgacagatgtgctggaggatgccccagctgagagcccctactgcctgctggccagccacaggacctggagcagcctgcggcgctgctggagcgatgagatgttcctgcccctgctggtgcaccggctgtggaggctgaccctgcagatcctggcccgctacagcgtgtttgtgaatgagctgagcctgcggcccatcagcaatgaaagccccaaggagatcaagaagcccctggtgacaggcagcaaggagcccagcatcacccagggcaacacagaggaccagggcagcggccccagcgagaccaagcctgtggtgtccatcagcaggacccagctggtgtatgtggtggccgacctggacaagctgcaggagcagctgcctgagctgctggagatcatcaagcccaagctggagatgattggcttcaagaacttcagcagcatctctgctgccctggaggacagccagagcagcttcagcgcctgtgtgcccagcctgagcagcaagatcatccaggacctgagtgacagctgcttcggcttcctgaagagcgccctggaggtgccccggctgtacagaaggaccaacaaggaggtgcccaccacagccagcagctatgtggacagcgccctgaagcccctcttccagctgcagagcggccacaaggacaagctgaagcaggccatcatccagcagtggctggagggcaccctgtctgagagcacccacaagtactatgagaccgtgtctgatgtgctgaacagcgtgaagaagatggaggagagcctgaagaggctgaagcaggccaggaagaccaccccagccaaccctgtgggccccagcggcggcatgtctgatgatgacaagatccggctgcagctggccctggatgtggagtacctgggggagcagatccagaagctgggcctgcaggccagtgacatcaagagcttcagcgccctggccgagctggtggccgccgccaaggaccaggccacagctgagcagccctag

SEQ ID NO: 148351 - DNA, 2487 bp, synthetic construct
  misc_feature 1..2487: note = Description of Artificial Sequence: Synthetic coding sequence
  source 1..2487: mol_type = other DNA
atggccgaggccgccctgctgctgctgcctgaggccgctgctgagagagatgcccgggagaagctggccctgtgggacagaagaccagacaccacagcccccctgacagaccggcagacagacagcgtgctggagctgaaggctgctgctgagaacctgcctgtgcctgctgagctgcccatcgaggacctgtgcagcctgaccagccagagcctgcccatcgagctgacctctgtggtgcctgagagcacagaggacatcctgctgaagggcttcaccagcctgggcatggaggaggagcgcatcgagacagcccagcagttcttctcctggtttgccaagctgcagacccagatggaccaggatgagggcaccaagtaccggcagatgagggactacctgagcggcttccaggagcagtgtgatgccatcctgaatgatgtgaacagcgccctgcagcacctggagagcctgcagaagcagtacctgtttgtgagcaacaagacaggcaccctgcacgaggcctgtgagcagctgctgaaggagcagagcgagctggtggacctggccgagaacatccagcagaagctgagctacttcaatgagctggagaccatcaacaccaagctgaacagccccaccctgtctgtgaacagtgatggcttcatccccatgctggccaagctggatgactgcatcacctacatcagcagccaccccaacttcaaggactaccccatctacctgctgaagttcaagcagtgcctgagcaaggccctgcacctgatgaagacctacacagtgaacaccctgcagaccctgaccagccagctgctgaagagggaccccagctctgtgcccaatgctgacaatgccttcaccctcttctacgtgaagttccgggctgctgcccccaaggtgaggaccctgattgagcagatcgagctgcggtctgagaagatccctgagtaccagcagctgctgaatgacatccaccagtgctacctggaccagcgggagctgctgctgggccccagcatcgcctgcaccgtggccgagctgaccagccagaacaacagagaccactgtgccctggtgcgcagcggctgtgccttcatggtgcacgtgtgccaggatgagcaccagctgtacaatgagttcttcaccaagcccaccagcaagctggatgagctgctggagaagctgtgtgtgtccctgtatgatgtgttccggcccctcatcatccacgtgatccacctggagaccctgtctgagctgtgtggcatcctgaagaatgaggtgctggaggaccacgtgcagaacaatgctgagcagctgggcgcctttgctgctggggtgaagcagatgctggaggatgtgcaggagcggctggtgtaccgcacccacatctacatccagacagacatcaccggctacaagccagcccctggggacctggcctacccagacaagctggtgatgatggagcagatcgcccagagcctgaaggatgagcagaagaaggtgcccagcgaggccagcttcagtgatgtgcacctggaggagggggagagcaacagcctgaccaagagcggcagcacagagagcctgaacccccggccccagaccaccatcagccctgctgacctgcacggcatgtggtaccccaccgtgcggaggaccctggtgtgcctgagcaagctgtaccgctgcatcgacagagctgtgttccagggcctgagccaggaggccctgagcgcctgcatccagagcctgctgggcgccagcgagagcatcagcaagaacaagacccagattgatggccagctgttcctgatcaagcacctgctgatcctgcgggagcagatcgcccccttccacacagagttcaccatcaaggagatcagcctggacctgaagaagaccagagatgctgccttcaagatcctgaaccccatgacagtgccccgcttcttccggctgaacagcaacaatgccctgattgagttcctgctggagggcaccccagagatccgggagcactacctggacagcaagaaggatgtggacagacacctgaagagcgcctgtgagcagttcatccagcagcagaccaagctgtttgtggagcagctggaggagttcatgaccaaggtgtctgccctgaagaccatggccagccagggcggccccaagtacaccctgagccagcagccctgggcccagcctgccaaggtgaatgacctggccgccacagcctacaagaccatcaagaccaagctgcctgtgaccctgcgctccatgagcctgtacctgagcaacaaggacacagagttcatcctcttcaagcctgtgaggaacaacatccagcaggtgttccagaagttccacgccctgctgaaggaggagttctccccagaggacatccagatcatcgcctgccccagcatggagcagctgagcctgctgctgctggtgtccaagtag

SEQ ID NO: 148352 - DNA, 2370 bp, synthetic construct
  misc_feature 1..2370: note = Description of Artificial Sequence: Synthetic coding sequence
  source 1..2370: mol_type = other DNA
atgggcaccaagatggctgacctggacagcccccccaagctgtctggagtgcagcagcccagcgagggcgtgggcggcggccgctgcagcgagatctctgctgagctgatccgcagcctgacagagctgcaggagctggaggccgtgtatgaaaggctgtgtggggaggagaaggtggtggagcgggagctggatgccctgctggagcagcagaacaccatcgagagcaagatggtgaccctgcacaggatgggccccaacctgcagctgattgaaggagatgccaagcagctggccggcatgatcaccttcacctgcaacctggccgagaatgtgagcagcaaggtgcggcagctggacctggccaagaaccggctgtaccaggccatccagagagcagatgacatcctggacctgaagttctgcatggatggagtgcagacagccctgcggagtgaagattatgagcaggccgccgcccacacccaccgctacctgtgcctggacaagtctgtgattgagctgagccggcagggcaaggagggctccatgattgatgccaacctgaagctgctgcaggaggccgagcagaggctgaaggccatcgtggccgagaagtttgccatcgccaccaaggagggggacctgccccaggtggagcgcttcttcaagatcttccccctgctgggcctgcacgaggagggcctgaggaagttcagcgagtacctgtgcaagcaggtggccagcaaggccgaggagaacctgctgatggtgctgggcacagacatgtctgaccggcgggctgctgtgatctttgctgacaccctgaccctgctgtttgagggcatcgcccgcatcgtggagacccaccagcccatcgtggagacctactacggccctggccgcctgtacaccctcatcaagtacctgcaggtggagtgtgaccggcaggtggagaaggtggtggacaagttcatcaagcagagggactaccaccagcagttcagacatgtgcagaacaacctgatgaggaacagcaccacagagaagattgagccccgggagctggaccccatcctgacagaggtgaccctgatgaatgcccggtctgagctgtacctgcgcttcctgaagaagaggatcagcagtgactttgaggtgggggacagcatggccagcgaggaggtgaagcaggagcaccagaagtgcctggacaagctgctgaacaactgcctgctgagctgcaccatgcaggagctgattggcctgtatgtgaccatggaggagtacttcatgagggagaccgtgaacaaggctgtggccctggacacctatgagaagggccagctgaccagctccatggtggatgatgtgttctacatcgtgaagaagtgcatcggccgggccctgagcagcagcagcattgactgcctgtgtgccatgatcaacctggccaccacagagctggagagtgacttcagagatgtgctgtgcaacaagctgaggatgggcttccctgccaccaccttccaggacatccagaggggcgtgaccagcgctgtgaacatcatgcacagcagcctgcagcagggcaagtttgacaccaagggcatcgagagcacagatgaggccaagatgtccttcctggtgaccctgaacaacgtggaggtgtgcagcgagaacatcagcaccctgaagaagaccctggagagtgactgcaccaagctgttcagccagggcattggaggagagcaggcccaggccaagtttgacagctgcctgagtgacctggccgctgtgagcaacaagttccgggacctgctgcaggagggcctgacagagctgaacagcacagccatcaagccccaggtgcagccctggatcaacagcttcttctctgtgagccacaacatcgaggaggaggagttcaatgactatgaggccaatgacccctgggtgcagcagttcatcctgaacctggagcagcagatggccgagttcaaggccagcctgagccctgtgatctatgacagcctgaccggcctgatgaccagcctggtggccgtggagctggagaaggtggtgctgaagagcaccttcaaccggctgggcggcctgcagtttgacaaggagctgcggagcctcatcgcctacctgaccaccgtgaccacctggaccatccgggacaagtttgcccggctgagccagatggccaccatcctgaacctggagcgggtgacagagatcctggactactggggccccaacagcggccccctgacctggaggctgaccccagctgaggtgcggcaggtgctggccctgagaattgacttccgctctgaggacatcaagaggctgcggctgtag

SEQ ID NO: 148353 - DNA, 2295 bp, synthetic construct
  misc_feature 1..2295: note = Description of Artificial Sequence: Synthetic coding sequence
  source 1..2295: mol_type = other DNA
atggctgacctggacagcccccccaagctgtctggagtgcagcagcccagcgagggcgtgggcggcggccgctgcagcgagatctctgctgagctgatccgcagcctgacagagctgcaggagctggaggccgtgtatgaaaggctgtgtggggaggagaaggtggtggagcgggagctggatgccctgctggagcagcagaacaccatcgagagcaagatggtgaccctgcacaggatgggccccaacctgcagctgattgaaggagatgccaagcagctggccggcatgatcaccttcacctgcaacctggccgagaatgtgagcagcaaggtgcggcagctggacctggccaagaaccggctgtaccaggccatccagagagcagatgacatcctggacctgaagttctgcatggatggagtgcagacagccctgcggagtgaagattatgagcaggccgccgcccacacccaccgctacctgtgcctggacaagtctgtgattgagctgagccggcagggcaaggagggctccatgattgatgccaacctgaagctgctgcaggaggccgagcagaggctgaaggccatcgtggccgagaagtttgccatcgccaccaaggagggggacctgccccaggtggagcgcttcttcaagatcttccccctgctgggcctgcacgaggagggcctgaggaagttcagcgagtacctgtgcaagcaggtggccagcaaggccgaggagaacctgctgatggtgctgggcacagacatgtctgaccggcgggctgctgtgatctttgctgacaccctgaccctgctgtttgagggcatcgcccgcatcgtggagacccaccagcccatcgtggagacctactacggccctggccgcctgtacaccctcatcaagtacctgcaggtggagtgtgaccggcaggtggagaaggtggtggacaagttcatcaagcagagggactaccaccagcagttcagacatgtgcagaacaacctgatgaggaacagcaccacagagaagattgagccccgggagctggaccccatcctgacagaggtgaccctgatgaatgcccggtctgagctgtacctgcgcttcctgaagaagaggatcagcagtgactttgaggtgggggacagcatggccagcgaggaggtgaagcaggagcaccagaagtgcctggacaagctgctgaacaactgcctgctgagctgcaccatgcaggagctgattggcctgtatgtgaccatggaggagtacttcatgagggagaccgtgaacaaggctgtggccctggacacctatgagaagggccagctgaccagctccatggtggatgatgtgttctacatcgtgaagaagtgcatcggccgggccctgagcagcagcagcattgactgcctgtgtgccatgatcaacctggccaccacagagctggagagtgacttcagagatgtgctgtgcaacaagctgaggatgggcttccctgccaccaccttccaggacatccagaggggcgtgaccagcgctgtgaacatcatgcacagcagcctgcagcagggcaagtttgacaccaagggcatcgagagcacagatgaggccaagatgtccttcctgagtgactgcaccaagctgttcagccagggcatcggcggggagcaggcccaggccaagtttgacagctgcctgagtgacctggccgctgtgagcaacaagttccgggacctgctgcaggagggcctgacagagctgaacagcacagccatcaagccccaggtgcagccctggatcaacagcttcttctctgtgagccacaacatcgaggaggaggagttcaatgactatgaggccaatgacccctgggtgcagcagttcatcctgaacctggagcagcagatggccgagttcaaggccagcctgagccctgtgatctatgacagcctgaccggcctgatgaccagcctggtggccgtggagctggagaaggtggtgctgaagagcaccttcaaccggctgggcggcctgcagtttgacaaggagctgcggagcctgattgcctacctgaccaccgtgaccacctggaccatccgggacaagtttgcccggctgagccagatggccaccatcctgaacctggagcgggtgacagagatcctggactactggggccccaacagcggccccctgacctggaggctgaccccagctgaggtgcggcaggtgctggccctgagaattgacttccgctctgaggacatcaagaggctgcggctgtag

SEQ ID NO: 148354 - DNA, 1014 bp, synthetic construct
  misc_feature 1..1014: note = Description of Artificial Sequence: Synthetic coding sequence
  source 1..1014: mol_type = other DNA
atggctgacctggacagcccccccaagctgtctggagtgcagcagcccagcgagggcgtgggcggcggccgctgcagcgagatctctgctgagctgatccgcagcctgacagagctgcaggagctggaggccgtgtatgaaaggctgtgtggggaggagaaggtggtggagcgggagctggatgccctgctggagcagcagaacaccatcgagagcaagatggtgaccctgcacaggatgggccccaacctgcagctgattgaaggagatgccaagcagctggccggcatgatcaccttcacctgcaacctggccgagaatgtgagcagcaaggtgcggcagctggacctggccaagaaccggctgtaccaggccatccagagagcagatgacatcctggacctgaagttctgcatggatggagtgcagacagccctgcggagtgaagattatgagcaggccgccgcccacacccaccgctacctgtgcctggacaagtctgtgattgagctgagccggcagggcaaggagggctccatgattgatgccaacctgaagctgctgcaggaggccgagcagaggctgaaggccatcgtggccgagaagtttgccatcgccaccaaggagggggacctgccccaggtggagcgcttcttcaagatcttccccctgctgggcctgcacgaggagggcctgaggaagttcagcgagtacctgtgcaagcaggtggccagcaaggccgaggagaacctgctgatggtgctgggcacagacatgtctgaccggcgggctgctgtgatctttgctgacaccctgaccctgctgtttgagggcatcgcccgcatcgtggagacccaccagcccatcgtggagacctactacggccctggccgcctgtacaccctcatcaagtacctgcaggtggagtgtgaccggcaggtggagaaggtggtggacaagttcatcaagcagagggactaccaccagcagaactttgtgttctccttcttctag

SEQ ID NO: 148355 - DNA, 1344 bp, synthetic construct
  misc_feature 1..1344: note = Description of Artificial Sequence: Synthetic coding sequence
  source 1..1344: mol_type = other DNA
atgaggaacagcaccacagagaagattgagccccgggagctggaccccatcctgacagaggtgaccctgatgaatgcccggtctgagctgtacctgcgcttcctgaagaagaggatcagcagtgactttgaggtgggggacagcatggccagcgaggaggtgaagcaggagcaccagaagtgcctggacaagctgctgaacaactgcctgctgagctgcaccatgcaggagctgattggcctgtatgtgaccatggaggagtacttcatgagggagaccgtgaacaaggctgtggccctggacacctatgagaagggccagctgaccagctccatggtggatgatgtgttctacatcgtgaagaagtgcatcggccgggccctgagcagcagcagcattgactgcctgtgtgccatgatcaacctggccaccacagagctggagagtgacttcagagatgtgctgtgcaacaagctgaggatgggcttccctgccaccaccttccaggacatccagaggggcgtgaccagcgctgtgaacatcatgcacagcagcctgcagcagggcaagtttgacaccaagggcatcgagagcacagatgaggccaagatgtccttcctggtgaccctgaacaacgtggaggtgtgcagcgagaacatcagcaccctgaagaagaccctggagagtgactgcaccaagctgttcagccagggcattggaggagagcaggcccaggccaagtttgacagctgcctgagtgacctggccgctgtgagcaacaagttccgggacctgctgcaggagggcctgacagagctgaacagcacagccatcaagccccaggtgcagccctggatcaacagcttcttctctgtgagccacaacatcgaggaggaggagttcaatgactatgaggccaatgacccctgggtgcagcagttcatcctgaacctggagcagcagatggccgagttcaaggccagcctgagccctgtgatctatgacagcctgaccggcctgatgaccagcctggtggccgtggagctggagaaggtggtgctgaagagcaccttcaaccggctgggcggcctgcagtttgacaaggagctgcggagcctcatcgcctacctgaccaccgtgaccacctggaccatccgggacaagtttgcccggctgagccagatggccaccatcctgaacctggagcgggtgacagagatcctggactactggggccccaacagcggccccctgacctggaggctgaccccagctgaggtgcggcaggtgctggccctgagaattgacttccgctctgaggacatcaagaggctgcggctgtag

SEQ ID NO: 148356 - DNA, 2583 bp, synthetic construct
  misc_feature 1..2583: note = Description of Artificial Sequence: Synthetic coding sequence
  source 1..2583: mol_type = other DNA
atgggctgggtgggcggcagaagaagagattctgccagccccccaggccgcagccgctctgctgctgatgacatcaacccagccccagccaacatggagggcggcggcggctctgtggccgtggccggcctgggcgcccggggcagcggggctgctgctgccaccgtgcgggagctgctgcaggacggctgctacagcgacttcctgaatgaagattttgatgtgaagacctacaccagccagagcatccaccaggccgtgattgctgagcagctggccaagctggcccagggcatcagccagctggaccgggagctgcacctgcaggtggtggcccggcatgaggacctgctggcccaggccaccggcatcgagagcctggagggcgtgctgcagatgatgcagacccgcatcggggccctgcagggcgctgtggaccgcatcaaggccaagatcgtggagccctacaacaagatcgtggccaggacagcccagctggcccggctgcaggtggcctgtgacctgctgcggcgcatcatccgcatcctgaacctgagcaagaggctgcagggccagctgcagggcggcagccgggagatcaccaaggccgcccagagcctgaatgagctggactacctgagccagggcatcgacctgagcggcatcgaggtgattgaaaatgacctgctcttcatcgcccgggcccggctggaggtggagaaccaggccaagaggctgctggagcagggcctggagacccagaaccccacccaggtgggcacagccctgcaggtgttctacaacctgggcaccctgaaggacaccatcacctctgtggtggatggctactgtgccaccctggaggagaacatcaacagcgccctggacatcaaggtgctgacccagcccagccagagcgctgtgcggggcggccctggccgcagcaccatgcccaccccaggcaacacagctgccctgcgggccagcttctggaccaacatggagaagctgatggaccacatctatgctgtgtgtggccaggtgcagcacctgcagaaggtgctggccaagaagagggaccctgtgagccacatctgcttcatcgaggagatcgtgaaggatggccagcctgagatcttctacaccttctggaacagcgtgacccaggccctgagcagccagttccacatggccaccaacagctccatgttcctgaagcaggcctttgaaggagagtaccccaagctgctgcggctgtacaatgacctgtggaagaggctgcagcagtacagccagcacatccagggcaacttcaatgccagcggcaccacagacctgtatgtggacctgcagcacatggaggatgatgcccaggacatcttcatccccaagaagccagactatgaccctgagaaggccctgaaggacagcctgcagccctatgaagctgcctacctgagcaagagcctgagccggctgtttgaccccatcaacctggtgttccccccaggcggcaggaacccccccagcagtgatgagctggatggcatcatcaagaccatcgccagcgagctgaatgtggccgctgtggacaccaacctgaccctggccgtgtccaagaatgtggccaagaccatccagctgtacagcgtgaagtctgagcagctgctgagcacccagggagatgccagccaggtgattggccccctgacagagggccagaggagaaatgtggccgtggtgaacagcctgtacaagctgcaccagagcgtgaccaaggtggtgagcagccagagcagcttccccctggccgctgagcagaccatcatcagcgccctgaaggccatccacgccctgatggagaatgctgtgcagcccctgctgacctctgtgggagatgccatcgaggccatcatcatcaccatgcaccaggaggacttcagcggcagcctgagcagcagcggcaagccagatgtgccctgcagcctgtacatgaaggagctgcagggcttcatcgcccgggtgatgtctgactacttcaagcactttgagtgcctggactttgtgtttgacaacacagaggccatcgcccagagagctgtggagctgttcatcagacatgccagcctcatccggcccctgggggagggcggcaagatgaggctggccgctgactttgcccagatggagctggccgtgggccccttctgccggcgggtgtctgacctgggcaagagctacaggatgctgcggagcttccggcccctgctcttccaggccagcgagcacgtggccagcagccctgccctgggagatgtgatccccttcagcatcatcatccagttcctgttcacccgggccccagctgagctgaagagccccttccagagagctgagtggagccacacccgcttcagccagtggctggatgaccaccccagcgagaaggaccggctgctgctgatccggggggccctggaggcctacgtgcagagcgtgcgcagccgggagggcaaggagtttgcccctgtgtaccccatcatggtgcagctgctgcagaaggccatgtctgccctgcagtag

SEQ ID NO: 148357 - DNA, 2520 bp, synthetic construct
  misc_feature 1..2520: note = Description of Artificial Sequence: Synthetic coding sequence
  source 1..2520: mol_type = other DNA
atgggctgggtgggcggcagaagaagagattctgccagccccccaggccgcagccgctctgctgctgatgacatcaacccagccccagccaacatggagggcggcggcggctctgtggccgtggccggcctgggcgcccggggcagcggggctgctgctgccaccgtgcgggagctgctgcaggacggctgctacagcgacttcctgaatgaagattttgatgtgaagacctacaccagccagagcatccaccaggccgtgattgctgagcagctggccaagctggcccagggcatcagccagctggaccgggagctgcacctgcaggtggtggcccggcatgaggacctgctggcccaggccaccggcatcgagagcctggagggcgtgctgcagatgatgcagacccgcatcggggccctgcagggcgctgtggaccgcatcaaggccaagatcgtggagccctacaacaagatcgtggccaggacagcccagctggcccggctgcaggtggcctgtgacctgctgcggcgcatcatccgcatcctgaacctgagcaagaggctgcagggccagctgcagggcggcagccgggagatcaccaaggccgcccagagcctgaatgagctggactacctgagccagggcatcgacctgagcggcatcgaggtgattgaaaatgacctgctcttcatcgcccgggcccggctggaggtggagaaccaggccaagaggctgctggagcagggcctggagacccagaaccccacccaggtgggcacagccctgcaggtgttctacaacctgggcaccctgaaggacaccatcacctctgtggtggatggctactgtgccaccctggaggagaacatcaacagcgccctggacatcaaggtgctgacccagcccagccagagcgctgtgcggggcggccctggccgcagcaccatgcccaccccaggcaacacagctgccctgcgggccagcttctggaccaacatggagaagctgatggaccacatctatgctgtgtgtggccaggtgcagcacctgcagaaggtgctggccaagaagagggaccctgtgagccacatctgcttcatcgaggagatcgtgaaggatggccagcctgagatcttctacaccttctggaacagcgtgacccaggccctgagcagccagttccacatggccaccaacagctccatgttcctgaagcaggcctttgaaggagagtaccccaagctgctgcggctgtacaatgacctgtggaagaggctgcagcagtacagccagcacatccagggcaacttcaatgccagcggcaccacagacctgtatgtggacctgcagcacatggaggatgatgcccaggacatcttcatccccaagaagccagactatgaccctgagaaggccctgaaggacagcctgcagccctatgaagctgcctacctgagcaagagcctgagccggctgtttgaccccatcaacctggtgttccccccaggcggcaggaacccccccagcagtgatgagctggatggcatcatcaagaccatcgccagcgagctgaatgtggccgctgtggacaccaacctgaccctggccgtgtccaagaatgtggccaagaccatccagctgtacagcgtgaagtctgagcagctgctgagcacccagggagatgccagccaggtgattggccccctgacagagggccagaggagaaatgtggccgtggtgaacagcctgtacaagctgcaccagagcgtgaccaaggccatccacgccctgatggagaatgctgtgcagcccctgctgacctctgtgggagatgccatcgaggccatcatcatcaccatgcaccaggaggacttcagcggcagcctgagcagcagcggcaagccagatgtgccctgcagcctgtacatgaaggagctgcagggcttcatcgcccgggtgatgtctgactacttcaagcactttgaatgtctggactttgtgtttgacaacacagaggccatcgcccagagagctgtggagctgttcatcagacatgccagcctcatccggcccctgggggagggcggcaagatgaggctggccgctgactttgcccagatggagctggccgtgggccccttctgcagaagagtgtctgacctgggcaagagctacaggatgctgcgctccttccggcccctgctcttccaggccagcgagcacgtggccagcagccctgccctgggagatgtgatccccttcagcatcatcatccagttcctgttcacccgggccccagctgagctgaagagccccttccagagagctgagtggagccacacccgcttcagccagtggctggatgaccaccccagcgagaaggaccggctgctgctgatccggggggccctggaggcctacgtgcagagcgtgcgcagccgggagggcaaggagtttgcccctgtgtaccccatcatggtgcagctgctgcagaaggccatgtctgccctgcagtag

SEQ ID NO: 148358 - DNA, 2472 bp, synthetic construct
  misc_feature 1..2472: note = Description of Artificial Sequence: Synthetic coding sequence
  source 1..2472: mol_type = other DNA
atgggctgggtgggcggcagaagaagagattctgccagccccccaggccgcagccgctctgctgctgatgacatcaacccagccccagccaacatggagggcggcggcggctctgtggccgtggccggcctgggcgcccggggcagcggggctgctgctgccaccgtgcgggagctgctgcaggacggctgctacagcgacttcctgaatgaagattttgatgtgaagacctacaccagccagagcatccaccaggccgtgattgctgagcagctggccaagctggcccagggcatcagccagctggaccgggagctgcacctgcaggtggtggcccggcatgaggacctgctggcccaggccaccggcatcgagagcctggagggcgtgctgcagatgatgcagacccgcatcggggccctgcagggcgctgtggaccgcatcaaggccaagatcgtggagccctacaacaagatcgtggccaggacagcccagctggcccggctgcaggtggcctgtgacctgctgcggcgcatcatccgcatcctgaacctgagcaagaggctgcagggccagctgcagggcggcagccgggagatcaccaaggccgcccagagcctgaatgagctggactacctgagccagggcatcgacctgagcggcatcgaggtgattgaaaatgacctgctcttcatcgcccgggcccggctggaggtggagaaccaggccaagaggctgctggagcagggcctggagacccagaaccccacccaggtgggcacagccctgcaggtgttctacaacctgggcaccctgaaggacaccatcacctctgtggtggatggctactgtgccaccctggaggagaacatcaacagcgccctggacatcaaggtgctgacccagcccagccagagcgctgtgcggggcggccctggccgcagcaccatgcccaccccaggcaacacagctgccctgcgggccagcttctggaccaacatggagaagctgatggaccacatctatgctgtgtgtggccaggtgcagcacctgcagaaggtgctggccaagaagagggaccctgtgagccacatctgcttcatcgaggagatcgtgaaggatggccagcctgagatcttctacaccttctggaacagcgtgacccaggccctgagcagccagttccacatggccaccaacagctccatgttcctgaagcaggcctttgaaggagagtaccccaagctgctgcggctgtacaatgacctgtggaagaggctgcagcagtacagccagcacatccagggcaacttcaatgccagcggcaccacagacctgtatgtggacctgcagcacatggaggatgatgcccaggacatcttcatccccaagaagccagactatgaccctgagaaggccctgaaggacagcctgcagccctatgaagctgcctacctgagcaagagcctgagccggctgtttgaccccatcaacctggtgttccccccaggcggcaggaacccccccagcagtgatgagctggatggcatcatcaagaccatcgccagcgagctgaatgtggccgctgtggacaccaacctgaccctggccgtgtccaagaatgtggccaagaccatccagctgtacagcgtgaagtctgagcagctgctgagcacccagggagatgccagccaggtgattggccccctgacagagggccagaggagaaatgtggccgtggtgaacagcctgtacaagctgcaccagagcgtgaccaaggtggtgagcagccagagcagcttccccctggccgctgagcagaccatcatcagcgccctgaaggccatccacgccctgatggagaatgctgtgcagcccctgctgacctctgtgggagatgccatcgaggccatcatcatcaccatgcaccaggaggacttcagcggcagcctgagcagcagcggcaagccagatgtgccctgcagcctgtacatgaaggagctgcagggcttcatcgcccgggtgatgtctgactacttcaagcactttgagtgcctggactttgtgtttgacaacacagaggccatcgcccagagagctgtggagctgttcatcagacatgccagcctcatccggcccctgggggagggcggcaagatgaggctggccgctgactttgcccagatggagctggccgtgggccccttctgccggcgggtgtctgacctgggcaagagctacaggatgctgcggagcttccggcccctgctcttccaggccagcgagcacgtggccagcagccctgccctgggagatgtgatccccttcagcatcatcatccagttcctgttcacccgggccccagctgagctgaagagccccttccagagagctgagtggagccacacccgcttcagccagtggctggatgaccaccccagcgagaaggaccggctgctgctgatcagatag

SEQ ID NO: 148359 - DNA, 2067 bp, synthetic construct
  misc_feature 1..2067: note = Description of Artificial Sequence: Synthetic coding sequence
  source 1..2067: mol_type = other DNA
atgaggggccgctttgcccacgcccagtacagccgctgcctgcggggcccctgcctggccgaggtggccgccggcggcggcaccaggtctgccatggccgagggcagcggggaggtggtggccgtgtctgccactggagctgccaacggcctgaacaatggagctgggggcaccagcgccaccacctgcaaccccctgagcaggaagctgcacaagatcctggagacccggctggacaatgacaaggagatgctggaggccctgaaggccctgagcaccttctttgtggagaacagcctgcggaccaggaggaacctgcggggggacatcgagaggaagagcctggccatcaatgaggagtttgtgtccatcttcaaggaggtgaaggaggagctggagagcatcagtgaagatgtgcaggccatgagcaactgctgccaggacatgaccagccggctgcaggccgccaaggagcagacccaggacctgattgtgaagaccaccaagctgcagagcgagagccagaagctggagatccgggcccaggtggctgatgccttcctgagcaagttccagctgaccagtgatgagatgagcctgctgcggggcacccgggagggccccatcacagaggacttcttcaaggccctgggccgggtgaagcagatccacaatgatgtgaaggtgctgctgcggaccaaccagcagacagctggcctggagatcatggagcagatggccctgctgcaggagacagcctatgaaagactctaccgctgggcccagagcgagtgcaggaccctgacccaggagagctgtgatgtgtcccctgtgctgacccaggccatggaggccctgcaggacaggcctgtgctgtacaagtacaccctggatgaatttggaacagcccggcgcagcacagtggtgcggggcttcattgatgccctgacccggggcggccctgggggcaccccccggcccatcgagatgcacagccatgaccccctgcgctacgtgggggacatgctggcctggctgcaccaggccacagccagcgagaaggagcacctggaggccctgctgaagcacgtgaccacccagggcgtggaggagaacatccaggaggtggtgggccacatcacagaaggagtgtgccggcccctgaaggtgcgcatcgagcaggtgattgtggccgagcccggggctgtgctgctgtacaagatcagcaacctgctgaagttctaccaccacaccatcagcggcatcgtgggcaacagcgccacagccctgctgaccaccatcgaggagatgcacctgctgagcaagaagatcttcttcaacagcctgagcctgcacgccagcaagctgatggacaaggtggagctgcccccaccagacctgggccccagcagcgccctgaaccagaccctgatgctgctgcgggaggtgctggccagccatgacagctctgtggtgcccctggatgcccggcaggccgactttgtgcaggtgctgagctgtgtgctggaccccctgctgcagatgtgcaccgtgtctgccagcaacctgggcacagctgacatggccaccttcatggtgaacagcctgtacatgatgaagaccaccctggccctgtttgagttcacagaccggcggctggagatgctgcagttccagatcgaggcccacctggacaccctcatcaatgagcaggccagctatgtgctgaccagggtgggcctgagctacatctacaacacagtgcagcagcacaagccagagcagggcagcctggccaacatgcccaacctggacagcgtgaccctgaaggccgccatggtgcagtttgaccgctacctgagcgccccagacaacctgctgatcccccagctgaacttcctgctgagcgccaccgtgaaggagcagatcgtgaagcagagcacagagctggtgtgccgggcctatggagaggtgtatgctgctgtgatgaaccccatcaatgagtacaaggaccctgagaacatcctgcacaggagcccccagcaggtgcagaccctgctgtcctag

SEQ ID NO: 148360 - DNA, 1848 bp, synthetic construct
  misc_feature 1..1848: note = Description of Artificial Sequence: Synthetic coding sequence
  source 1..1848: mol_type = other DNA
atggccgagggcagcggggaggtggtggccgtgtctgccaccggggccgccaacggcctgaacaacggggccggcggcaccagcgccaccacctgcaaccccctgagcaggaagctgcacaagatcctggagacccggctggacaatgacaaggagatgctggaggccctgaaggccctgagcaccttctttgtggagaacagcctgcggaccaggaggaacctgcggggggacattgaaaggaagagcctggccatcaatgaggagtttgtgtccatcttcaaggaggtgaaggaggagctggagagcatcagtgaagatgtgcaggccatgagcaactgctgccaggacatgaccagccggctgcaggccgccaaggagcagacccaggacctgattgtgaagaccaccaagctgcagagcgagagccagaagctggagatccgggcccaggtggctgatgccttcctgagcaagttccagctgaccagtgatgagatgagcctgctgcggggcacccgggagggccccatcacagaggacttcttcaaggccctgggccgggtgaagcagatccacaatgatgtgaaggtgctgctgcggaccaaccagcagacagctggcctggagatcatggagcagatggccctgctgcaggagacagcctatgagcggctgtaccgctgggcccagagtgaatgtaggaccctgacccaggagagctgtgatgtgtcccctgtgctgacccaggccatggaggccctgcaggacaggcctgtgctgtacaagtacaccctggatgaatttggaacagcccggcgcagcacagtggtgcggggcttcattgatgccctgacccggggcggccctgggggcaccccccggcccatcgagatgcacagccatgaccccctgcgctacgtgggggacatgctggcctggctgcaccaggccacagccagcgagaaggagcacctggaggccctgctgaagcacgtgaccacccagggcgtggaggagaacatccaggaggtggtgggccacatcacagagggcgtgtgccggcccctgaaggtgagaattgagcaggtgattgtggccgagcctggagctgtgctgctgtacaagatcagcaacctgctgaagttctaccaccacaccatctctggaattgtgggcaacagcgccacagccctgctgaccaccatcgaggagatgcacctgctgagcaagaagatcttcttcaacagcctgagcctgcacgccagcaagctgatggacaaggtggagctgcccccaccagacctgggccccagcagcgccctgaaccagaccctgatgctgctgcgggaggtgctggccagccatgacagctctgtggtgcccctggatgcccggcaggccgactttgtgcaggtgctgagctgtgtgctggaccccctgctgcagatgtgcaccgtgtctgccagcaacctgggcacagctgacatggccaccttcatggtgaacagcctgtacatgatgaagaccaccctggccctgtttgagttcacagaccggcggctggagatgctgcagttccagatcgaggcccacctggacaccctcatcaatgagcaggccagctatgtgctgaccagggtgggcctgagctacatctacaacacagtgcagcagcacaagccagagcagggcagcctggccaacatgcccaacctggacagcgtgaccctgaaggccgccatggtgcagtttgaccgctacctgagcgccccagacaacctgctgatcccccagctgaacttcctgctgagcgccaccgtgaagaggcccccaaatggcccctag

SEQ ID NO: 148361 - DNA, 1974 bp, synthetic construct
  misc_feature 1..1974: note = Description of Artificial Sequence: Synthetic coding sequence
  source 1..1974: mol_type = other DNA
atggccgagggcagcggggaggtggtggccgtgtctgccaccggggccgccaacggcctgaacaacggggccggcggcaccagcgccaccacctgcaaccccctgagcaggaagctgcacaagatcctggagacccggctggacaatgacaaggagatgctggaggccctgaaggccctgagcaccttctttgtggagaacagcctgcggaccaggaggaacctgcggggggacattgaaaggaagagcctggccatcaatgaggagtttgtgtccatcttcaaggaggtgaaggaggagctggagagcatcagtgaagatgtgcaggccatgagcaactgctgccaggacatgaccagccggctgcaggccgccaaggagcagacccaggacctgattgtgaagaccaccaagctgcagagcgagagccagaagctggagatccgggcccaggtggctgatgccttcctgagcaagttccagctgaccagtgatgagatgagcctgctgcggggcacccgggagggccccatcacagaggacttcttcaaggccctgggccgggtgaagcagatccacaatgatgtgaaggtgctgctgcggaccaaccagcagacagctggcctggagatcatggagcagatggccctgctgcaggagacagcctatgagcggctgtaccgctgggcccagagtgaatgtaggaccctgacccaggagagctgtgatgtgtcccctgtgctgacccaggccatggaggccctgcaggacaggcctgtgctgtacaagtacaccctggatgaatttggaacagcccggcgcagcacagtggtgcggggcttcattgatgccctgacccggggcggccctgggggcaccccccggcccatcgagatgcacagccatgaccccctgcgctacgtgggggacatgctggcctggctgcaccaggccacagccagcgagaaggagcacctggaggccctgctgaagcacgtgaccacccagggcgtggaggagaacatccaggaggtggtgggccacatcacagagggcgtgtgccggcccctgaaggtgagaattgagcaggtgattgtggccgagcctggagctgtgctgctgtacaagatcagcaacctgctgaagttctaccaccacaccatctctggaattgtgggcaacagcgccacagccctgctgaccaccatcgaggagatgcacctgctgagcaagaagatcttcttcaacagcctgagcctgcacgccagcaagctgatggacaaggtggagctgcccccaccagacctgggccccagcagcgccctgaaccagaccctgatgctgctgcgggaggtgctggccagccatgacagctctgtggtgcccctggatgcccggcaggccgactttgtgcaggtgctgagctgtgtgctggaccccctgctgcagatgtgcaccgtgtctgccagcaacctgggcacagctgacatggccaccttcatggtgaacagcctgtacatgatgaagaccaccctggccctgtttgagttcacagaccggcggctggagatgctgcagttccagatcgaggcccacctggacaccctcatcaatgagcaggccagctatgtgctgaccagggtgggcctgagctacatctacaacacagtgcagcagcacaagccagagcagggcagcctggccaacatgcccaacctggacagcgtgaccctgaaggccgccatggtgcagtttgaccgctacctgagcgccccagacaacctgctgatcccccagctgaacttcctgctgagcgccaccgtgaaggagcagatcgtgaagcagagcacagagctggtgtgccgggcctacggggaggtgtatgctgctgtgatgaaccccatcaatgagtacaaggaccctgagaacatcctgcacaggagcccccagcaggtgcagaccctgctgtcctag

SEQ ID NO: 148362 - DNA, 2313 bp, synthetic construct
  misc_feature 1..2313: note = Description of Artificial Sequence: Synthetic coding sequence
  source 1..2313: mol_type = other DNA
atggacttcagcaagttcctggctgatgactttgatgtgaaggagtggatcaatgctgccttccgggccggcagcaaggaggccgccagcggcaaggcagatggccatgctgccaccctggtgatgaagctgcagctgttcatccaggaggtgaaccacgctgtggaggagaccagccaccaggccctgcagaacatgcccaaggtgctgagagatgtggaggccctgaagcaggaggccagcttcctgaaggagcagatgatcctggtgaaggaggacatcaagaagtttgagcaggacaccagccagagcatgcaggtgctggtggagattgaccaggtgaagagcaggatgcagctggccgctgagagcctgcaggaggccgacaagtggagcaccctgtctgctgacatcgaggagaccttcaagacccaggacattgctgtgatcagcgccaagctgaccggcatgcagaacagcctgatgatgctggtggacaccccagactacagcgagaagtgtgtgcacctggaggccctgaagaaccggctggaggccctggccagcccccagatcgtggccgccttcaccagccaggccgtggaccagagcaaggtgtttgtgaaggtgttcacagaaattgacaggatgccccagctgctggcctactactacaagtgccacaaggtgcagctgctggccgcctggcaggagctgtgccagagcgacctgagcctggaccggcagctgaccggcctgtatgatgccctgctgggcgcctggcacacccagatccagtgggccacccaggtgttccagaagccccatgaggtggtgatggtgctgctgatccagaccctgggcgccctgatgcccagcctgcccagctgcctgagcaatggagtggagagagctggccctgagcaggagctgacccggctgctggagttctatgatgccacagcccactttgccaagggcctggagatggccctgctgccccacctgcacgagcacaacctggtgaaggtgacagagctggtggatgctgtgtatgacccctacaagccctaccagctgaagtacggggacatggaggagagcaacctgctgatccagatgtctgctgtgcccctggagcacggggaggtgattgactgtgtgcaggagctgagccacagcgtgaacaagctgtttggcctggccagcgctgctgtggacagatgtgtgcgcttcaccaacggcctgggcacctgtggcctgctgagcgccctgaagagcctgtttgccaagtatgtgtctgacttcaccagcaccctgcagagcatcaggaagaagtgcaagctggaccacatcccccccaacagcctcttccaggaggactggacagccttccagaacagcatccgcatcatcgccacctgtggggagctgctgcggcactgtggggactttgagcagcagctggccaaccgcatcctgagcacagctgggaagtacctgagtgacagctgcagccccaggagcctggccggcttccaggagagcatcctgacagacaagaagaacagcgccaagaacccctggcaggagtacaactacctgcagaaggacaacccagcagaatatgccagcctgatggagatcctgtacaccctgaaggagaagggcagcagcaaccacaacctgctggccgcccccagggctgccctgacccggctgaaccagcaggcccaccagctggcctttgattctgtgttcctgcgcatcaagcagcagctgctgctgatcagcaagatggacagctggaacacagctggcatcggggagaccctgacagatgagctgcctgccttcagcctgacccccctggagtacatcagcaacatcggccagtacatcatgagcctgcccctgaacctggagccctttgtgacccaggaggacagcgccctggagctggccctgcacgccggcaagctgcccttccccccagagcagggagatgagctgcctgagctggacaacatggctgacaactggctgggcagcatcgcccgggccaccatgcagacctactgtgatgccatcctgcagatccctgagctgagcccccacagcgccaagcagctggccacagacatcgactacctgatcaacgtgatggatgccctgggcctgcagcccagcaggaccctgcagcacatcgtgaccctgctgaagaccaggcctgaggactaccggcaggtgtccaagggcctgccccggcggctggccaccaccgtggccaccatgaggtctgtgaactactag

SEQ ID NO: 148363 - DNA, 1839 bp, synthetic construct
  misc_feature 1..1839: note = Description of Artificial Sequence: Synthetic coding sequence
  source 1..1839: mol_type = other DNA
atggccacagctgccaccatccccagcgtggccacagccacagctgctgccctgggggaggtggaggatgagggcctgctggccagcctcttccgggaccgcttccctgaggcccagtggagggagaggccagatgtgggccgctacctgcgggagctgagcggcagcggcctggagcggctgcggcgggagcctgagcggctggccgaggagcgggcccagctgctgcagcagacccgggacctggcctttgccaactacaagaccttcatcagaggagcagaatgtacagagcgcatccaccggctgtttggagatgtggaggccagcctgggccgcctgctggaccggctgcccagcttccagcagagctgcaggaactttgtgaaggaggccgaggagatcagcagcaacagaaggatgaacagcctgaccctgaacagacacacagagatcctggagatcctggagatcccccagctgatggacacctgtgtgagaaattcctactatgaggaggccctggagctggccgcctacgtgcggcggctggagaggaagtacagcagcatccctgtgatccagggcatcgtgaatgaggtgcggcagagcatgcagctgatgctgagccagctgatccagcagctgcggaccaacatccagctgcctgcctgcctgcgggtgattggctacctgcggaggatggatgtgttcacagaagctgagctgcgggtgaagttcctgcaggccagagatgcctggctgcggagcatcctgacagccatccccaatgatgacccctacttccacatcaccaagaccatcgaggccagccgggtgcacctgtttgacatcatcacccagtaccgggccatcttcagtgatgaggaccccctgctgcccccagccatgggagagcacacagtgaatgaaagtgccatcttccacggctgggtgctgcagaaggtgtcccagttcctgcaggtgctggagacagacctgtaccggggcatcggcggccacctggacagcctgctgggccagtgcatgtacttcggcctgtccttcagccgggtgggcgctgacttccggggccagctggcccctgtgttccagagggtggccatcagcaccttccagaaggccatccaggagaccgtggagaagttccaggaggagatgaacagctacatgctgatcagcgccccagccatcctgggcaccagcaacatgcctgctgctgtgcctgccacccagcccggcaccctgcagccccccatggtgctgctggacttcccccccctggcctgcttcctgaacaacatcctggtggccttcaatgacctgcggctgtgctgccctgtggccctggcccaggatgtgactggagccctggaggatgccctggccaaggtgaccaagatcatcctggccttccacagagctgaggaggccgccttcagcagtggagagcaggagctgtttgtgcagttctgcaccgtcttcctggaggacctggtgccctacctgaaccgctgcctgcaggtgctcttccccccagcccagatcgcccagaccctgggcatcccccccacccagctgagcaaatatggcaacctgggccacgtgaacattggagccatccaggagcccctggccttcatcctgcccaagcgggagaccctcttcaccctggatgaccaggccctgggccctgagctgacagccccagcccctgagcccccagctgaggagccccggctggagcctgctggccctgcctgcccagagggcggccgggcagagacccaggccgagcccccatctgtgggcccctag

SEQ ID NO: 148364 - DNA, 2109 bp, synthetic construct
  misc_feature 1..2109: note = Description of Artificial Sequence: Synthetic coding sequence
  source 1..2109: mol_type = other DNA
atggagagccccagcgccccaccccaccgctggtgcatcccctggcagaggctgctgctgacagccagcctgctgaccttctggaacccccccaccacagccaagctgaccatcgagagcacccccttcaacgtggccgagggcaaggaggtgctgctgctggtgcacaacctgccccagcacctgtttggctacagctggtacaagggggagcgggtggatggcaaccggcagatcatcggctacgtgattggcacccagcaggccaccccaggccctgcctacagcggccgggagatcatctacccaaatgccagcctgctgatccagaacatcatccagaatgacaccggcttctacaccctgcacgtgatcaagagtgacctggtgaatgaggaggccaccggccagttccgggtgtacccagagctgcccaagcccagcatcagcagcaacaacagcaagcctgtggaggacaaggatgctgtggccttcacctgtgagcctgagacccaggatgccacctacctgtggtgggtgaacaaccagagcctgcctgtgagcccccggctgcagctgagcaatggaaacagaaccctgaccctcttcaacgtgaccagaaatgacacagccagctacaagtgtgagacccagaaccctgtgtctgcccggcggagtgacagcgtcatcctgaatgtgctgtatggcccagatgcccccaccatcagccccctgaacaccagctacagaagtggagagaacctgaacctgagctgccacgccgccagcaaccccccagcccagtacagctggtttgtgaatggcaccttccagcagagcacccaggagctgttcatccccaacatcaccgtgaacaacagcggcagctacacctgccaggcccacaacagcgacaccggcctgaacagaaccaccgtgaccaccatcaccgtgtatgcagagccccccaagcccttcatcaccagcaacaacagcaaccctgtggaggatgaagatgctgtggccctgacctgtgagcctgagatccagaacaccacctacctgtggtgggtgaacaaccagagcctgcctgtgagcccccggctgcagctgagcaatgacaacagaaccctgaccctgctgtctgtgaccagaaatgatgtgggcccctatgaatgtggcatccagaacaagctgtctgtggaccacagcgaccccgtcatcctgaatgtgctgtatggcccagatgaccccaccatcagccccagctacacctactacagacctggggtgaacctgagcctgagctgccacgccgccagcaaccccccagcccagtacagctggctgattgatggcaacatccagcagcacacccaggagctgttcatcagcaacatcacagagaagaacagcggcctgtacacctgccaggccaacaacagcgccagcggccacagcaggaccaccgtgaagaccatcaccgtgtctgctgagctgcccaagcccagcatcagcagcaacaacagcaagcctgtggaggacaaggatgctgtggccttcacctgtgagcctgaggcccagaacaccacctacctgtggtgggtgaatggccagagcctgcctgtgagcccccggctgcagctgagcaatggaaacagaaccctgaccctcttcaacgtgaccagaaatgatgcccgggcctacgtgtgtggcatccagaacagcgtgtctgccaacagaagtgaccctgtgaccctggatgtgctgtatggccctgacacccccatcatcagccccccagacagcagctacctgagcggggccaacctgaacctgagctgccacagcgccagcaaccccagcccccagtacagctggaggatcaatggcatcccccagcagcacacccaggtgctcttcatcgccaagatcacccccaacaacaacggcacctacgcctgctttgtgagcaacctggccaccggcaggaacaacagcatcgtgaagagcatcaccgtgtctgccagcggcaccagccctggcctgtctgctggggccaccgtgggcatcatgattggagtgctggtgggcgtggccctgatctag

SEQ ID NO: 148365 - DNA, 981 bp, synthetic construct
  misc_feature 1..981: note = Description of Artificial Sequence: Synthetic coding sequence
  source 1..981: mol_type = other DNA
atgatggcctacatgaaccctggcccccactacagcgtgaatgccctggccctgagcggccccagcgtggacctgatgcaccaggccgtgccctaccccagcccccccctggccctggaccccccccggcggcagaggcaggagaggacagtgtacacagagagccagcagaaggtgctggagttctacttccagaaggaccagtaccccaactatgaccagaggctgaacctggccgagatgctgagcctgcgggagcagcagctgcaggtgtggttcaagaacagaagagccaagctggcccgggagcggcggctgcagcagcagccccagagggtgcccggccagaggggccgcggggcccgggccgcccccctggtgcctgtggccgccgccagcttccctgggggccctgagttcccccagggccggggctcctggatcagcccccagcccggcccctggggcgtgctgcctgctgctgagcccaagatctacagcctgcccaggacctggggcggcccagaatgtggcacccaggagggcctgaaggctgtgcctgcccctggccctggccccatcccagcccccatccctggccctgcccagatccctggccctgtgcccggccctgcccccaacctgggccccatgagcggccccctgtctgtgtccatccctggccccatcccagcccccatcagctgccccggccccatcccagaccctgtgctgggccgcaccctgatgcctggccctggcagcctgcccaccccagcccctggggccctgtggccccagagcccctatgccagcaacctgagcccagacacccagctgtacccagacttcaccaagctgctgcccctgctggacagatttgaggagagcagcctgagcaccaccaccagccagtacaaggaggaggatggctttgtggacaagaaccacagcgtgcccaggagcctgctggacctgtag

SEQ ID NO: 148366 - DNA, 900 bp, synthetic construct
  misc_feature 1..900: note = Description of Artificial Sequence: Synthetic coding sequence
  source 1..900: mol_type = other DNA
atgatggcctacatgaaccctggcccccactacagcgtgaatgccctggccctgagcggccccagcgtggacctgatgcaccaggccgtgccctaccccagcgcccccaggaagcagaggcgggagaggaccaccttcaccaggagccagctggaggagctggaggccctgtttgccaagacccagtacccagatgtgtatgcccgggaggaggtggccctgaagatcaacctgcctgagagccgggtgcaggtgtggttcaagaacagaagagccaagtgccggcagcagaggcagcagcagaagcagcagcagcagcccccaggcggccaggccaaggcccggcctgccaagaggaaggccggcaccagcccccggcccagcacagatgtgtgcccagaccccctgggcatcagtgacagctacagcccccccctgcccggccccagcggcagccccaccacagctgtggccaccgtgtccatctggagccctgccagcgagagccccctgcctgaggcccagagagctggcctggtggccagcggccccagcctgaccagcgccccctatgccatgacctacgccccagccagcgccttctgcagcagccccagcgcctacggcagccccagcagctacttcagcggcctggacccctacctgagccccatggtgccccagctgggcggccctgccctgagccccctgagcggccccagcgtgggccccagcctggcccagagccccaccagcctgagcggccagagctatggagcctacagccctgtggacagcctggagttcaaggaccccaccggcacctggaagttcacctacaaccccatggaccccctggactacaaggaccagagcgcctggaagttccagatcctgtag

SEQ ID NO: 148367 - DNA, 900 bp, synthetic construct; identical to SEQ ID NO: 148366
  misc_feature 1..900: note = Description of Artificial Sequence: Synthetic coding sequence
  source 1..900: mol_type = other DNA

SEQ ID NO: 148368 - DNA, 900 bp, synthetic construct; identical to SEQ ID NO: 148366
  misc_feature 1..900: note = Description of Artificial Sequence: Synthetic coding sequence
  source 1..900: mol_type = other DNA

SEQ ID NO: 148369 - DNA, 3678 bp, synthetic construct
  misc_feature 1..3678: note = Description of Artificial Sequence: Synthetic coding sequence
  source 1..3678: mol_type = other DNA
atggctgctgtgctggagagcctgctgcgggaggaggtgtctgtggccgctgtggtgcgctggatcgcccggagcacccagggcagcgaggacaatgctggggaggccgccgccctgagcagcctgcgggccctgaggaaggagtttgtgcccttcctgctgaacttcctgcgggagcagagcagccgggtgctgccccagggcccccccaccccagccaagacccctggggccagcgctgccctgcccggccggcctgggggccccccccggggcagcagaggagcccggagccagctgttccccccaacagaggcccagagcacagctgctgaggcccccctggccaggagaggaggaagaagaagaggccctggccctgcccgggagcggggcggccggggcctggaggagggcgtgtctggagagagcctgcccggggccggcggccgccgcctgcggggcagcggcagccccagccggcccagcctgaccctgagtgacccccccaacctgagcaacctggaggagttcccccctgtgggctctgtgcccccaggccccacagagacccagctgagctgccgccgctgggtgccccggcggctgtggggcgtgagccacagcagcagcgccctgcggagcggggcccctggctgcaggaccaagcccagccgccgcatcaaccccacccctgtgtctgaggagaggagcctgagcaagcccaagacctgcttcaccagcccccccatcagctgtgtgcccagcagcaagcagctgcagcagagccccacccccacctgccccaccccagagctgggcagccccctgcccagcaggacaggcagcctgacagatgagcctgctgaccctgcccgggtgagcagccggcagaggctggagctggtggccctggtgtacagcagctgcatcgccgagaacctggtgcccaacctcttcctggagctgttctttgtgttccagctgctgacagcccggaggatggtgacagccaaggacagcgaccctgagctgagccctgctgtgctggacagcctggagagccccctcttccagagcatccatgactgtgtgttctttgctgtgcaggtgctggagtgccacttccaggtgctgagcaacctggacaagggcaccctgaagctgctggccgagaatgaaaggctgctgtgcttctccccagccctgcagggccgcctgcgggccgcctatgagggctctgtggccaaggtgtccctggtgatgccacccagcacccaggccgtgtccttccagcctgagacagacaacagagccaacttcagcagtgaccgggccttccacaccttcaagaagcagagagatgtgttctatgaggtgctgcgggagtgggaggaccaccacgaggagcccggctgggactttgagaagggcctgggcagccgcatccgggccatgatgggccagctgtctgctgcctgcagccacagccactttgtgcggctcttccagaagcagctgctgcagatgtgccagagccctgggggcgccggcggcaccgtgctgggggaggccccagatgtgctgtccatgctgggcgctgacaagctgggccgcctgtggaggctgcaggagcggctgatggccccccagagcagcggcggcccctgccccccacccaccttccctggctgccagggcttcttccgggacttcatcctgagcgccagcagcttccagttcaaccagcacctgatggacagcctgagcctgaagatccaggagctgaatggcctggccctgccccagcacgagcccaatgatgaagatggagagagtgatgtggactggcagggcgagaggaagcagtttgctgtggtgctgctgagcctgcggctgctggccaagttcctgggctttgtggccttcctgccctaccggggccctgagcccccacccaccggggagctgcaggacagcatcctggccctgcggagccaggtgccccctgtgctggatgtgaggaccctgctgcagaggggcctgcaggccaggagagctgtgctgactgtgccctggctggtggagttcctgagctttgctgaccacgtggtgcccctgctggagtactacagagacatcttcaccctgctgctgcggctgcacaggagcctggtgctgagccaggagagcgagggcaagatgtgcttcctgaacaagctgctgctgctggccgtgctgggctggctgttccagatccccaccgtgcctgaggacctcttcttcctggaggagggccccagctatgcctttgaggtggacacagtggcccctgagcacggcctggacaatgcccctgtggtggaccagcagctgctgtacacctgctgcccctacatcggggagctgaggaagctgctggcctcctgggtgtctggcagcagcggccgcagcggcggcttcatgaggaagatcacccccaccaccaccaccagcctgggcgcccagcccagccagaccagccagggcctgcaggcccagctggcccaggccttcttccacaaccagccccccagcctgcggaggacagtggagtttgtggccgagagaattggcagcaactgtgtgaagcacatcaaggccaccctggtggccgacctggtgcggcaggccgagagcctgctgcaggagcagctggtgacccagggcgaggagggcggggaccctgcccagctgctggagatcctgtgcagccagctgtgcccccatggagcccaggccctggccctgggccgggagttctgccagaggaagagccctggagctgtgcgggccctgctgcctgaggagaccccagctgctgtgctgagcagcgctgagaacattgctgtgggcctggccacagagaaggcctgtgcctggctgagcgccaacatcacagccctgatccggcgggaggtgaaggctgctgtgtccaggaccctgcgggcccagggccctgagcctgctgcccggggggagcggcggggctgcagccgggcctgtgagcaccacgcccccctgcccagccacctgatcagcgagatcaaggatgtgctgagcctggccgtgggcccccgggaccctgatgaaggagtgtccccagagcacctggagcagctgctgggccagctgggccagaccctgcgctgccggcagttcctgtgccccccagctgagcagcacctggccaagtgcagcgtggagctggccagcctgctggtggccgaccagatccccatcctgggccccccagcccagtaccgcctggagcggggccaggcccggcggctgctgcacatgctgctgagcctgtggaaggaggacttccagggccctgtgcccctgcagctgctgctgagccccagaaatgtgggcctgctggccgacacccggccccgggagtgggacctgctgctcttcctgctgcgggagctggtggagaagggcctgatgggccgcatggagattgaggcctgcctgggcagcctgcaccaggcccagtggccaggggactttgctgaggagctggccaccctgagcaacctcttcctggccgagccccacctgcctgagccccagctgcgggcctgtgagctggtgcagcccaacagaggcaccgtgctggcccagagctag

SEQ ID NO: 148370 - DNA, 3684 bp, synthetic construct
  misc_feature 1..3684: note = Description of Artificial Sequence: Synthetic coding sequence
  source 1..3684: mol_type = other DNA
atggctgctgtgctggagagcctgctgcgggaggaggtgtctgtggccgctgtggtgcgctggatcgcccggagcacccagggcagcgaggacaatgctggggaggccgccgccctgagcagcctgcgggccctgaggaaggagtttgtgcccttcctgctgaacttcctgcgggagcagagcagccgggtgctgccccagggcccccccaccccagccaagacccctggggccagcgctgccctgcccggccggcctgggggccccccccggggcagcagaggagcccggagccagctgttccccccaacagaggcccagagcacagctgctgaggcccccctggccaggagaggaggaagaagaagaggccctggccctgcccgggagcggggcggccggggcctggaggagggcgtgtctggagagagcctgcccggggccggcggccgccgcctgcggggcagcggcagccccagccggcccagcctgaccctgagtgacccccccaacctgagcaacctggaggagttcccccctgtgggctctgtgcccccaggccccaccggcaccaagcccagccgccgcatcaaccccacccctgtgtctgaggagaggagcctgagcaagcccaagacctgcttcaccagcccccccatcagctgtgtgcccagcagccagcccagcgccctggacaccagcccctggggcctgggcctgcccccaggctgccgcagcctgcaggaggagcgggagatgctgaggaaggagaggagcaagcagctgcagcagagccccacccccacctgccccaccccagagctgggcagccccctgcccagcaggacaggcagcctgacagatgagcctgctgaccctgcccgggtgagcagccggcagaggctggagctggtggccctggtgtacagcagctgcatcgccgagaacctggtgcccaacctcttcctggagctgttctttgtgttccagctgctgacagcccggaggatggtgacagccaaggacagcgaccctgagctgagccctgctgtgctggacagcctggagagccccctcttccagagcatccatgactgtgtgttctttgctgtgcaggtgctggagtgccacttccaggtgctgagcaacctggacaagggcaccctgaagctgctggccgagaatgaaaggctgctgtgcttctccccagccctgcagggccgcctgcgggccgcctatgagggctctgtggccaaggtgtccctggtgatgccacccagcacccaggccgtgtccttccagcctgagacagacaacagagccaacttcagcagtgaccgggccttccacaccttcaagaagcagagagatgtgttctatgaggtgctgcgggagtgggaggaccaccacgaggagcccggctgggactttgagaagggcctgggcagccgcatccgggccatgatgggccagctgtctgctgcctgcagccacagccactttgtgcggctcttccagaagcagctgctgcagatgtgccagagccctgggggcgccggcggcaccgtgctgggggaggccccagatgtgctgtccatgctgggcgctgacaagctgggccgcctgtggaggctgcaggagcggctgatggccccccagagcagcggcggcccctgccccccacccaccttccctggctgccagggcttcttccgggacttcatcctgagcgccagcagcttccagttcaaccagcacctgatggacagcctgagcctgaagatccaggagctgaatggcctggccctgccccagcacgagcccaatgatgaagatggagagagtgatgtggactggcagggcgagaggaagcagtttgctgtggtgctgctgagcctgcggctgctggccaagttcctgggctttgtggccttcctgccctaccggggccctgagcccccacccaccggggagctgcaggacagcatcctggccctgcggagccaggtgccccctgtgctggatgtgaggaccctgctgcagaggggcctgcaggccaggagagctgtgctgactgtgccctggctggtggagttcctgagctttgctgaccacgtggtgcccctgctggagtactacagagacatcttcaccctgctgctgcggctgcacaggagcctggtgctgagccaggagagcgagggcaagatgtgcttcctgaacaagctgctgctgctggccgtgctgggctggctgttccagatccccaccgtgcctgaggacctcttcttcctggaggagggccccagctatgcctttgaggtggacacagtggcccctgagcacggcctggacaatgcccctgtggtggaccagcagctgctgtacacctgctgcccctacatcggggagctgaggaagctgctggcctcctgggtgtctggcagcagcggccgcagcggcggcttcatgaggaagatcacccccaccaccaccaccagcctgggcgcccagcccagccagaccagccagggcctgcaggcccagctggcccaggccttcttccacaaccagccccccagcctgcggaggacagtggagtttgtggccgagagaattggcagcaactgtgtgaagcacatcaaggccaccctggtggccgacctggtgcggcaggccgagagcctgctgcaggagcagctggtgacccagggcgaggagggcggggaccctgcccagctgctggagatcctgtgcagccagctgtgcccccatggagcccaggccctggccctgggccgggagttctgccagaggaagagccctggagctgtgcgggccctgctgcctgaggagaccccagctgctgtgctgagcagcgctgagaacattgctgtgggcctggccacagagaaggcctgtgcctggctgagcgccaacatcacagccctgatccggcgggaggtgaaggctgctgtgtccaggaccctgcgggcccagggccctgagcctgctgcccggggggagcggcggggctgcagccgggcctgtgagcaccacgcccccctgcccagccacctgatcagcgagatcaaggatgtgctgagcctggccgtgggcccccgggaccctgatgaaggagtgtccccagagcacctggagcagctgctgggccagctgggccagaccctgcgctgccggcagttcctgtgccccccagctgagcagcacctggccaagtgcagcgtggagctggccagcctgctggtggccgaccagatccccatcctgggccccccagcccagtaccgcctggagcggggccaggcccggcggctgctgcacatgctgctgagcctgtggaaggaggacttccagggccctgtgcccctgcagctgctgctgagccccagaaatgtgggcctgctggccgacacccggccccgggagtgggacctgctgctcttcctgctgcgggagctggtggagaagggcctgatgggccgcatggagattgaggcctgcctgggcagcctgcaccaggcccagtggccaggggactttgctgaggagctggccaccctgagcaacctcttcctggccgagccccacctgcctgagccccagctgcgggcctgtgagctggtgcagcccaacagaggcaccgtgctggcccagagctag

SEQ ID NO: 148371 - DNA, 2697 bp, synthetic construct
  misc_feature 1..2697: note = Description of Artificial Sequence: Synthetic coding sequence
  source 1..2697: mol_type = other DNA
atggccctgatcatggagcctgtgtccaagtggagccccagccaggtggtggactggatgaagggcctggatgactgcctgcagcagtacatcaagaactttgagcgggagaagatcagcggggaccagctgctgcgcatcacccaccaggagctggaggacctgggcgtgagccgcatcggccaccaggagctgatcctggaggccgtggacctgctgtgtgccctgaactacggcctggagacagagaacctgaagaccctgagccacaagctgaatgccagcgccaagaacctgcagaacttcatcaccggcagaagaagaagtggccactatgatggccgcaccagcaggaagctgcccaatgacttcctgacctctgtggtggacctgattggagctgccaagagcctgctggcctggctggacaggagcccctttgctgctgtgacagactacagcgtgaccagaaataatgtcatccagctgtgcctggagctgaccaccatcgtgcagcaggactgcaccgtgtatgaaacagagaacaagatcctgcacgtgtgcaagaccctgagcggcgtgtgtgaccacatcatcagcctgagcagtgaccccctggtgtcccagagcgcccacctggaggtgatccagctggccaacatcaagcccagcgagggcctgggcatgtacatcaagagcacctatgatggcctgcacgtgatcaccggcaccacagagaacagccctgctgaccgctgcaagaagatccacgccggagatgaggtgatccaggtgaaccaccagacagtggtgggctggcagctgaagaacctggtgaatgccctgcgggaggaccccagcggggtcatcctgaccctgaagaagaggccccagagcatgctgaccagcgccccagccctgctgaagaacatgcgctggaagcccctggccctgcagcccctcatccccaggagccccaccagctctgtggccacccccagcagcaccatcagcacccccaccaagagggacagcagcgccctgcaggacctgtacatccccccacctcctgctgagccctacatccccagagatgagaagggcaacctgccctgtgaggacctgcggggccacatggtgggcaagcctgtgcacaagggcagcgagagccccaacagcttcctggaccaggagtacaggaagcgcttcaacatcgtggaggaggacacagtgctgtactgctatgaatatgagaagggccgcagcagcagccagggcagaagagagagcacccccacctacggcaagctgcggcccatctccatgcctgtggagtacaactgggtgggggactatgaggaccccaacaagatgaagagggacagcagaagagagaacagcctgctgcgctacatgagcaatgagaagatcgcccaggaggagtacatgttccagaggaacagcaagaaggacaccgggaagaagagcaagaagaagggggacaagagcaacagccccacccactacagcctgctgcccagcctgcagatggatgccctgcggcaggacatcatgggcacccctgtgcctgagaccaccctgtaccacaccttccagcagagcagcctgcagcacaagagcaagaagaagaacaagggccccatcgccggcaagagcaagaggcgcatcagctgcaaggacctgggccgcggggactgtgagggctggctgtggaagaagaaggatgccaagagctacttcagccagaagtggaagaagtactggtttgtgctgaaggatgccagcctgtactggtacatcaatgaggaggatgagaaggccgagggcttcatcagcctgcctgagttcaagattgaccgggccagcgagtgcaggaagaagtatgccttcaaggcctgccaccccaagatcaagagcttctactttgctgctgagcacctggatgacatgaaccgctggctgaaccgcatcaacatgctgacagctggctacgccgagcgggagcgcatcaagcaggagcaggactactggagcgagagtgacaaggaggaggccgacacccccagcacccccaagcaggacagccccccaccaccctatgacacctaccccaggcctccttccatgagctgtgccagcccctacgtggaggccaagcacagccggctgagcagcacagagaccagccagagccagagcagccatgaggagttccggcaggaggtgacaggcagcagcgctgtgagccccatcaggaagacagccagccagaggaggtcctggcaggacctgattgagacccccctgaccagcagcggcctgcactacctgcagaccctgcccctggaggacagcgtcttcagtgacagcgctgccatcagccctgagcaccggcggcagagcaccctgcccacccagaagtgccacctgcaggaccactacggcccctaccccctggccgagagcgagaggatgcaggtgctgaatggaaatggaggcaagcccaggagcttcaccctgccccgggacagcggcttcaaccactgctgcctgaatgcccctgtgtctgcctgtgacccccaggatgatgtgcagcccccagaggtggaggaggaggaggaggaggaggaggaggagggggaggccgccggggagaacatcggggagaagagctag

SEQ ID NO: 148372 - DNA, 3105 bp, synthetic construct
  misc_feature 1..3105: note = Description of Artificial Sequence: Synthetic coding sequence
  source 1..3105: mol_type = other DNA
atggccctgatcatggagcctgtgtccaagtggagccccagccaggtggtggactggatgaagggcctggatgactgcctgcagcagtacatcaagaactttgagcgggagaagatcagcggggaccagctgctgcgcatcacccaccaggagctggaggacctgggcgtgagccgcatcggccaccaggagctgatcctggaggccgtggacctgctgtgtgccctgaactacggcctggagacagagaacctgaagaccctgagccacaagctgaatgccagcgccaagaacctgcagaacttcatcaccggcagaagaagaagtggccactatgatggccgcaccagcaggaagctgcccaatgacttcctgacctctgtggtggacctgattggagctgccaagagcctgctggcctggctggacaggagcccctttgctgctgtgacagactacagcgtgaccagaaataatgtcatccagctgtgcctggagctgaccaccatcgtgcagcaggactgcaccgtgtatgaaacagagaacaagatcctgcacgtgtgcaagaccctgagcggcgtgtgtgaccacatcatcagcctgagcagtgaccccctggtgtcccagagcgcccacctggaggtgatccagctggccaacatcaagcccagcgagggcctgggcatgtacatcaagagcacctatgatggcctgcacgtgatcaccggcaccacagagaacagccctgctgaccgctgcaagaagatccacgccggagatgaggtgatccaggtgaaccaccagacagtggtgggctggcagctgaagaacctggtgaatgccctgcgggaggaccccagcggggtcatcctgaccctgaagaagaggccccagagcatgctgaccagcgccccagccctgctgaagaacatgcgctggaagcccctggccctgcagcccctcatccccaggagccccaccagctctgtggccacccccagcagcaccatcagcacccccaccaagagggacagcagcgccctgcaggacctgtacatccccccacctcctgctgagccctacatccccagagatgagaagggcaacctgccctgtgaggacctgcggggccacatggtgggcaagcctgtgcacaagggcagcgagagccccaacagcttcctggaccaggagtacaggaagcgcttcaacatcgtggaggaggacacagtgctgtactgctatgaatatgagaagggccgcagcagcagccagggcagaagagagagcacccccacctacggcaagctgcggcccatctccatgcctgtggagtacaactgggtgggggactatgaggaccccaacaagatgaagagggacagcagaagagagaacagcctgctgcgctacatgagcaatgagaagatcgcccaggaggagtacatgttccagaggaacagcaagaaggacaccgggaagaagagcaagaagaagggggacaagagcaacagccccacccactacagcctgctgcccagcctgcagatggatgccctgcggcaggacatcatgggcacccctgtgcctgagaccaccctgtaccacaccttccagcagagcagcctgcagcacaagagcaagaagaagaacaagggccccatcgccggcaagagcaagaggcgcatcagctgcaaggacctgggccgcggggactgtgagggctggctgtggaagaagaaggatgccaagagctacttcagccagaagtggaagaagtactggtttgtgctgaaggatgccagcctgtactggtacatcaatgaggaggatgagaaggccgagggcttcatcagcctgcctgagttcaagattgaccgggccagcgagtgcaggaagaagtatgccttcaaggcctgccaccccaagatcaagagcttctactttgctgctgagcacctggatgacatgaaccgctggctgaaccgcatcaacatgctgacagctggctacgccgagcgggagcgcatcaagcaggagcaggactactggagcgagagtgacaaggaggaggccgacacccccagcacccccaagcaggacagccccccaccaccctatgacacctaccccaggcctccttccatgagctgtgccagcccctacgtggaggccaagcacagccggctgagcagcacagagaccagccagagccagagcagccatgaggagttccggcaggaggtgacaggcagcagcgctgtgagccccatcaggaagacagccagccagaggaggtcctggcaggacctgattgagacccccctgaccagcagcggcctgcactacctgcagaccctgcccctggaggacagcgtcttcagtgacagcgctgccatcagccctgagcaccggcggcagagcaccctgcccacccagaagtgccacctgcaggaccactacggcccctaccccctggccgagagcgagaggatgcaggtgctgaatggaaatggaggcaagcccaggagcttcaccctgccccgggacagcggcttcaaccactgctgcctgaatgcccctgtgtctgcctgtgacccccaggatgatgtgcagcccccagaggtggaggaggaggaggaggaggaggaggaggagggggaggccgccggggagaacatcggggagaagtctgagagccgggaggagaagctgggggacagcctgcaggacctgtaccgggccctggagcaggccagcctgagccccctgggggagcaccgcatcagcaccaagatggagtacaagctgtccttcatcaagcgctgcaatgaccctgtgatgaatgagaagctgcaccggctgcgcatcctgaagagcaccctgaaggcccgggagggggaggtggccatcatcgacaaggtgctggacaacccagacctgaccagcaaggagttccagcagtggaagcagatgtacctggacctcttcctggacatctgccagaacaccaccagcaatgaccccctgagcatcagcagcgaggtggatgtgatcaccagcagcctggcccacacccacagctacatcgagacccacgtgtag

SEQ ID NO: 148373 - DNA, 3015 bp, synthetic construct
  misc_feature 1..3015: note = Description of Artificial Sequence: Synthetic coding sequence
  source 1..3015: mol_type = other DNA
atggccctgatcatggagcctgtgtccaagtggagccccagccaggtggtggactggatgaagggcctggatgactgcctgcagcagtacatcaagaactttgagcgggagaagatcagcggggaccagctgctgcgcatcacccaccaggagctggaggacctgggcgtgagccgcatcggccaccaggagctgatcctggaggccgtggacctgctgtgtgccctgaactacggcctggagacagagaacctgaagaccctgagccacaagctgaatgccagcgccaagaacctgcagaacttcatcaccggcagaagaagaagtggccactatgatggccgcaccagcaggaagctgcccaatgacttcctgacctctgtggtggacctgattggagctgccaagagcctgctggcctggctggacaggagcccctttgctgctgtgacagactacagcgtgaccagaaataatgtcatccagctgtgcctggagctgaccaccatcgtgcagcaggactgcaccgtgtatgaaacagagaacaagatcctgcacgtgtgcaagaccctgagcggcgtgtgtgaccacatcatcagcctgagcagtgaccccctggtgtcccagagcgcccacctggaggtgatccagctggccaacatcaagcccagcgagggcctgggcatgtacatcaagagcacctatgatggcctgcacgtgatcaccggcaccacagagaacagccctgctgaccgctgcaagaagatccacgccggagatgaggtgatccaggtgaaccaccagacagtggtgggctggcagctgaagaacctggtgaatgccctgcgggaggaccccagcggggtcatcctgaccctgaagaagaggccccagagcatgctgaccagcgccccagccctgctgaagaacatgcgctggaagcccctggccctgcagcccctcatccccaggagccccaccagctctgtggccacccccagcagcaccatcagcacccccaccaagagggacagcagcgccctgcaggacctgtacatccccccacctcctgctgagccctacatccccagagatgagaagggcaacctgccctgtgaggacctgcggggccacatggtgggcaagcctgtgcacaagggcagcgagagccccaacagcttcctggaccaggagtacaggaagcgcttcaacatcgtggaggaggacacagtgctgtactgctatgaatatgagaagggccgcagcagcagccagggcagaagagagagcacccccacctatgagaacagcctgctgcgctacatgagcaatgagaagatcgcccaggaggagtacatgttccagaggaacagcaagaaggacaccgggaagaagagcaagaagaagggggacaagagcaacagccccacccactacagcctgctgcccagcctgcagatggatgccctgcggcaggacatcatgggcacccctgtgcctgagaccaccctgtaccacaccttccagcagagcagcctgcagcacaagagcaagaagaagaacaagggccccatcgccggcaagagcaagaggcgcatcagctgcaaggacctgggccgcggggactgtgagggctggctgtggaagaagaaggatgccaagagctacttcagccagaagtggaagaagtactggtttgtgctgaaggatgccagcctgtactggtacatcaatgaggaggatgagaaggccgagggcttcatcagcctgcctgagttcaagattgaccgggccagcgagtgcaggaagaagtatgccttcaaggcctgccaccccaagatcaagagcttctactttgctgctgagcacctggatgacatgaaccgctggctgaaccgcatcaacatgctgacagctggctacgccgagcgggagcgcatcaagcaggagcaggactactggagcgagagtgacaaggaggaggccgacacccccagcacccccaagcaggacagccccccaccaccctatgacacctaccccaggcctccttccatgagctgtgccagcccctacgtggaggccaagcacagccggctgagcagcacagagaccagccagagccagagcagccatgaggagttccggcaggaggtgacaggcagcagcgctgtgagccccatcaggaagacagccagccagaggaggtcctggcaggacctgattgagacccccctgaccagcagcggcctgcactacctgcagaccctgcccctggaggacagcgtcttcagtgacagcgctgccatcagccctgagcaccggcggcagagcaccctgcccacccagaagtgccacctgcaggaccactacggcccctaccccctggccgagagcgagaggatgcaggtgctgaatggaaatggaggcaagcccaggagcttcaccctgccccgggacagcggcttcaaccactgctgcctgaatgcccctgtgtctgcctgtgacccccaggatgatgtgcagcccccagaggtggaggaggaggaggaggaggaggaggaggagggggaggccgccggggagaacatcggggagaagtctgagagccgggaggagaagctgggggacagcctgcaggacctgtaccgggccctggagcaggccagcctgagccccctgggggagcaccgcatcagcaccaagatggagtacaagctgtccttcatcaagcgctgcaatgaccctgtgatgaatgagaagctgcaccggctgcgcatcctgaagagcaccctgaaggcccgggagggggaggtggccatcatcgacaaggtgctggacaacccagacctgaccagcaaggagttccagcagtggaagcagatgtacctggacctcttcctggacatctgccagaacaccaccagcaatgaccccctgagcatcagcagcgaggtggatgtgatcaccagcagcctggcccacacccacagctacatcgagacccacgtgtag

SEQ ID NO: 148374 - DNA, 2550 bp, synthetic construct
  misc_feature 1..2550: note = Description of Artificial Sequence: Synthetic coding sequence
  source 1..2550: mol_type = other DNA
atggccctgatcatggagcctgtgtccaagtggagccccagccaggtggtggactggatgaagggcctggatgactgcctgcagcagtacatcaagaactttgagcgggagaagatcagcggggaccagctgctgcgcatcacccaccaggagctggaggacctgggcgtgagccgcatcggccaccaggagctgatcctggaggccgtggacctgctgtgtgccctgaactacggcctggagacagagaacctgaagaccctgagccacaagctgaatgccagcgccaagaacctgcagaacttcatcaccggcagaagaagaagtggccactatgatggccgcaccagcaggaagctgcccaatgacttcctgacctctgtggtggacctgattggagctgccaagagcctgctggcctggctggacaggagcccctttgctgctgtgacagactacagcgtgaccagaaataatgtcatccagctgtgcctggagctgaccaccatcgtgcagcaggactgcaccgtgtatgaaacagagaacaagatcctgcacgtgtgcaagaccctgagcggcgtgtgtgaccacatcatcagcctgagcagtgaccccctggtgtcccagagcgcccacctggaggtgatccagctggccaacatcaagcccagcgagggcctgggcatgtacatcaagagcacctatgatggcctgcacgtgatcaccggcaccacagagaacagccctgctgaccgctgcaagaagatccacgccggagatgaggtgatccaggtgaaccaccagacagtgcccctcatccccaggagccccaccagctctgtggccacccccagcagcaccatcagcacccccaccaagagggacagcagcgccctgcaggacctgtacatccccccacctcctgctgagccctacatccccagagatgagaagggcaacctgccctgtgaggacctgcggggccacatggtgggcaagcctgtgcacaagggcagcgagagccccaacagcttcctggaccaggagtacaggaagcgcttcaacatcgtggaggaggacacagtgctgtactgctatgaatatgagaagggccgcagcagcagccagggccggcgggagagcacccccacctacggcaagctgcggcccatctccatgcctgtggagtacaactgggtgggggactatgaggaccccaacaagatgaagagggacagccggcgggagaacagcctgctgcgctacatgagcaatgagaagatcgcccaggaggagtacatgttccagaggaacagcaagaaggacaccgggaagaagagcaagaagaagggggacaagagcaacagccccacccactacagcctgctgcccagcctgcagatggatgccctgcggcaggacatcatgggcacccctgtgcctgagaccaccctgtaccacaccttccagcagagcagcctgcagcacaagagcaagaagaagaacaagggccccatcgccggcaagagcaagaggcgcatcagctgcaaggacctgggccgcggggactgtgagggctggctgtggaagaagaaggatgccaagagctacttcagccagaagtggaagaagtactggtttgtgctgaaggatgccagcctgtactggtacatcaatgaagaagatgagaaggccgagggcttcatcagcctgcctgagttcaagattgaccgggcctctgaatgtaggaagaagtatgccttcaaggcctgccaccccaagatcaagagcttctactttgctgctgagcacctggatgacatgaaccgctggctgaaccgcatcaacatgctgacagctggctatgcagagcgggagcgcatcaagcaggagcaggactactggagcgagagtgacaaggaggaggccgacacccccagcacccccaagcaggacagccccccaccaccctatgacacctacccccggccccccagcatgagctgtgccagcccctacgtggaggccaagcacagccggctgagcagcacagagaccagccagagccagagcagccatgaggagttccggcaggaggtgacaggcagcagcgctgtgagccccatcaggaagacagccagccagaggaggtcctggcaggacctgattgagacccccctgaccagcagcggcctgcactacctgcagaccctgcccctggaggacagcgtcttcagtgacagcgctgccatcagccctgagcaccggcggcagagcaccctgcccacccagaagtgccacctgcaggaccactacggcccctaccccctggccgagagcgagaggatgcaggtgctgaatggaaatggaggcaagcccaggagcttcaccctgccccgggacagcggcttcaaccactgctgcctgaatgcccctgtgtctgcctgtgacccccaggatgatgtgcagcccccagaggtggaggaggaggaggaggaggaggaggaggagggggaggccgctggagaaaatattggagagaagagctag

SEQ ID NO: 148375 - DNA, 414 bp, synthetic construct
  misc_feature 1..414: note = Description of Artificial Sequence: Synthetic coding sequence
  source 1..414: mol_type = other DNA
atggatgacagcgacacccccacctactacctgcagatcgagccccaggacggctgccaccctggggacagcgtggagaggtctgtgacctgcctgcccagcgccagtgatgaaaatgaaaaccagctggatggagatggccacgagcacctgaccagcagtgacagcgccatgggcaagccccaggtgtctgagcaggacagcctgaacaacaatgaaagctgcaccctgagctgtgaggtggccgccggggagaacctgcagaacaccctgtgtgaggccagcagagatgagcaggccttcctgggcaaggacaagaagatccctgggaagaggagccccaggagcaagaagggcacagccaagaagatccccccagacagccgcatcctcttccctgggggcggcctgtag

SEQ ID NO: 148376 - DNA, 1851 bp, synthetic construct
  misc_feature 1..1851: note = Description of Artificial Sequence: Synthetic coding sequence
  source 1..1851: mol_type = other DNA
atggatgacagcgacacccccacctactacctgcagatcgagccccaggacggctgccaccctggggacagcgtggagaggtctgtgacctgcctgcccagcgccagtgatgaaaatgaaaaccagctggatggagatggccacgagcacctgaccagcagtgacagcgccatgggcaagccccaggtgtctgagcaggacagcctgaacaacaatgaaagctgcaccctgagctgtgaggtggccgccggggagaacctgcagaacaccctgtgtgaggccagcagagatgagcaggccttcctgggcaaggacaagaagatccctgggaagaggagccccaggagcaagaagggcacagccaagaagatccccccaggcctcttcagcggggacatcgcccccctgatgcaggagaaggtgctgtctgctgtgacctatgctgtggatgatgaggaggccgctgaggtgaatgccaatgagcagcctgaggcccccaagctggtgctgcagagcctcttcagcctcatccggggggaggtggagcagctggacagccgggccctgcccctgtgcctgcaccagattgctgagagctacttccaggaggaggactatgagaaggccatgaagttcatccagctggagcggctgtaccacgagcagctgctggccaacctgagcgccatccaggagcagtgggagaccaagtggaagacagtgcagccccacacagtgacagccctgaggaacagcgagaagggcttcaatggagaagattttgagcggctgaccaagatctgtgccacccaccaggaccccctgctgagcaagcacaagattgctgctgtggagaagagccaggagaggaagtgcagcacccagctgctggtgtctgaggaccccaaggagggcggggccaccaccaaggagagcgagagcaagacctgcctgggcacagagagcagcaaggagagccagcacacagtggagcccctgggcagcagcccctgctgccaccagatggatgtgcagacagacagccccagcctgtctgtgacagctgggaaggaccacatggaggagctgctgtgcagcgctgaggccaccctggccctgcacacccagagcagcgagacagctggcagccccagcggccctgacagcagtgaagatgcctgtgaagatgacagccggctgcagctggcccagacagaggcctgccaggatgtggcccgcatcgagggcattgctgaggaccccaaggtgttcctgagcagcaagagcaagacagagcccctcatcagccctggctgtgaccgcatccccccagccctgatcagcgagggcaagtacagccaggcccagaggaaggagctgcggctgcccctgagagatgccagcgaggccctgcccacagaccagctggagaacaatgagctgaatgagctgcagcagcctgacctgacagacagtgatggcaagagcccccaggcccaggccgacagtgatggctctgaaaatgtgctgtgtggcaacaaccagatcagtgacctgggcatcctgctgcctgaggtgtgcatggcccctgaggagaagggggacaaggatgaccagctgaacaaggagacagaggactacctgaacagcctgctggagggctgcctgaaggacacagaggacagcctgtcctatgaggacaaccaggatgatgacagcgacctgctgcaggacctgagccctgaggaggccagctacagcctgcaggagaacctgcccagtgatgagagctgcctgagcctggatgacctggccaagagaattgaaattgctgaggtgaaccagaggtag

SEQ ID NO: 148377 - DNA, 2178 bp, synthetic construct
  misc_feature 1..2178: note = Description of Artificial Sequence: Synthetic coding sequence
  source 1..2178: mol_type = other DNA
atggatgacagcgacacccccacctactacctgcagatcgagccccaggacggctgccaccctggggacagcgtggagaggtctgtgacctgcctgcccagcgccagtgatgaaaatgaaaaccagctggatggagatggccacgagcacctgaccagcagtgacagcgccatgggcaagccccaggtgtctgagcaggacagcctgaacaacaatgaaagctgcaccctgagctgtgaggtggccgccggggagaacctgcagaacaccctgtgtgaggccagcagagatgagcaggccttcctgggcaaggacaagaagatccctgggaagaggagccccaggagcaagaagggcacagccaagaagatccccccaggcctcttcagcggggacatcgcccccctgatgcaggagaaggtgctgtctgctgtgacctatgctgtggatgatgaggaggccgctgaggtgaatgccaatgagcagcctgaggcccccaagctggtgctgcagagcctcttcagcctcatccggggggaggtggagcagctggacagccgggccctgcccctgtgcctgcaccagattgctgagagctacttccaggaggaggactatgagaaggccatgaagttcatccagctggagcggctgtaccacgagcagctgctggccaacctgagcgccatccaggagcagtgggagaccaagtggaagacagtgcagccccacacagtgacagccctgaggaacagcgagaagggcttcaatggagaagattttgagcggctgaccaagatctgtgccacccaccaggaccccctgctgagcaagcacaagattgctgctgtggagaagagccaggagaggaagtgcagcacccagctgctggtgtctgaggaccccaaggagggcggggccaccaccaaggagagcgagagcaagacctgcctgggcacagagagcagcaaggagagccagcacacagtggagcccctgggcagcagcccctgctgccaccagatggatgtgcagacagacagccccagcctgtctgtgacagctgggaaggaccacatggaggagctgctgtgcagcgctgaggccaccctggccctgcacacccagagcagcgagacagctggcagccccagcggccctgacagcagtgaagatgcctgtgaagatgacagccggctgcagctggcccagacagaggcctgccaggatgtggcccgcatcgagggcattgctgaggaccccaaggtgttcctgagcagcaagagcaagacagagcccctcatcagccctggctgtgaccgcatccccccagccctgatcagcgagggcaagtacagccaggcccagaggaaggagctgcggctgcccctgagagatgccagcgaggccctgcccacagaccagctggagaacaatgagctgaatgagctgcagcagcctgacctgacagacagtgatggcaagagcccccaggcccaggccgacagtgatggctctgaaaatgtgctgtgtggcaacaaccagatcagtgacctgggcatcctgctgcctgaggtgtgcatggcccctgaggagaagggggacaaggatgaccagctgaacaaggagacagaggactacctgaacagcctgctggagggctgcctgaaggacacagaggacagcctgtcctatgaggacaaccaggatgatgacagcgacctgctgcaggacctgagccctgaggaggccagctacagcctgcaggagaacctgcccagtgatgagagctgcctgagcctggatgacctggccaagagaattgaaattgctgaggtggtgcccacagagggcctggtgtccatcctgaagaagagaaatgacacagtgggggaccacccagcccagatgcagcacaagcccagcaagagaagagtgcgcttccaggagattgatgacagcctggaccaggatgaggtgggcggcggcagctgcatcctgctggtgctgctgtgcatcgccaccgtcttcctgtctgtgggcggcacagccctgtactgcacctttggagacatggagagccctgtgtgcacagactttgctgacaacatggacttctactacaccaagctgctgcagggcgtggccgagctgaagcactggatctacctgtcctag

SEQ ID NO: 148378 - DNA, 3057 bp, synthetic construct
  misc_feature 1..3057: note = Description of Artificial Sequence: Synthetic coding sequence
  source 1..3057: mol_type = other DNA
atgaagatgtggctgctggtgagccacctggtgatcatcagcatcaccacctgcctggccgagttcacctggtaccgccgctatggccacggcgtgtctgaagaagataaaggatttggccccatctttgaggagcagcccatcaacaccatctacccagaggagagcctggagggcaaggtgtccctgaactgccgggcccgggccagccccttccctgtgtacaagtggaggatgaacaatggagatgtggacctgaccagtgaccgctacagcatggtgggcggcaacctggtgatcaacaacccagacaagcagaaggatgctggcatctactactgcctggccagcaacaactacggcatggtgcgcagcacagaggccaccctgagctttggctacctggaccccttccccccagaggagaggcctgaggtgcgggtgaaggagggcaagggcatggtgctgctgtgtgaccccccctaccacttcccagatgacctgagctaccgctggctgctgaatgagttccctgtgttcatcaccatggacaagagaagatttgtgtcccagaccaatggaaacctgtacatcgccaacgtggaggccagtgacaagggcaactacagctgctttgtgagcagccccagcatcaccaagtctgtgttcagcaagttcatccccctcatccccatccctgagaggaccaccaagccctacccagctgacatcgtggtgcagttcaaggatgtgtatgccctgatgggccagaatgtgaccctggagtgctttgccctgggcaaccctgtgcctgacatccgctggaggaaggtgctggagcccatgcccagcacagctgagatcagcaccagcggggctgtgctgaagatcttcaacatccagctggaggatgagggcatctatgaatgtgaggccgagaacatccggggcaaggacaagcaccaggcccgcatctacgtgcaggccttccctgagtgggtggagcacatcaatgacacagaggtggacatcggcagtgacctgtactggccctgtgtggccaccgggaagcccatccccaccatccgctggctgaagaatggctacgcctaccacaagggggagctgcggctgtatgatgtgacctttgaaaatgccggcatgtaccagtgcatcgccgagaacacctatggagccatctatgccaatgctgagctgaagatcctggccctggcccccacctttgagatgaaccccatgaagaagaagatcctggccgccaagggcggccgggtcatcatcgagtgcaagcccaaggccgcccccaagcccaagttctcctggagcaagggcacagagtggctggtgaacagcagccgcatcctgatctgggaggatggcagcctggagatcaacaacatcaccagaaatgatggcggcatctacacctgctttgctgagaacaacagaggcaaggccaacagcacaggcaccctggtgatcacagaccccacccgcatcatcctggcccccatcaatgctgacatcaccgtgggggagaatgccaccatgcagtgtgccgccagctttgatcctgccctggacctgacctttgtgtggagcttcaacggctacgtgattgacttcaacaaggagaacatccactaccagaggaacttcatgctggacagcaatggagagctgctgatcagaaatgcccagctgaagcacgccggccgctacacctgcacagcccagaccatcgtggacaacagcagcgccagcgctgacctggtggtgcggggccccccaggccccccaggcggcctgagaattgaggacatccgggccacctctgtggccctgacctggagccggggcagtgacaaccacagccccatcagcaagtacaccatccagaccaagaccatcctgagtgatgactggaaggatgccaagacagacccccccatcatcgagggcaacatggaggccgcccgggctgtggacctgatcccctggatggagtatgagttccgggtggtggccaccaacaccctgggccgcggggagcccagcatccccagcaaccgcatcaagacagatggagctgccccaaatgtggcccccagtgatgtgggcggcggcggcggcaggaaccgggagctgaccatcacctgggcccccctgagccgggagtaccactacggcaacaactttggctacatcgtggccttcaagccctttgatggagaggagtggaagaaggtgacagtgaccaacccagacaccggccgctacgtgcacaaggatgagaccatgagccccagcacagccttccaggtgaaggtgaaggccttcaacaacaagggagatggcccctacagcctggtggccgtcatcaacagcgcccaggatgcccccagcgaggcccccacagaggtgggcgtgaaggtgctgagcagcagcgagatctctgtgcactgggagcacgtgctggagaagatcgtggagagctaccagatccgctactgggccgcccatgacaaggaggaggccgccaacagagtgcaggtgaccagccaggagtacagcgcccggctggagaacctgctgcctgacacccagtacttcatcgaggtgggcgcctgcaacagcgctggctgcggccccccaagtgacatgattgaggccttcaccaagaaggccccacccagccagcccccacgcatcatcagctctgtgcgcagcggcagccgctacatcatcacctgggaccacgtggtggccctgagcaatgaaagcacagtgacaggctacaaggtgctgtacagaccagatggccagcatgatggcaagctgtacagcacccacaagcacagcattgaggtgcccatccccagagatggagaatatgtggtggaggtgcgggcccacagtgatggaggagatggagtggtgtcccaggtgaagatcagcggggcccccaccctgagccccagcctgctgggcctgctgctgcctgccttcggcatcctggtgtacctggagttctag

SEQ ID NO: 148379 - DNA, 3024 bp, synthetic construct
  misc_feature 1..3024: note = Description of Artificial Sequence: Synthetic coding sequence
  source 1..3024: mol_type = other DNA
atgaagatgtggctgctggtgagccacctggtgatcatcagcatcaccacctgcctggccgtgtctgaggaggacaagggcttcggccccatctttgaggagcagcccatcaacaccatctacccagaggagagcctggagggcaaggtgtccctgaactgccgggcccgggccagccccttccctgtgtacaagtggaggatgaacaatggagatgtggacctgaccagtgaccgctacagcatggtgggcggcaacctggtgatcaacaacccagacaagcagaaggatgctggcatctactactgcctggccagcaacaactacggcatggtgcgcagcacagaggccaccctgagctttggctacctggaccccttccccccagaggagaggcctgaggtgcgggtgaaggagggcaagggcatggtgctgctgtgtgaccccccctaccacttcccagatgacctgagctaccgctggctgctgaatgagttccctgtgttcatcaccatggacaagagaagatttgtgtcccagaccaacggcaacctgtacatcgccaacgtggaggccagtgacaagggcaactacagctgctttgtgagcagccccagcatcaccaagagcgtcttcagcaagttcatccccctcatccccatccctgagaggaccaccaagccctacccagctgacatcgtggtgcagttcaaggatgtgtatgccctgatgggccagaatgtgaccctggagtgctttgccctgggcaaccctgtgcctgacatccgctggaggaaggtgctggagcccatgcccagcacagctgagatcagcaccagcggggctgtgctgaagatcttcaacatccagctggaggatgagggcatctatgaatgtgaggccgagaacatccggggcaaggacaagcaccaggcccgcatctacgtgcaggccttccctgagtgggtggagcacatcaatgacacagaggtggacattggaagtgacctgtactggccctgtgtggccaccgggaagcccatccccaccatccgctggctgaagaatggctacgcctaccacaagggggagctgcggctgtatgatgtgacctttgaaaatgccggcatgtaccagtgcatcgccgagaacacctacggggccatctatgccaatgctgagctgaagatcctggccctggcccccacctttgagatgaaccccatgaagaagaagatcctggccgccaagggcggccgggtcatcatcgagtgcaagcccaaggccgcccccaagcccaagttctcctggagcaaaggaacagagtggctggtgaacagcagccgcatcctgatctgggaggatggcagcctggagatcaacaacatcaccagaaatgatggcggcatctacacctgctttgctgagaacaacagaggcaaggccaacagcacaggcaccctggtgatcacagaccccacccgcatcatcctggcccccatcaatgctgacatcaccgtgggagaaaatgccaccatgcagtgtgccgccagctttgatcctgccctggacctgacctttgtgtggagcttcaacggctacgtgattgacttcaacaaggagaacatccactaccagaggaacttcatgctggacagcaatggagagctgctgatcagaaatgcccagctgaagcatgctggccgctacacctgcacagcccagaccatcgtggacaacagcagcgccagcgctgacctggtggtgcggggccccccaggccccccaggcggcctgagaattgaggacatccgggccacctctgtggccctgacctggagccggggcagtgacaaccacagccccatcagcaagtacaccatccagaccaagaccatcctgagtgatgactggaaggatgccaagacagatcctcccatcatcgagggcaacatggaggccgcccgggctgtggacctgatcccctggatggagtatgagttccgggtggtggccaccaacaccctgggccgcggggagcccagcatccccagcaaccgcatcaagacagatggagctgcccccaacgtggcccccagtgatgtgggcggcggcggcggcaggaaccgggagctgaccatcacctgggcccccctgagccgggagtaccactacggcaacaactttggctacatcgtggccttcaagccctttgatggagaggagtggaagaaggtgacagtgaccaacccagacaccggccgctacgtgcacaaggatgagaccatgagccccagcacagccttccaggtgaaggtgaaggccttcaacaacaagggagatggcccctacagcctggtggccgtcatcaacagcgcccaggatgcccccagcgaggcccccacagaggtgggcgtgaaggtgctgagcagcagcgagatctctgtgcactgggagcacgtgctggagaagatcgtggagagctaccagatccgctactgggccgcccatgacaaggaggaggccgccaacagagtgcaggtgaccagccaggagtacagcgcccggctggagaacctgctgcctgacacccagtacttcatcgaggtgggcgcctgcaacagcgctggctgcggcccccccagcgacatgattgaggccttcaccaagaaggccccacccagccagcccccacgcatcatcagctctgtgcgcagcggcagccgctacatcatcacctgggaccacgtggtggccctgagcaatgaaagcacagtgacaggctacaaggtgctgtacagaccagatggccagcatgatggcaagctgtacagcacccacaagcacagcattgaggtgcccatccccagagatggagaatatgtggtggaggtgcgggcccacagtgatggaggagatggagtggtgtcccaggtgaagatcagcggggcccccaccctgagccccagcctgctgggcctgctgctgcctgccttcggcatcctggtgtacctggagttctag

SEQ ID NO: 148380 - DNA, 1884 bp, synthetic construct
  misc_feature 1..1884: note = Description of Artificial Sequence: Synthetic coding sequence
  source 1..1884: mol_type = other DNA
atgaagatgtggctgctggtgagccacctggtgatcatcagcatcaccacctgcctggccgagttcacctggtaccgccgctatggccacggcgtgtctgaagaagataaaggatttggccccatctttgaggagcagcccatcaacaccatctacccagaggagagcctggagggcaaggtgtccctgaactgccgggcccgggccagccccttccctgtgtacaagtggaggatgaacaatggagatgtggacctgaccagtgaccgctacagcatggtgggcggcaacctggtgatcaacaacccagacaagcagaaggatgctggcatctactactgcctggccagcaacaactacggcatggtgcgcagcacagaggccaccctgagctttggctacctggaccccttccccccagaggagaggcctgaggtgcgggtgaaggagggcaagggcatggtgctgctgtgtgaccccccctaccacttcccagatgacctgagctaccgctggctgctgaatgagttccctgtgttcatcaccatggacaagagaagatttgtgtcccagaccaatggaaacctgtacatcgccaacgtggaggccagtgacaagggcaactacagctgctttgtgagcagccccagcatcaccaagtctgtgttcagcaagttcatccccctcatccccatccctgagaggaccaccaagccctacccagctgacatcgtggtgcagttcaaggatgtgtatgccctgatgggccagaatgtgaccctggagtgctttgccctgggcaaccctgtgcctgacatccgctggaggaaggtgctggagcccatgcccagcacagctgagatcagcaccagcggggctgtgctgaagatcttcaacatccagctggaggatgagggcatctatgaatgtgaggccgagaacatccggggcaaggacaagcaccaggcccgcatctacgtgcaggccttccctgagtgggtggagcacatcaatgacacagaggtggacatcggcagtgacctgtactggccctgtgtggccaccgggaagcccatccccaccatccgctggctgaagaatggctacgcctaccacaagggggagctgcggctgtatgatgtgacctttgaaaatgccggcatgtaccagtgcatcgccgagaacacctatggagccatctatgccaatgctgagctgaagatcctggccctggcccccacctttgagatgaaccccatgaagaagaagatcctggccgccaagggcggccgggtcatcatcgagtgcaagcccaaggccgcccccaagcccaagttctcctggagcaagggcacagagtggctggtgaacagcagccgcatcctgatctgggaggatggcagcctggagatcaacaacatcaccagaaatgatggcggcatctacacctgctttgctgagaacaacagaggcaaggccaacagcacaggcaccctggtgatcacagaccccacccgcatcatcctggcccccatcaatgctgacatcaccgtgggggagaatgccaccatgcagtgtgccgccagctttgatcctgccctggacctgacctttgtgtggagcttcaacggctacgtgattgacttcaacaaggagaacatccactaccagaggaacttcatgctggacagcaatggagagctgctgatcagaaatgcccagctgaagcacgccggccgctacacctgcacagcccagaccatcgtggacaacagcagcgccagcgctgacctggtggtgcggggcaagaacaggaagggcggggagaagaacatggtggacagcttcctgcctgtgtgtgccagcctgccccccacctggtag

SEQ ID NO: 148381 - DNA, 1884 bp, synthetic construct; identical to SEQ ID NO: 148380
  misc_feature 1..1884: note = Description of Artificial Sequence: Synthetic coding sequence
  source 1..1884: mol_type = other DNA

SEQ ID NO: 148382 - DNA, 1884 bp, synthetic construct; identical to SEQ ID NO: 148380
  misc_feature 1..1884: note = Description of Artificial Sequence: Synthetic coding sequence
  source 1..1884: mol_type = other DNA

SEQ ID NO: 148383 - DNA, 258 bp, synthetic construct
  misc_feature 1..258: note = Description of Artificial Sequence: Synthetic coding sequence
  source 1..258: mol_type = other DNA
atgaagatgtggctgctggtgagccacctggtgatcatcagcatcaccacctgcctggccgagttcacctggtaccgccgctatggccacggcgtgtctgaagaagataaaggatttggccccatctttgaggagcagcccatcaacaccatctacccagaggagagcctggagggcaaggtgtccctgaactgccgggcccgggccagccccttccctgtgtacaagtggaggatgaacaatggagatgtggactag

SEQ ID NO: 148384 - DNA, 3057 bp, synthetic construct; identical to SEQ ID NO: 148378
  misc_feature 1..3057: note = Description of Artificial Sequence: Synthetic coding sequence
  source 1..3057: mol_type = other DNA

SEQ ID NO: 148385 - DNA, 192 bp, synthetic construct
  misc_feature 1..192: note = Description of Artificial Sequence: Synthetic coding sequence
  source 1..192: mol_type = other DNA
atgaagatgtggctgctggtgagccacctggtgatcatcagcatcaccacctgcctggccgagttcacctggtaccgccgctatggccacggcgtgtctgaagaagataaaggatttggccccatctttgaggagcagcccatcaacaccatctacccagaggagagcctggagggcaaggtgtccctgtag

SEQ ID NO: 148386 - DNA, 273 bp, synthetic construct
  misc_feature 1..273: note = Description of Artificial Sequence: Synthetic coding sequence
  source 1..273: mol_type = other DNA
atgaagatgtggctgctggtgagccacctggtgatcatcagcatcaccacctgcctggccgagttcacctggtaccgccgctatggccacggcgtgtctgaagaagataaaggatttggccccatctttgaggagcagcccatcaacaccatctacccagaggagagcctggagggcaaggtgtccctgaactgccgggcccgggccagccccttccctgtgtacaagtggaggatgaacaatggagatgtggacctgaccagtgacagatag

SEQ ID NO: 148387 - DNA, 222 bp, synthetic construct
  misc_feature 1..222: note = Description of Artificial Sequence: Synthetic coding sequence
  source 1..222: mol_type = other DNA
atgaagatgtggctgctggtgagccacctggtgatcatcagcatcaccacctgcctggccgagttcacctggtaccgccgctatggccacggcgtgtctgaagaagataaaggatttggccccatctttgaggagcagcccatcaacaccatctacccagaggagagcctggagggcaaggtgtccctgaactgccgggcccgggccagccccttcccctag

SEQ ID NO: 148388 - DNA, 3123 bp, synthetic construct
  misc_feature 1..3123: note = Description of Artificial Sequence: Synthetic coding sequence
  source 1..3123: mol_type = other DNA
atgggcacagccaccaggaggaagccccacctgctgctggtggccgctgtggccctggtgagcagcagcgcctggagcagcgccctgggcagccagaccacctttggacctgtgtttgaggaccagcccctgtctgtgctcttccctgaggagagcacagaggagcaggtgctgctggcctgccgggcccgggccagccccccagccacctaccgctggaagatgaatggaacagagatgaagctggagcccggcagccgccaccagctggtgggcggcaacctggtgatcatgaaccccaccaaggcccaggatgctggggtgtaccagtgcctggccagcaaccctgtgggcaccgtggtgtcccgggaggccatcctgcgcttcggcttcctgcaggagttcagcaaggaggagcgggaccctgtgaaggcccacgagggctggggcgtgatgctgccctgcaaccccccagcccactacccaggcctgagctaccgctggctgctgaatgagttccccaacttcatccccacagatggccgccactttgtgtcccagaccactggaaacctgtacatcgcccggaccaatgccagtgacctgggcaactacagctgcctggccaccagccacatggacttcagcaccaagtctgtgttcagcaagtttgcccagctgaacctggccgctgaggacacccggctgtttgcccccagcatcaaggcccgcttccctgctgagacctacgccctggtgggccagcaggtgaccctggagtgctttgccttcggcaaccctgtgccccgcatcaagtggaggaaggtggatggcagcctgagcccccagtggaccacagctgagcccaccctgcagatccccagcgtgtcctttgaagatgagggcacctatgaatgtgaggccgagaacagcaagggccgggacacagtgcagggccgcatcatcgtgcaggcccagcctgagtggctgaaggtgatcagtgacacagaggccgacatcggcagcaacctgcgctggggctgtgccgctgctgggaagccccggcccaccgtgcgctggctgagaaatggagagcccctggccagccagaacagagtggaggtgctggccggggacctgcgcttcagcaagctgagcctggaggacagcggcatgtaccagtgtgtggccgagaacaagcacggcaccatctatgccagcgctgagctggccgtgcaggccctggccccagacttccggctgaaccctgtgagaagactcatcccagctgcccggggcggggagatcctgatcccctgccagccccgggccgcccccaaggctgtggtgctgtggagcaagggcacagagatcctggtgaacagcagccgggtgacagtgaccccagatggcaccctcatcatccggaacatcagcagaagtgatgagggcaagtacacctgctttgctgagaacttcatgggcaaggccaacagcacaggcatcctgtctgtgagagatgccaccaagatcaccctggcccccagcagcgctgacatcaacctgggggacaacctgaccctgcagtgccacgccagccatgaccccaccatggacctgaccttcacctggaccctggatgacttccccatcgactttgacaagccaggcggccactacagaaggaccaacgtgaaggagaccatcggggacctgaccatcctgaatgcccagctgcggcatggaggcaagtacacctgcatggcccagacagtggtggacagcgccagcaaggaggccaccgtgctggtgcggggccccccaggccccccaggaggagtggtggtgcgggacattggagacaccaccatccagctgtcctggagccggggctttgacaaccacagccccatcgccaagtacaccctgcaggcccggaccccacctgctgggaagtggaagcaggtgaggaccaacccagccaacatcgagggcaatgctgagacagcccaggtgctgggcctgaccccctggatggactatgagttccgggtcatcgccagcaacatcctgggcactggagagcccagcggccccagcagcaagatccgcacccgggaggccgcccccagcgtggcccccagcggcctgagcggcggcggcggggcccctggagagctgattgtgaactggacccccatgagccgggagtaccagaatggagatggcttcggctacctgctgtccttccggcggcagggcagcacccactggcagacagcccgggtgcctggagcagatgcccagtactttgtgtacagcaatgaatctgtgcggccctacaccccatttgaggtgaagatccgcagctacaacagaagaggagatggccctgagagcctgacagccctggtgtacagcgctgaggaggagccccgggtggcccccaccaaggtgtgggccaagggcgtgagcagcagcgagatgaatgtgacctgggagcctgtgcagcaggacatgaatggcatcctgctgggctatgagatccgctactggaaggccggggacaaggaggccgctgctgacagagtgaggacagctggcctggacaccagcgcccgggtgtctggcctgcaccccaacaccaagtaccacgtgacagtgcgggcctacaacagagctggcaccggccctgccagccccagcgccaatgccaccaccatgaagcccccaccaagaagacctcctggcaacatctcctggaccttcagcagcagcagcctgagcatcaagtgggaccctgtggtgcccttcagaaatgaatctgctgtgacaggctacaagatgctgtaccagaatgacctgcacctgacccccaccctgcacctgaccgggaagaactggattgagatccctgtgcctgaagatattggacatgccctggtgcagatccgcaccactggacctggaggagatggcatcccagctgaggtgcacatcgtgagaaatggaggcacctccatgatggtggagaacatggctgtgcggcctgccccccaccctggcaccgtcatcagccacagcgtggccatgctgatcctgattggcagcctggagctgtag

SEQ ID NO: 148389 - DNA, 3087 bp, synthetic construct
  misc_feature 1..3087: note = Description of Artificial Sequence: Synthetic coding sequence
  source 1..3087: mol_type = other DNA
atgatgttcccctggaagcagctgatcctgctgtccttcatcggctgcctgggcggggagctgctgctgcagggccctgtgttcatcaaggagcccagcaacagcatcttccctgtgggcagcgaggacaagaagatcaccctgcactgtgaggcccggggcaaccccagcccccactaccgctggcagctgaatggaagtgacatcgacatgtccatggagcaccgctacaagctgaatggaggcaacctggtggtgatcaaccccaacagaaactgggacaccggcacctaccagtgctttgccaccaacagcctgggcaccatcgtgtcccgggaggccaagctgcagtttgcctacctggagaacttcaagaccaagatgaggagcacagtgtctgtgcgggagggccagggcgtggtgctgctgtgtggccccccaccccacagcggggagctgtcctatgcctggatcttcaatgagtaccccagctttgtggaggaggacagcagaagatttgtgtcccaggagaccggccacctgtacatcagcaaggtggagcccagtgatgtgggcaactacacctgtgtggtgacctccatggtgaccaatgcccgggtgctgggcagccccacccccctggtgctgcggagtgatggagtgatgggagaatatgagcccaagattgaggtgcagtttcctgagaccctgcctgctgccaagggcagcacagtgaagctggagtgctttgccctgggcaaccccatcccccagatcaactggaggagaagtgatggcctgcccttcagcagcaagatcaagctgaggaagttctctggagtgctggagatccccaacttccagcaggaggatgctggcagctatgagtgcatcgccgagaacagccggggcaagaatgtggcccggggccgcctgacctactatgccaagccccactgggtgcagctgatcaaggatgtggagattgctgtggaggacagcctgtactgggagtgccgggccagcggcaagcccaagcccagctaccgctggctgaagaatggagctgccctggtgctggaggagaggacccagattgaaaatggagccctgaccatcagcaacctgtctgtgacagattctggcatgttccagtgcatcgccgagaacaagcacggcctggtgtacagcagcgctgagctgaaggtggtggccagcgccccagacttcagcaagaaccccatgaagaagctggtgcaggtgcaggtgggcagcctggtgtccctggactgcaagccccgggccagcccccgggccctgagctcctggaagaagggagatgtgtctgtgcaggagcacgagcgcatcagcctgctgaatgatggcggcctgaagatcgccaacgtgaccaaggcagatgctggcacctacacctgcatggccgagaaccagtttgggaaggccaacggcaccacccacctggtggtgacagagcccacccgcatcaccctggcccccagcaacatggatgtgtctgtgggggagagcgtcatcctgccctgccaggtgcagcacgaccccctgctggacatcatcttcacctggtacttcaacggggccctggccgacttcaagaaggatggcagccactttgagaaggtgggcggcagcagcagcggggacctgatgatccggaacatccagctgaagcacagcggcaagtatgtgtgcatggtgcagacaggagtggacagcgtgagcagcgctgctgacctgattgtgcggggcagccctggccccccagaaaatgtgaaggtggatgagatcacagacaccacagcccagctgtcctggaaggagggcaaggacaaccacagccctgtgatctcctacagcatccaggcccggacccccttctctgtgggctggcagacagtgaccaccgtgcctgaggtgattgatggcaagacccacacagccaccgtggtggagctgaacccctgggtggagtatgagttccgggtggtggccagcaacaagattggaggaggagagcccagcctgcccagcgagaaggtgaggacagaggaggccgtgcctgaggtgcccccatctgaggtgaatggaggcggcggcagccgctctgagctggtgatcacctgggaccctgtgcctgaggagctgcagaatggagagggcttcggctacgtggtggccttccggcccctgggcgtgaccacctggatccagacagtggtgaccagcccagacacccccaggtatgtgttcagaaatgaaagcatcgtgccctacagcccctatgaggtgaaggtgggcgtgtacaacaacaagggggagggccccttcagccctgtgaccaccgtcttctctgctgaggaggagcccaccgtggcccccagccaggtgtctgccaacagcctgagcagcagcgagattgaggtgtcctggaacaccatcccctggaagctgagcaatggccacctgctgggctatgaggtgcgctactggaatggaggcggcaaggaggagagcagcagcaagatgaaggtggccggaaatgagaccagcgcccggctgcggggcctgaagagcaacctggcctactacacagctgtgcgggcctacaacagcgctggagctggccccttcagcgccaccgtgaatgtgaccaccaagaagaccccacccagccagcccccaggaaatgtggtgtggaatgccacagacaccaaggtgctgctgaactgggagcaggtgaaggccatggagaatgaaagtgaggtgacaggctacaaggtgttctaccgcaccagcagccagaacaacgtgcaggtgctgaacaccaacaagaccagcgctgagctggtgctgcccatcaaggaggactacatcatcgaggtgaaggccaccacagatggaggagatggcaccagcagcgagcagatccgcatcccccgcatcacctccatggatgcccggggcagcaccagcgccatcagcaatgtgcaccccatgagcagctacatgcccatcgtgctcttcctgattgtgtatgtgctgtggtag

SEQ ID NO: 148390 - DNA, 2424 bp, synthetic construct
  misc_feature 1..2424: note = Description of Artificial Sequence: Synthetic coding sequence
  source 1..2424: mol_type = other DNA
atgggagaatatgagcccaagattgaggtgcagtttcctgagaccgtgcccacagccaagggggccaccgtgaagctggagtgctttgccctgggcaaccctgtgcccaccatcatctggaggagagcagatggcaagcccatcgccaggaaggcccggcggcacaagagcaatggcatcctggagatccccaacttccagcaggaggatgctggcctgtatgaatgtgtggccgagaacagccggggcaagaatgtggcccggggccagctgaccttctacgcccagcccaactggatccagaagatcaatgacatccacgtggccatggaggagaatgtgttctgggagtgcaaggccaacggccggcccaagcccacctacaagtggctgaagaatggagagcccctgctgacccgggaccgcatccagatcgagcagggcaccctgaacatcaccatcgtgaacctgagtgatgctggcatgtaccagtgcctggccgagaacaagcatggagtcatcttcagcaatgctgagctgtctgtgattgctgtgggccctgacttcagcaggaccctgctgaagagggtgaccctggtgaaggtgggcggggaggtggtgattgagtgcaagcccaaggccagccccaagcctgtgtacacctggaagaagggccgggacatcctgaaggaaaatgaaagaatcaccatcagtgaagatggcaacctgcgcatcatcaacgtgaccaagagtgatgctggcagctacacctgcatcgccaccaaccacttcggcacagccagcagcacaggcaacctggtggtgaaggaccccaccagggtgatggtgccccccagctccatggatgtgacagtgggggagagcatcgtgctgccctgccaggtgacccatgaccacagcctggacatcgtgttcacctggagcttcaacggccacctgattgactttgacagagatggagaccactttgagcgggtgggcggccaggacagcgctggggacctgatgatccggaacatccagctgaagcacgccggcaagtatgtgtgcatggtgcagacctctgtggaccggctgtctgctgctgctgacctgattgtgcggggccccccaggccccccagaggccgtgaccattgatgagatcacagacaccacagcccagctgtcctggaggcctggccctgacaaccacagccccatcaccatgtatgtgatccaggcccggacccccttctctgtgggctggcaggccgtgtccacagtgcctgagctgattgatggcaagaccttcaccgccaccgtggtgggcctgaacccctgggtggagtatgagttcagaacagtggccgccaacgtgattggaattggagagcccagccggcccagcgagaagagaagaacagaggaggccctgcctgaggtgaccccagccaacgtgtctgggggcggcggcagcaagtctgagctggtgatcacctgggagaccgtgcctgaggagctgcagaatggccggggcttcggctacgtggtggccttccggccctacggcaagatgatctggatgctgactgtgctggccagcgcagatgccagccgctacgtgttcagaaatgaatctgtgcaccccttcagcccctttgaggtgaaggtgggcgtcttcaacaacaagggggagggccccttcagccccaccaccgtggtgtacagcgctgaggaggagcccaccaagcccccagccagcatctttgcccggagcctgagcgccacagacatcgaggtgttctgggccagccccctggagaagaacagaggccgcatccagggctatgaggtgaagtactggaggcatgaggacaaggaggagaatgccaggaagatcagaacagtgggcaaccagaccagcaccaagatcaccaacctgaagggctctgtgctgtaccacctggccgtgaaggcctacaacagcgctggcaccggccccagcagcgccaccgtgaatgtgaccaccaggaagcccccacccagccagcccccaggcaacatcatctggaacagcagtgacagcaagatcatcctgaactgggaccaggtgaaggccctggacaatgaaagtgaggtgaagggctacaaggtgctgtaccgctggaaccggcagagcagcaccagcgtcatcgagaccaacaagacctctgtggagctgagcctgccctttgatgaggactacatcatcgagatcaagcccttcagtgatggaggagatggcagcagcagcgagcagatccgcatccccaagatcagcaatgcctatgcccggggcagcggggccagcaccagcaatgcctgcaccctgagcgccatcagcaccatcatgatcagcctgacagcccggagcagcctgtag

SEQ ID NO: 148391 - DNA, 2097 bp, synthetic construct
  misc_feature 1..2097: note = Description of Artificial Sequence: Synthetic coding sequence
  source 1..2097: mol_type = other DNA
atggaggagaatgtgttctgggagtgcaaggccaacggccggcccaagcccacctacaagtggctgaagaatggagagcccctgctgacccgggaccgcatccagatcgagcagggcaccctgaacatcaccatcgtgaacctgagtgatgctggcatgtaccagtgcctggccgagaacaagcacggcgtcatcttcagcaatgctgagctgtctgtgattgctgtgggccctgacttcagcaggaccctgctgaagagggtgaccctggtgaaggtgggcggggaggtggtgattgagtgcaagcccaaggccagccccaagcctgtgtacacctggaagaagggccgggacatcctgaaggaaaatgaaagaatcaccatcagtgaagatggcaacctgcgcatcatcaacgtgaccaagagtgatgctggcagctacacctgcatcgccaccaaccactttggaacagccagcagcactggaaacctggtggtgaaggaccccaccagggtgatggtgccccccagctccatggatgtgacagtgggggagagcatcgtgctgccctgccaggtgacccatgaccacagcctggacatcgtgttcacctggagcttcaacggccacctgattgactttgacagagatggagaccactttgagcgggtgggcggccaggacagcgctggggacctgatgatccggaacatccagctgaagcatgctgggaagtatgtgtgcatggtgcagacctctgtggaccggctgtctgctgctgctgacctgattgtgcggggccccccaggccccccagaggccgtgaccattgatgagatcacagacaccacagcccagctgtcctggaggcctggccctgacaaccacagccccatcaccatgtatgtgatccaggcccggacccccttctctgtgggctggcaggccgtgtccacagtgcctgagctgattgatggcaagaccttcaccgccaccgtggtgggcctgaacccctgggtggagtatgagttcagaacagtggccgccaacgtcatcggcatcggggagcccagccggcccagcgagaagagaagaacagaggaggccctgcctgaggtgaccccagccaacgtgtctgggggcggcggcagcaagtctgagctggtgatcacctgggagaccgtgcctgaggagctgcagaatggccggggcttcggctacgtggtggccttccggccctacggcaagatgatctggatgctgactgtgctggccagcgcagatgccagccgctacgtgttcagaaatgaatctgtgcaccccttcagcccctttgaggtgaaggtgggcgtcttcaacaacaagggggagggccccttcagccccaccaccgtggtgtacagcgctgaggaggagcccaccaagcccccagccagcatctttgcccggagcctgagcgccacagacatcgaggtgttctgggccagccccctggagaagaacagaggccgcatccagggctatgaggtgaagtactggaggcatgaggacaaggaggagaatgccaggaagatcagaacagtgggcaaccagaccagcaccaagatcaccaacctgaagggctctgtgctgtaccacctggccgtgaaggcctacaacagcgctggcaccggccccagcagcgccaccgtgaatgtgaccaccaggaagcccccacccagccagcccccaggcaacatcatctggaacagcagtgacagcaagatcatcctgaactgggaccaggtgaaggccctggacaatgaaagtgaggtgaagggctacaaggtgctgtaccgctggaaccggcagagcagcacctctgtgattgagaccaacaagacctctgtggagctgagcctgccctttgatgaggactacatcatcgagatcaagcccttcagtgatggaggagatggcagcagcagcgagcagatccgcatccccaagatcagcaatgcctatgcccggggcagcggggccagcaccagcaatgcctgcaccctgagcgccatcagcaccatcatgatcagcctgacagcccggagcagcctgtag

SEQ ID NO: 148392 - DNA, 3081 bp, synthetic construct
  misc_feature 1..3081: note = Description of Artificial Sequence: Synthetic coding sequence
  source 1..3081: mol_type = other DNA
atgaggctgccctgggagctgctggtgctgcagagcttcatcctgtgcctggctgatgacagcaccctgcacggccccatcttcatccaggagcccagccctgtgatgttccccctggacagcgaggagaagaaggtgaagctgaactgtgaggtgaagggcaaccccaagccccacatccgctggaagctgaatggaacagatgtggacaccggcatggacttccgctacagcgtggtggagggcagcctgctgatcaacaaccccaacaagacccaggatgctggcacctaccagtgcacagccaccaacagctttggcaccatcgtgtcccgggaggccaagctgcagtttgcctacctggacaacttcaagaccaggaccaggagcacagtgtctgtgagaagaggccagggcatggtgctgctgtgtggccccccaccccacagcggggagctgtcctatgcctggatcttcaatgagtaccccagctaccaggacaacagaagatttgtgtcccaggagaccggcaacctgtacatcgccaaggtggagaagagtgatgtgggcaactacacctgtgtggtgaccaacacagtgaccaaccacaaggtgctgggcccccccacccccctcatcctgagaaatgatggagtgatgggagaatatgagcccaagattgaggtgcagtttcctgagaccgtgcccacagccaagggggccaccgtgaagctggagtgctttgccctgggcaaccctgtgcccaccatcatctggaggagagcagatggcaagcccatcgccaggaaggcccggcggcacaagagcaatggcatcctggagatccccaacttccagcaggaggatgctggcctgtatgaatgtgtggccgagaacagccggggcaagaatgtggcccggggccagctgaccttctacgcccagcccaactggatccagaagatcaatgacatccacgtggccatggaggagaatgtgttctgggagtgcaaggccaacggccggcccaagcccacctacaagtggctgaagaatggagagcccctgctgacccgggaccgcatccagatcgagcagggcaccctgaacatcaccatcgtgaacctgagtgatgctggcatgtaccagtgcctggccgagaacaagcacggcgtcatcttcagcaatgctgagctgtctgtgattgctgtgggccctgacttcagcaggaccctgctgaagagggtgaccctggtgaaggtgggcggggaggtggtgattgagtgcaagcccaaggccagccccaagcctgtgtacacctggaagaagggccgggacatcctgaaggaaaatgaaagaatcaccatcagtgaagatggcaacctgcgcatcatcaacgtgaccaagagtgatgctggcagctacacctgcatcgccaccaaccactttggaacagccagcagcactggaaacctggtggtgaaggaccccaccagggtgatggtgccccccagctccatggatgtgacagtgggggagagcatcgtgctgccctgccaggtgacccatgaccacagcctggacatcgtgttcacctggagcttcaacggccacctgattgactttgacagagatggagaccactttgagcgggtgggcggccaggacagcgctggggacctgatgatccggaacatccagctgaagcatgctgggaagtatgtgtgcatggtgcagacctctgtggaccggctgtctgctgctgctgacctgattgtgcggggccccccaggccccccagaggccgtgaccattgatgagatcacagacaccacagcccagctgtcctggaggcctggccctgacaaccacagccccatcaccatgtatgtgatccaggcccggacccccttctctgtgggctggcaggccgtgtccacagtgcctgagctgattgatggcaagaccttcaccgccaccgtggtgggcctgaacccctgggtggagtatgagttcagaacagtggccgccaacgtcatcggcatcggggagcccagccggcccagcgagaagagaagaacagaggaggccctgcctgaggtgaccccagccaacgtgtctgggggcggcggcagcaagtctgagctggtgatcacctgggagaccgtgcctgaggagctgcagaatggccggggcttcggctacgtggtggccttccggccctacggcaagatgatctggatgctgactgtgctggccagcgcagatgccagccgctacgtgttcagaaatgaatctgtgcaccccttcagcccctttgaggtgaaggtgggcgtcttcaacaacaagggggagggccccttcagccccaccaccgtggtgtacagcgctgaggaggagcccaccaagcccccagccagcatctttgcccggagcctgagcgccacagacatcgaggtgttctgggccagccccctggagaagaacagaggccgcatccagggctatgaggtgaagtactggaggcatgaggacaaggaggagaatgccaggaagatcagaacagtgggcaaccagaccagcaccaagatcaccaacctgaagggctctgtgctgtaccacctggccgtgaaggcctacaacagcgctggcaccggccccagcagcgccaccgtgaatgtgaccaccaggaagcccccacccagccagcccccaggcaacatcatctggaacagcagtgacagcaagatcatcctgaactgggaccaggtgaaggccctggacaatgaaagtgaggtgaagggctacaaggtgctgtaccgctggaaccggcagagcagcacctctgtgattgagaccaacaagacctctgtggagctgagcctgccctttgatgaggactacatcatcgagatcaagcccttcagtgatggaggagatggcagcagcagcgagcagatccgcatccccaagatcagcaatgcctatgcccggggcagcggggccagcaccagcaatgcctgcaccctgagcgccatcagcaccatcatgatcagcctgacagcccggagcagcctgtag

SEQ ID NO: 148393 - DNA, 3081 bp, synthetic construct; identical to SEQ ID NO: 148392
  misc_feature 1..3081: note = Description of Artificial Sequence: Synthetic coding sequence
  source 1..3081: mol_type = other DNA

SEQ ID NO: 148394 - DNA, 351 bp, synthetic construct
  misc_feature 1..351: note = Description of Artificial Sequence: Synthetic coding sequence
  source 1..351: mol_type = other DNA
atgaggctgccctgggagctgctggtgctgcagagcttcatcctgtgcctggctgatgacagcaccctgcacggccccatcttcatccaggagcccagccctgtgatgttccccctggacagcgaggagaagaaggtgaagctgaactgtgaggtgaagggcaaccccaagccccacatccgctggaagctgaatggaacagatgtggacaccggcatggacttccgctacagcgtggtggagggcagcctgctgatcaacaaccccaacaagacccaggatgctggcacctaccagtgcacagccaccaacagctttggcaccatcgtgtcccgggaggccaagctgtag

SEQ ID NO: 148395 - DNA, 3081 bp, synthetic construct; identical to SEQ ID NO: 148392
  misc_feature 1..3081: note = Description of Artificial Sequence: Synthetic coding sequence
  source 1..3081: mol_type = other DNA

SEQ ID NO: 148396 - DNA, 2097 bp, synthetic construct; identical to SEQ ID NO: 148391
  misc_feature 1..2097: note = Description of Artificial Sequence: Synthetic coding sequence
  source 1..2097: mol_type = other DNA

SEQ ID NO: 148397 - DNA, 165 bp, synthetic construct
  misc_feature 1..165: note = Description of Artificial Sequence: Synthetic coding sequence
  source 1..165: mol_type = other DNA
atgaggctgccctgggagctgctggtgctgcagagcttcatcctgtgcctggctgatgacagcaccctgcacggccccatcttcatccaggagcccagccctgtgatgttccccctggacagcgaggagaagaaggtgaagctgaactgtgaggtgaagggctag

SEQ ID NO: 148398 - DNA, 3303 bp, synthetic construct
  misc_feature 1..3303: note = Description of Artificial Sequence: Synthetic coding sequence
  source 1..3303: mol_type = other DNA
atggccagctcctggaagctgatgctgttcctgtctgtgaccatgtgcctgtctgagtacagcaagagcctgcccggcctgagcaccagctatgctgccctgctgcgcatcaagaagagcagcagcagcagcctgtttggcagcaagacccggccccgctacagcagccccagcctgggcaccctgagcgccagcagccccagctggctgggcgccgcccagaactactacagccccatcaacctgtaccacagcagtgatgccttcaagcaggatgagagcgtggactatggccctgtgtttgtgcaggagccagatgacatcatcttccccacagacagtgatgagaagaaggtggccctgaactgtgaggtgcggggcaaccctgtgcccagctaccgctggctgagaaatggaacagaaattgacctggagagtgactaccgctacagcctgattgatggcaccttcatcatcagcaaccccagcgaggccaaggacagcggccactaccagtgcctggccaccaacacagtgggcagcatcctgagccgggaggccaccctgcagtttgcctacctgggcaacttcagcggccgcaccaggtctgctgtgtctgtgcgggagggccagggcgtggtgctgatgtgcagccccccaccccacagccctgagatcatctacagctgggtgttcaatgagttccccagctttgtggccgaggacagccgccgcttcatcagccaggagactggaaacctgtacatcagcaaggtgcagaccagtgatgtgggcagctacatctgcctggtgaagaacacagtgaccaatgcccgggtgctgagcccccccacccccctgaccctgagaaatgatggagtgatgggagaatatgagcccaagattgaggtgcacttccccttcaccgtgacagctgccaagggcaccaccgtgaagatggagtgctttgccctgggcaaccctgtgcccaccatcacctggatgaaggtgaatggctacatccccagcaaggcccggctgaggaagagccaggccgtgctggagatccccaacgtgcagctggatgatgctggcatctatgagtgcagagctgagaacagccggggcaagaacagcttccggggccagctgcaggtgtacacctacccccactgggtggagaagctgaatgacacccagctggacagcggcagccccctgcgctgggagtgcaaggccaccgggaagccccggcccacctaccgctggctgaagaatggagtgcccctgagcccccagagccgggtggagatggtgaatggagtgctgatgatccacaacgtgaaccagagtgatgctggcatgtaccagtgcctggccgagaacaagtacggggccatctatgccagcgctgagctgaagatcctggccagcgcccccacctttgccctgaaccagctgaagaagaccatcatcgtgaccaaggaccaggaggtggtgattgagtgcaagccccagggcagccccaagcccaccatctcctggaagaagggggacagagctgtgcgggagaacaagagaattgccatcctgcctgatggcagcctgcgcatcctgaatgccagcaagagtgatgagggcaagtatgtgtgccgcggggagaatgtgtttggatctgctgagatcatcgccagcctgtctgtgaaggagcccacccgcatcgagctgacccccaagaggacagagctgactgtgggggagagcatcgtgctgaactgcaaggccatccatgatgccagcctggatgtgaccttctactggaccctgaagggccagcccatcgactttgaggaggagggcggccactttgagagcatccgggcccaggccagcagcgctgacctgatgatccggaacatcctgctgatgcatgctggccgctatggctgccgggtgcagaccacagctgacagcgtgtctgatgaagctgagctgctggtgcggggccccccaggccccccaggcatcgtcatcgtggaggagatcacagagagcacagccaccctgtcctggagccctgctgctgacaaccacagccccatcagcagctacaacctgcaggcccggagccccttcagcctgggctggcagacagtgaagacagtgcctgagatcatcactggagacatggagagcgccatggctgtggacctgaacccctgggtggagtatgagttccgggtggtggccaccaaccccatcggcaccggggaccccagcacccccagcaggatgatccgcaccaatgaagctgtgcccaagacagcccccaccaacgtgtctggccgcagcggcagaagacatgagctggtgattgcctgggagcctgtgtctgaggagttccagaatggagagggcttcggctacatcgtggccttccggcccaacggcacccggggctggaaggagaagatggtgaccagcagcgaggccagcaagttcatctacagagatgagagcgtgccccccctgaccccatttgaggtgaaggtgggcgtgtacaacaacaagggagatggccccttcagccagatcgtggtgatctgcagcgctgagggggagcccagcgctgcccccacagatgtgaaggccacctctgtgtctgtgtctgagatcctggtggcctggaagcacatcaaggagagcctgggccggccccagggctttgaggtgggctactggaaggacatggagcaggaggacacagctgagaccgtgaagaccagaggaaatgaaagctttgtgatcctgaccggcctggagggcaacaccctgtaccacttcaccgtgcgggcctacaacggggccggctacggcccccccagcagcgaggtgtctgccaccaccaagaagagcccccccagccaggcccccagcaacctgcgctgggagcagcagggcagccaggtgtccctgggctgggagcccgtcatccccctggccaatgaaagtgaggtggtgggctacaaggtgttctaccggcaggagggccacagcaacagccaggtgattgagacccagaagctgcaggccgtggtgcccctgcctgatgctggggtgtacatcatcgaggtgcgggcctacagcgagggcggagatggaacagccagcagccagatccgggtgcccagctacagcggcggcaagatcaccagcgcccagagcaccctgcacagcctgagcaccagcagcagctctgtgaccctgctgctggccctgatgatccccagcacctcctggtag

SEQ ID NO: 148399 - DNA, 3081 bp, synthetic construct
  misc_feature 1..3081: note = Description of Artificial Sequence: Synthetic coding sequence
  source 1..3081: mol_type = other DNA
atggccagctcctggaagctgatgctgttcctgtctgtgaccatgtgcctgtctgagagcgtggactatggccctgtgtttgtgcaggagccagatgacatcatcttccccacagacagtgatgagaagaaggtggccctgaactgtgaggtgcggggcaaccctgtgcccagctaccgctggctgagaaatggaacagaaattgacctggagagtgactaccgctacagcctgattgatggcaccttcatcatcagcaaccccagcgaggccaaggacagcggccactaccagtgcctggccaccaacacagtgggcagcatcctgagccgggaggccaccctgcagtttgcctacctgggcaacttcagcggccgcaccaggtctgctgtgtctgtgcgggagggccagggcgtggtgctgatgtgcagccccccaccccacagccctgagatcatctacagctgggtgttcaatgagttccccagctttgtggccgaggacagccgccgcttcatcagccaggagactggaaacctgtacatcagcaaggtgcagaccagtgatgtgggcagctacatctgcctggtgaagaacacagtgaccaatgcccgggtgctgagcccccccacccccctgaccctgagaaatgatggagtgatgggagaatatgagcccaagattgaggtgcacttccccttcaccgtgacagctgccaagggcaccaccgtgaagatggagtgctttgccctgggcaaccctgtgcccaccatcacctggatgaaggtgaatggctacatccccagcaaggcccggctgaggaagagccaggccgtgctggagatccccaacgtgcagctggatgatgctggcatctatgagtgcagagctgagaacagccggggcaagaacagcttccggggccagctgcaggtgtacacctacccccactgggtggagaagctgaatgacacccagctggacagcggcagccccctgcgctgggagtgcaaggccaccgggaagccccggcccacctaccgctggctgaagaatggagtgcccctgagcccccagagccgggtggagatggtgaatggagtgctgatgatccacaacgtgaaccagagtgatgctggcatgtaccagtgcctggccgagaacaagtacggggccatctatgccagcgctgagctgaagatcctggccagcgcccccacctttgccctgaaccagctgaagaagaccatcatcgtgaccaaggaccaggaggtggtgattgagtgcaagccccagggcagccccaagcccaccatctcctggaagaagggggacagagctgtgcgggagaacaagagaattgccatcctgcctgatggcagcctgcgcatcctgaatgccagcaagagtgatgagggcaagtatgtgtgccgcggggagaatgtgtttggatctgctgagatcatcgccagcctgtctgtgaaggagcccacccgcatcgagctgacccccaagaggacagagctgactgtgggggagagcatcgtgctgaactgcaaggccatccatgatgccagcctggatgtgaccttctactggaccctgaagggccagcccatcgactttgaggaggagggcggccactttgagagcatccgggcccaggccagcagcgctgacctgatgatccggaacatcctgctgatgcatgctggccgctatggctgccgggtgcagaccacagctgacagcgtgtctgatgaagctgagctgctggtgcggggccccccaggccccccaggcatcgtcatcgtggaggagatcacagagagcacagccaccctgtcctggagccctgctgctgacaaccacagccccatcagcagctacaacctgcaggcccggagccccttcagcctgggctggcagacagtgaagacagtgcctgagatcatcactggagacatggagagcgccatggctgtggacctgaacccctgggtggagtatgagttccgggtggtggccaccaaccccatcggcaccggggaccccagcacccccagcaggatgatccgcaccaatgaagctgtgcccaagacagcccccaccaacgtgtctggccgcagcggcagaagacatgagctggtgattgcctgggagcctgtgtctgaggagttccagaatggagagggcttcggctacatcgtggccttccggcccaacggcacccggggctggaaggagaagatggtgaccagcagcgaggccagcaagttcatctacagagatgagagcgtgccccccctgaccccatttgaggtgaaggtgggcgtgtacaacaacaagggagatggccccttcagccagatcgtggtgatctgcagcgctgagggggagcccagcgctgcccccacagatgtgaaggccacctctgtgtctgtgtctgagatcctggtggcctggaagcacatcaaggagagcctgggccggccccagggctttgaggtgggctactggaaggacatggagcaggaggacacagctgagaccgtgaagaccagaggaaatgaaagctttgtgatcctgaccggcctggagggcaacaccctgtaccacttcaccgtgcgggcctacaacggggccggctacggcccccccagcagcgaggtgtctgccaccaccaagaagagcccccccagccaggcccccagcaacctgcgctgggagcagcagggcagccaggtgtccctgggctgggagcccgtcatccccctggccaatgaaagtgaggtggtgggctacaaggtgttctaccggcaggagggccacagcaacagccaggtgattgagacccagaagctgcaggccgtggtgcccctgcctgatgctggggtgtacatcatcgaggtgcgggcctacagcgagggcggagatggaacagccagcagccagatccgggtgcccagctacagcggcggcaagatcaccagcgcccagagcaccctgcacagcctgagcaccagcagcagctctgtgaccctgctgctggccctgatgatccccagcacctcctggtag

SEQ ID NO: 148400 - DNA, 3303 bp, synthetic construct; identical to SEQ ID NO: 148398
  misc_feature 1..3303: note = Description of Artificial Sequence: Synthetic coding sequence
  source 1..3303: mol_type = other DNA

SEQ ID NO: 148401 - DNA, 3303 bp, synthetic construct; identical to SEQ ID NO: 148398
  misc_feature 1..3303: note = Description of Artificial Sequence: Synthetic coding sequence
  source 1..3303: mol_type = other DNA

SEQ ID NO: 148402 - DNA, 2736 bp, synthetic construct
  misc_feature 1..2736: note = Description of Artificial Sequence: Synthetic coding sequence
  source 1..2736: mol_type = other DNA
atggccagctcctggaagctgatgctgttcctgtctgtgaccatgtgcctgtctgagtacagcaagagcctgcccggcctgagcaccagctatgctgccctgctgcgcatcaagaagagcagcagcagcagcctgtttggcagcaagacccggccccgctacagcagccccagcctgggcaccctgagcgccagcagccccagctggctgggcgccgcccagaactactacagccccatcaacctgtaccacagcagtgatgccttcaagcaggatgagagcgtggactatggccctgtgtttgtgcaggagccagatgacatcatcttccccacagacagtgatgagaagaaggtggccctgaactgtgaggtgcggggcaaccctgtgcccagctaccgctggctgagaaatggaacagaaattgacctggagagtgactaccgctacagcctgattgatggcaccttcatcatcagcaaccccagcgaggccaaggacagcggccactaccagtgcctggccaccaacacagtgggcagcatcctgagccgggaggccaccctgcagtttgcctacctgggcaacttcagcggccgcaccaggtctgctgtgtctgtgcgggagggccagggcgtggtgctgatgtgcagccccccaccccacagccctgagatcatctacagctgggtgttcaatgagttccccagctttgtggccgaggacagccgccgcttcatcagccaggagactggaaacctgtacatcagcaaggtgcagaccagtgatgtgggcagctacatctgcctggtgaagaacacagtgaccaatgcccgggtgctgagcccccccacccccctgaccctgagaaatgatggagtgatgggagaatatgagcccaagattgaggtgcacttccccttcaccgtgacagctgccaagggcaccaccgtgaagatggagtgctttgccctgggcaaccctgtgcccaccatcacctggatgaaggtgaatggctacatccccagcaaggcccggctgaggaagagccaggccgtgctggagatccccaacgtgcagctggatgatgctggcatctatgagtgcagagctgagaacagccggggcaagaacagcttccggggccagctgcaggtgtacacctacccccactgggtggagaagctgaatgacacccagctggacagcggcagccccctgcgctgggagtgcaaggccaccgggaagccccggcccacctaccgctggctgaagaatggagtgcccctgagcccccagagccgggtggagatggtgaatggagtgctgatgatccacaacgtgaaccagagtgatgctggcatgtaccagtgcctggccgagaacaagtacggggccatctatgccagcgctgagctgaagatcctggccagcgcccccacctttgccctgaaccagctgaagaagaccatcatcgtgaccaaggaccaggaggtggtgattgagtgcaagccccagggcagccccaagcccaccatctcctggaagaagggggacagagctgtgcgggagaacaagagaattgccatcctgcctgatggcagcctgcgcatcctgaatgccagcaagagtgatgagggcaagtatgtgtgccgcggggagaatgtgtttggatctgctgagatcatcgccagcctgtctgtgaaggagcccacccgcatcgagctgacccccaagaggacagagctgactgtgggggagagcatcgtgctgaactgcaaggccatccatgatgccagcctggatgtgaccttctactggaccctgaagggccagcccatcgactttgaggaggagggcggccactttgagagcatccgggcccaggccagcagcgctgacctgatgatccggaacatcctgctgatgcatgctggccgctatggctgccgggtgcagaccacagctgacagcgtgtctgatgaagctgagctgctggtgcggggccccccaggccccccaggcatcgtcatcgtggaggagatcacagagagcacagccaccctgtcctggagccctgctgctgacaaccacagccccatcagcagctacaacctgcaggcccggagccccttcagcctgggctggcagacagtgaagacagtgcctgagatcatcactggagacatggagagcgccatggctgtggacctgaacccctgggtggagtatgagttccgggtggtggccaccaaccccatcggcaccggggaccccagcacccccagcaggatgatccgcaccaatgaagctgtgcccaagacagcccccaccaacgtgtctggccgcagcggcagaagacatgagctggtgattgcctgggagcctgtgtctgaggagttccagaatggagagggcttcggctacatcgtggccttccggcccaacggcacccggggctggaaggagaagatggtgaccagcagcgaggccagcaagttcatctacagagatgagagcgtgccccccctgaccccatttgaggtgaaggtgggcgtgtacaacaacaagggagatggccccttcagccagatcgtggtgatctgcagcgctgagggggagcccagcgctgcccccacagatgtgaaggccacctctgtgtctgtgtctgagatcctggtggcctggaagcacatcaaggagagcctgggccggccccagggctttgaggtgtag

SEQ ID NO: 148403 - DNA, 3087 bp, synthetic construct
  misc_feature 1..3087: note = Description of Artificial Sequence: Synthetic coding sequence
  source 1..3087: mol_type = other DNA
atgaggctgctgtggaagctggtgatcctgctgcccctcatcaacagcagcgctggagatggcctgctgagccggcccatcttcacccaggagccccatgatgtgatcttccccctggacctgagcaagtctgaggtgatcctgaactgtgccgccaacggctaccccagcccccactaccgctggaagcagaatggaacagacatcgacttcaccatgagctaccactaccgcctggatggcggcagcctggccatcaacagcccccacacagaccaggacatcggcatgtaccagtgcctggccaccaacctgctgggcaccatcctgagcaggaaggccaagctgcagtttgcctacatcgaggactttgagaccaagaccaggagcacagtgtctgtgcgggagggccagggcgtggtgctgctgtgtggccccccaccccactttggagacctgtcctatgcctggaccttcaatgacaaccccctgtatgtgcaggaggacaacagaagatttgtgtcccaggagaccggcaacctgtacatcgccaaggtggagcccagtgatgtgggcaactacacctgcttcatcaccaacaaggaggcccagaggtctgtgcagggcccccccacccccctggtgcagaggacagatggagtgatgggagaatatgagcccaagattgaggtgcgcttccctgagaccatccaggccgccaaggacagctctgtgaagctggagtgctttgccctgggcaaccctgtgcctgacatctcctggaggcggctggatggcagccccctgcccgggaaggtgaagtacagcaagagccaggccatcctggagatccccaacttccagcaggaggatgagggcttctatgagtgcatcgccagcaacctgcggggcaggaacctggccaagggccagctgatcttctacgcccctcctgagtgggagcagaagatccagaacacccacctgagcatctatgacaacctgctgtgggagtgcaaggccagcggcaagcccaacccctggtacacctggctgaagaatggagagcggctgaaccctgaggagcgcatccagattgaaaatggcaccctcatcatcaccatgctgaatgtgtctgattctggagtgtaccagtgtgccgctgagaacaagtaccagatcatctatgccaatgctgagctgcgggtgctggccagcgccccagacttcagcaagagccctgtgaagaagaagagctttgtgcaggtgggcggggacatcgtgattggctgcaagcccaatgccttccccagggctgccatctcctggaagaggggcacagagaccctgcggcagagcaagaggatcttcctgctggaggatggcagcctgaagatctacaacatcaccaggagtgatgctggcagctacacctgcatcgccaccaaccagtttggaacagccaagaacacaggcagcctgattgtgaaggagaggacagtcatcaccgtgccccccagcaagatggatgtgacagtgggggagagcatcgtgctgccctgccaggtgtcccatgaccccagcattgaggtggtgtttgtgtggttcttcaatggagatgtgattgacctgaagaagggcgtggcccactttgagcgcatcggcggggagagcgtgggggacctgatgatccggaacatccagctgcaccacagcggcaagtacctgtgcaccgtgcagaccaccctggagagcctgtctgctgtggccgacatcatcgtgcggggccccccaggccccccagaagatgtgcaggtggaggacatcagcagcaccaccagccagctgtcctggagggctggccctgacaacaacagccccatccagatcttcaccatccagaccaggacccccttctctgtgggctggcaggccgtggccaccgtgcctgagatcctgaatggcaagacctacaatgccaccgtggtgggcctgagcccctgggtggagtatgagttccgggtggtggccggcaacagcattggaattggagagcccagcgagcccagcgagctgctgcggaccaaggcctctgtgcctgtggtggcccctgtgaacatccacggcggcggcggcagccgctctgagctggtgatcacctgggagagcatccctgaggagctgcagaatggagagggcttcggctacatcatcatgttccggcctgtgggcagcaccacctggagcaaggagaaggtgtcctctgtggagagcagcagatttgtgtacagaaatgaaagcatcatccccctgagcccctttgaggtgaaggtgggcgtgtacaacaatgaaggagagggcagcctgagcacagtgaccatcgtgtacagcggagaagatgagccccagctggccccccggggcaccagcctgcagagcttcagcgccagcgagatggaggtgtcctggaatgccatcgcctggaacagaaacacaggccgggtgctgggctatgaggtgctgtactggacagatgacagcaaggagagcatgattggcaagatccgggtgtctggaaatgtgaccaccaagaacatcaccggcctgaaggccaacaccatctactttgcctctgtgcgggcctacaacacagctggcaccggccccagcagcccccctgtgaatgtgaccaccaagaagagcccccccagccagcccccagccaacatcgcctggaagctgaccaacagcaagctgtgcctgaactgggagcacgtgaagaccatggagaatgaaagtgaggtgctgggctacaagatcctgtaccggcagaaccggcagagcaagacccacatcctggagaccaacaacaccagcgctgagctgctggtgccctttgaggaggactacctgattgagatcagaacagtgtctgatggaggagatggcagcagcagcgaggagatccgcatccccaagatgagcagcctgagcagccggggcatccagttcctggagcccagcacccacttcctgagcatcgtcatcgtcatcttccactgctttgccatccagcccctcatctag

SEQ ID NO: 148404 - DNA, 3087 bp, synthetic construct; identical to SEQ ID NO: 148403
  misc_feature 1..3087: note = Description of Artificial Sequence: Synthetic coding sequence
  source 1..3087: mol_type = other DNA

SEQ ID NO: 148405 - DNA, 2871 bp, synthetic construct
  misc_feature 1..2871: note = Description of Artificial Sequence: Synthetic coding sequence
  source 1..2871: mol_type = other DNA
atgagctaccactaccgcctggatggcggcagcctggccatcaacagcccccacacagaccaggacatcggcatgtaccagtgcctggccaccaacctgctgggcaccatcctgagcaggaaggccaagctgcagtttgcctacatcgaggactttgagaccaagaccaggagcacagtgtctgtgcgggagggccagggcgtggtgctgctgtgtggccccccaccccactttggagacctgtcctatgcctggaccttcaatgacaaccccctgtatgtgcaggaggacaacagaagatttgtgtcccaggagaccggcaacctgtacatcgccaaggtggagcccagtgatgtgggcaactacacctgcttcatcaccaacaaggaggcccagaggtctgtgcagggcccccccacccccctggtgcagaggacagatggagtgatgggagaatatgagcccaagattgaggtgcgcttccctgagaccatccaggccgccaaggacagctctgtgaagctggagtgctttgccctgggcaaccctgtgcctgacatctcctggaggcggctggatggcagccccctgcccgggaaggtgaagtacagcaagagccaggccatcctggagatccccaacttccagcaggaggatgagggcttctatgagtgcatcgccagcaacctgcggggcaggaacctggccaagggccagctgatcttctacgcccctcctgagtgggagcagaagatccagaacacccacctgagcatctatgacaacctgctgtgggagtgcaaggccagcggcaagcccaacccctggtacacctggctgaagaatggagagcggctgaaccctgaggagcgcatccagattgaaaatggcaccctcatcatcaccatgctgaatgtgtctgattctggagtgtaccagtgtgccgctgagaacaagtaccagatcatctatgccaatgctgagctgcgggtgctggccagcgccccagacttcagcaagagccctgtgaagaagaagagctttgtgcaggtgggcggggacatcgtgattggctgcaagcccaatgccttccccagggctgccatctcctggaagaggggcacagagaccctgcggcagagcaagaggatcttcctgctggaggatggcagcctgaagatctacaacatcaccaggagtgatgctggcagctacacctgcatcgccaccaaccagtttggaacagccaagaacacaggcagcctgattgtgaaggagaggacagtcatcaccgtgccccccagcaagatggatgtgacagtgggggagagcatcgtgctgccctgccaggtgtcccatgaccccagcattgaggtggtgtttgtgtggttcttcaatggagatgtgattgacctgaagaagggcgtggcccactttgagcgcatcggcggggagagcgtgggggacctgatgatccggaacatccagctgcaccacagcggcaagtacctgtgcaccgtgcagaccaccctggagagcctgtctgctgtggccgacatcatcgtgcggggccccccaggccccccagaagatgtgcaggtggaggacatcagcagcaccaccagccagctgtcctggagggctggccctgacaacaacagccccatccagatcttcaccatccagaccaggacccccttctctgtgggctggcaggccgtggccaccgtgcctgagatcctgaatggcaagacctacaatgccaccgtggtgggcctgagcccctgggtggagtatgagttccgggtggtggccggcaacagcattggaattggagagcccagcgagcccagcgagctgctgcggaccaaggcctctgtgcctgtggtggcccctgtgaacatccacggcggcggcggcagccgctctgagctggtgatcacctgggagagcatccctgaggagctgcagaatggagagggcttcggctacatcatcatgttccggcctgtgggcagcaccacctggagcaaggagaaggtgtcctctgtggagagcagcagatttgtgtacagaaatgaaagcatcatccccctgagcccctttgaggtgaaggtgggcgtgtacaacaatgaaggagagggcagcctgagcacagtgaccatcgtgtacagcggagaagatgagccccagctggccccccggggcaccagcctgcagagcttcagcgccagcgagatggaggtgtcctggaatgccatcgcctggaacagaaacacaggccgggtgctgggctatgaggtgctgtactggacagatgacagcaaggagagcatgattggcaagatccgggtgtctggaaatgtgaccaccaagaacatcaccggcctgaaggccaacaccatctactttgcctctgtgcgggcctacaacacagctggcaccggccccagcagcccccctgtgaatgtgaccaccaagaagagcccccccagccagcccccagccaacatcgcctggaagctgaccaacagcaagctgtgcctgaactgggagcacgtgaagaccatggagaatgaaagtgaggtgctgggctacaagatcctgtaccggcagaaccggcagagcaagacccacatcctggagaccaacaacaccagcgctgagctgctggtgccctttgaggaggactacctgattgagatcagaacagtgtctgatggaggagatggcagcagcagcgaggagatccgcatccccaagatgagcagcctgagcagccggggcatccagttcctggagcccagcacccacttcctgagcatcgtcatcgtcatcttccactgctttgccatccagcccctcatctag

SEQ ID NO: 148406 - DNA, 3996 bp, synthetic construct
  misc_feature 1..3996: note = Description of Artificial Sequence: Synthetic coding sequence
  source 1..3996: mol_type = other DNA
atgcaggccgcccccagggctggctgtggggccgccctgctgctgtggatcgtgagcagctgcctgtgccgggcctggacagcccccagcaccagccagaagtgtgatgagcccctggtgtctggcctgccccacgtggccttcagcagcagcagcagcatcagcggcagctacagccctggctacgccaagatcaacaagagaggaggagctgggggctggagccccagcgacagcgaccactaccagtggctgcaggtggactttggaaacaggaagcagatcagcgccatcgccacccagggccgctacagcagcagtgactgggtgacccagtacaggatgctgtacagcgacaccggcaggaactggaagccctaccaccaggacggcaacatctgggccttccctggcaacatcaacagtgatggagtggtgagacatgagctgcagcaccccatcatcgcccgctacgtgagaattgtgcccctggactggaatggagagggccgcatcggcctgcgcatcgaggtgtatggctgcagctactgggcagatgtgatcaactttgatggccacgtggtgctgccctaccgcttcaggaacaagaagatgaagaccctgaaggatgtgattgccctgaacttcaagaccagcgagagcgagggcgtcatcctgcatggagagggccagcagggcgactacatcaccctggagctgaagaaggccaagctggtgctgagcctgaacctgggcagcaaccagctgggccccatctacggccacacctctgtgatgacaggcagcctgctggatgaccaccactggcacagcgtggtgattgagcggcagggccgcagcatcaacctgaccctggaccgctccatgcagcacttccgcaccaacggggagtttgactacctggacctggactatgagatcaccttcggcggcatccccttcagcggcaagcccagcagcagcagcaggaagaacttcaagggctgcatggagagcatcaactacaatggagtgaacatcacagacctggcccggaggaagaagctggagcccagcaatgtgggcaacctgtccttcagctgtgtggagccctacacagtgcctgtgttcttcaatgccaccagctacctggaggtgcccggccgcctgaaccaggacctcttctctgtgtccttccagttccgcacctggaaccccaacggcctgctggtgttcagccactttgctgacaacctgggcaatgtggagattgacctgacagagagcaaggtgggcgtgcacatcaacatcacccagaccaagatgagccagattgacatcagcagcggcagcggcctgaatgatggccagtggcatgaggtgcgcttcctggccaaggaaaattttgccatcctgaccattgatggagatgaggccagcgctgtgaggaccaacagccccctgcaggtgaagacaggagagaagtacttcttcggcggcttcctgaaccagatgaacaacagcagccacagcgtgctgcagcccagcttccagggctgcatgcagctgatccaggtggatgaccagctggtgaacctgtatgaggtggcccagaggaagccaggcagctttgccaacgtgtccattgacatgtgtgccatcatcgacagatgtgtgcccaaccactgtgaacatggaggcaagtgcagccagacctgggacagcttcaagtgcacctgtgatgaaacaggctacagcggggccacctgccacaacagcatctatgagcccagctgtgaggcctacaagcacctgggccagaccagcaactactactggattgatcctgatggcagcggccccctgggccccctgaaggtgtactgcaacatgacagaggacaaggtgtggaccatcgtgtcccatgacctgcagatgcagacccctgtggtgggctacaaccctgagaagtacagcgtgacccagctggtgtacagcgcctccatggaccagatcagcgccatcacagacagcgctgagtactgtgagcagtatgtgtcctacttctgcaagatgagccggctgctgaacaccccagatggcagcccctacacctggtgggtgggcaaggccaatgagaagcactactactggggcggcagcggccctggcatccagaagtgtgcctgtggcatcgagaggaactgcacagaccccaagtactactgcaactgtgatgctgactacaagcagtggaggaaggatgctggcttcctgagctacaaggaccacctgcctgtgtcccaggtggtggtgggggacacagaccggcagggcagcgaggccaagctgtctgtgggccccctgcgctgccagggcgacaggaactactggaatgctgccagcttccccaaccccagcagctacctgcacttcagcaccttccagggcgagaccagcgctgacatctccttctacttcaagaccctgaccccctggggcgtcttcctggagaacatgggcaaggaggacttcatcaagctggagctgaagagcgccacagaggtgtccttctcctttgatgtgggcaatggacctgtggagatcgtggtgcgcagccccacccccctgaatgatgaccagtggcaccgggtgacagctgagagaaatgtgaagcaggccagcctgcaggtggaccggctgccccagcagatcaggaaggcccccacagagggccacacccggctggagctgtacagccagctgtttgtgggcggggccggcggccagcagggcttcctgggctgcatccgcagcctgaggatgaatggagtgaccctggacctggaggagcgggccaaggtgaccagcggcttcatcagcggctgcagcggccactgcaccagctatggcaccaactgtgaaaatggaggcaagtgcctggagcgctaccacggctacagctgtgactgcagcaacacagcctatgatggcaccttctgcaacaaggatgtgggcgccttctttgaggagggcatgtggctgcgctacaacttccaggccccagccaccaatgcccgggacagcagcagccgggtggacaatgccccagaccagcagaacagccacccagacctggcccaggaggagatccgcttctccttcagcaccaccaaggccccctgcatcctgctgtacatcagcagcttcaccacagacttcctggccgtgctggtgaagcccaccggcagcctgcagatccgctacaacctgggcggcacccgggagccctacaacattgatgtggaccacaggaacatggccaacggccagccccacagcgtgaacatcaccaggcatgagaagaccatcttcctgaagctggaccactaccccagcgtgtcctaccacctgcccagcagcagtgacaccctcttcaacagccccaagagcctcttcctgggcaaggtgattgagaccgggaagattgaccaggagatccacaagtacaacaccccaggcttcaccggctgcctgagccgggtgcagttcaaccagatcgcccccctgaaggccgccctgcggcagaccaatgccagcgcccacgtgcacatccagggcgagctggtggagagcaactgtggggccagccccctgaccctgagccccatgagcagcgccacagacccctggcacctggaccacctggacagcgccagcgctgacttcccctacaaccctggccagggccaggccatcagaaatggagtgaacagaaattctgccatcatcggcggcgtgattgctgtggtgatcttcaccatcctgtgcaccctggtgttcctgatccgctacatgttccgccacaagggcacctaccacaccaatgaggccaagggagctgagagcgctgagagcgcagatgctgccatcatgaacaatgaccccaacttcacagagaccattgatgagagcaagaaggagtggctgatctag

SEQ ID NO: 148407 - DNA, 1173 bp, synthetic construct
  misc_feature 1..1173: note = Description of Artificial Sequence: Synthetic coding sequence
  source 1..1173: mol_type = other DNA
atgaatggagtgaccctggacctggaggagcgggccaaggtgaccagcggcttcatcagcggctgcagcggccactgcaccagctatggcaccaactgtgaaaatggaggcaagtgcctggagcgctaccacggctacagctgtgactgcagcaacacagcctatgatggcaccttctgcaacaaggatgtgggcgccttctttgaggagggcatgtggctgcgctacaacttccaggccccagccaccaatgcccgggacagcagcagccgggtggacaatgccccagaccagcagaacagccacccagacctggcccaggaggagatccgcttctccttcagcaccaccaaggccccctgcatcctgctgtacatcagcagcttcaccacagacttcctggccgtgctggtgaagcccaccggcagcctgcagatccgctacaacctgggcggcacccgggagccctacaacattgatgtggaccacaggaacatggccaacggccagccccacagcgtgaacatcaccaggcatgagaagaccatcttcctgaagctggaccactaccccagcgtgtcctaccacctgcccagcagcagtgacaccctcttcaacagccccaagagcctcttcctgggcaaggtgattgaaacaggcaagattgaccaggagatccacaagtacaacaccccaggcttcaccggctgcctgagccgggtgcagttcaaccagatcgcccccctgaaggccgccctgcggcagaccaatgccagcgcccacgtgcacatccagggcgagctggtggagagcaactgtggggccagccccctgaccctgagccccatgagcagcgccacagacccctggcacctggaccacctggacagcgccagcgctgacttcccctacaaccctggccagggccaggccatcagaaatggagtgaacagaaacagcgccatcattggaggagtgattgctgtggtgatcttcaccatcctgtgcaccctggtgttcctgatccgctacatgttccgccacaagggcacctaccacaccaatgaggccaagggagctgagagcgctgagagcgcagatgctgccatcatgaacaatgaccccaacttcacagagaccattgatgagagcaagaaggagtggctgatctag

SEQ ID NO: 148408 - DNA, 1353 bp, synthetic construct
  misc_feature 1..1353: note = Description of Artificial Sequence: Synthetic coding sequence
  source 1..1353: mol_type = other DNA
atgtctgacatggaggatgacttcatgtgtgatgatgaggaggactatgacctggagtacagcgaggacagcaacagcgagcccaacgtggacctggagaaccagtactacaacagcaaggccctgaaggaggatgaccccaaggccgccctgagcagcttccagaaggtgctggagctggagggggagaagggggagtggggcttcaaggccctgaagcagatgatcaagatcaacttcaagctgaccaacttccctgagatgatgaaccgctacaagcagctgctgacctacatccgctctgctgtgaccaggaactacagcgagaagagcatcaacagcatcctggactacatcagcaccagcaagcagaacagcgacttcctgtgccagatggacctgctgcaggagttctatgagaccaccctggaggccctgaaggatgccaagaatgaccggctgtggttcaagaccaacaccaagctgggcaagctgtacctggagcgggaggagtatggcaagctgcagaagatcctgcggcagctgcaccagagctgccagacagatgatggagaagatgacctgaagaagggcacccagctgctggagatctatgccctggagatccagatgtacacagcccagaagaacaacaagaagctgaaggccctgtatgagcagagcctgcacatcaagagcgccatcccccaccccctcatcatgggcgtcatccgggagtgtggcggcaagatgcacctgcgggagggggagtttgagaaggcccacacagacttctttgaggccttcaagaactatgatgaaagtggcagccccaggaggaccacctgcctgaagtacctggtgctggccaacatgctgatgaagagcggcatcaacccctttgacagccaggaggccaagccctacaagaatgaccctgagatcctggccatgaccaacctggtgtctgcctaccagaacaatgacatcacagaatttgagaagatcctgaagaccaaccacagcaacatcatggatgaccccttcatccgggagcacatcgaggagctgctgaggaacatccgcacccaggtgctgatcaagctgatcaagccctacacccgcatccacatccccttcatcagcaaggagctgaacattgatgtggctgatgtggagagcctgctggtgcagtgcatcctggacaacaccatccacggcagaattgaccaggtgaaccagctgctggagctggaccaccagaagaggggcggggcccgctacacagccctggacaagtggaccaaccagctgaacagcctgaaccaggccgtggtgtccaagctggcctag

SEQ ID NO: 148409 - DNA, 1332 bp, synthetic construct
  misc_feature 1..1332: note = Description of Artificial Sequence: Synthetic coding sequence
  source 1..1332: mol_type = other DNA
atgtctgacatggaggatgacttcatgtgtgatgatgaggaggactatgacctggagtacagcgaggacagcaacagcgagcccaacgtggacctggagaaccagtactacaacagcaaggccctgaaggaggatgaccccaaggccgccctgagcagcttccagaaggtgctggagctggagggggagaagggggagtggggcttcaaggccctgaagcagatgatcaagatcaacttcaagctgaccaacttccctgagatgatgaaccgctacaagcagctgctgacctacatccgctctgctgtgaccaggaactacagcgagaagagcatcaacagcatcctggactacatcagcaccagcaagcagatggacctgctgcaggagttctatgagaccaccctggaggccctgaaggatgccaagaatgaccggctgtggttcaagaccaacaccaagctgggcaagctgtacctggagcgggaggagtatggcaagctgcagaagatcctgcggcagctgcaccagagctgccagacagatgatggagaagatgacctgaagaagggcacccagctgctggagatctatgccctggagatccagatgtacacagcccagaagaacaacaagaagctgaaggccctgtatgagcagagcctgcacatcaagagcgccatcccccaccccctcatcatgggcgtcatcagagaatgtggcggcaagatgcacctgcgggagggggagtttgagaaggcccacacagacttctttgaggccttcaagaactatgatgagagcggcagccccaggaggaccacctgcctgaagtacctggtgctggccaacatgctgatgaagagcggcatcaacccctttgacagccaggaggccaagccctacaagaatgaccctgagatcctggccatgaccaacctggtgtctgcctaccagaacaatgacatcacagaatttgagaagatcctgaagaccaaccacagcaacatcatggatgaccccttcatccgggagcacatcgaggagctgctgaggaacatccgcacccaggtgctgatcaagctgatcaagccctacacccgcatccacatccccttcatcagcaaggagctgaacattgatgtggctgatgtggagagcctgctggtgcagtgcatcctggacaacaccatccacggcagaattgaccaggtgaaccagctgctggagctggaccaccagaagagaggaggagcccgctacacagccctggacaagtggaccaaccagctgaacagcctgaaccaggccgtggtgtccaagctggcctag

SEQ ID NO: 148410 - DNA, 1272 bp, synthetic construct
  misc_feature 1..1272: note = Description of Artificial Sequence: Synthetic coding sequence
  source 1..1272: mol_type = other DNA
atggccagcgccctggagcagtttgtgaacagcgtgcggcagctgagcgcccagggccagatgacccagctgtgtgagctgatcaacaagtctggagagctgctggccaagaacctgagccacctggacacagtgctgggcgccctggatgtgcaggagcacagcctgggcgtgctggccgtgctgtttgtgaagttctccatgcccagcgtgcctgactttgagaccctcttcagccaggtgcagctgttcatcagcacctgcaatggagagcacatccgctatgccacagacacctttgctggcctgtgccaccagctgaccaatgccctggtggagaggaagcagcccctgcggggcatcggcatcctgaagcaggccatcgacaagatgcagatgaacaccaaccagctgaccagcatccatgctgacctgtgccagctgtgcctgctggccaagtgcttcaagccagccctgccctacctggatgtggacatgatggacatctgcaaggaaaatggagcctatgatgccaagcacttcctgtgctactactactatggaggcatgatctacacaggcctgaagaactttgagcgggccctgtacttctatgagcaggccatcaccaccccagccatggctgtgagccacatcatgctggagagctacaagaagtacatcctggtgtccctcatcctgctgggcaaggtgcagcagctgcccaagtacaccagccagatcgtgggccgcttcatcaagcccctgagcaatgcctaccacgagctggcccaggtgtacagcaccaacaaccccagcgagctgaggaacctggtgaacaagcacagcgagaccttcacccgggacaacaacatgggcctggtgaagcagtgcctgagcagcctgtacaagaagaacatccagaggctgaccaagaccttcctgaccctgagcctgcaggacatggccagccgggtgcagctgagcggcccccaggaggccgagaagtatgtgctgcacatgattgaagatggagagatctttgccagcatcaaccagaaggatggcatggtgtccttccatgacaaccctgagaagtacaacaacccagccatgctgcacaacatcgaccaggagatgctgaagtgcatcgagctggatgagcggctgaaggccatggaccaggagatcaccgtgaacccccagtttgtgcagaagtccatgggcagccaggaggatgattctggcaacaagcccagcagctacagctag

SEQ ID NO: 148411 - DNA, 960 bp, synthetic construct
  misc_feature 1..960: note = Description of Artificial Sequence: Synthetic coding sequence
  source 1..960: mol_type = other DNA
atggccagcgccctggagcagtttgtgaacagcgtgcggcagctgagcgcccagggccagatgacccagctgtgtgagctgatcaacaagtctggagagctgctggccaagaacctgagccacctggacacagtgctgggcgccctggatgtgcaggagcacagcctgggcgtgctggccgtgctgtttgtgaagttctccatgcccagcgtgcctgactttgagaccctcttcagccaggtgcagctgttcatcagcacctgcaatggagagcacatccgctatgccacagacacctttgctggcctgtgccaccagctgaccaatgccctggtggagaggaagcagcccctgcggggcatcggcatcctgaagcaggccatcgacaagatgcagatgaacaccaaccagctgaccagcatccatgctgacctgtgccagctgtgcctgctggccaagtgcttcaagccagccctgccctacctggatgtggacatgatggacatctgcaaggaaaatggagcctatgatgccaagcacttcctgtgctactactactatggaggcatgatctacacaggcctgaagaactttgagcgggccctgtacttctatgagcaggccatcaccaccccagccatggctgtgagccacatcatgctggagagctacaagaagtacatcctggtgtccctcatcctgctgggcaaggtgcagcagctgcccaagtacaccagccagatcgtgggccgcttcatcaagaggcagagcctggccatgctggcccggctggtgctgaacagctggccccaggccgtgctgctgcggctgcccccccgggtgctgggcctgcagcccctgagcaatgcctaccacgagctggcccaggtgtacagcaccaacaaccccagcgagctgaggaacctggtgaacaagcacagcgagaccttcaccaggtag

SEQ ID NO: 148412 - DNA, 834 bp, synthetic construct
  misc_feature 1..834: note = Description of Artificial Sequence: Synthetic coding sequence
  source 1..834: mol_type = other DNA
gccagccccttctgggtgtcctggctgtatggcagccccctgcctgccccacccctgcccggcggggcccggagcggcacctgtgcccccatcctggtgctgcagaatgctgctgaggccctggcccggcagatgacccagctgtgtgagctgatcaacaagtctggagagctgctggccaagaacctgagccacctggacacagtgctgggcgccctggatgtgcaggagcacagcctgggcgtgctggccgtgctgtttgtgaagttctccatgcccagcgtgcctgactttgagaccctcttcagccaggtgcagctgttcatcagcacctgcaatggagagcacatccgctatgccacagacacctttgctggcctgtgccaccagctgaccaatgccctggtggagaggaagcagcccctgcggggcatcggcatcctgaagcaggccatcgacaagatgcagatgaacaccaaccagctgaccagcatccatgctgacctgtgccagctgtgcctgctggccaagtgcttcaagccagccctgccctacctggatgtggacatgatggacatctgcaaggaaaatggagcctatgatgccaagcacttcctgtgctactactactatggaggcatgatctacacaggcctgaagaactttgagcgggccctgtacttctatgagcaggccatcaccaccccagccatggctgtgagccacatcatgctggagagctacaagaagtacatcctggtgtccctcatcctgctgggcaaggtgcagcagctgcccaagtacaccagccagatcgtgggccgcttcatctag

SEQ ID NO: 148413 - DNA, 1212 bp, synthetic construct
  misc_feature 1..1212: note = Description of Artificial Sequence: Synthetic coding sequence
  source 1..1212: mol_type = other DNA
atgacccagctgtgtgagctgatcaacaagtctggagagctgctggccaagaacctgagccacctggacacagtgctgggcgccctggatgtgcaggagcacagcctgggcgtgctggccgtgctgtttgtgaagttctccatgcccagcgtgcctgactttgagaccctcttcagccaggtgcagctgttcatcagcacctgcaatggagagcacatccgctatgccacagacacctttgctggcctgtgccaccagctgaccaatgccctggtggagaggaagcagcccctgcggggcatcggcatcctgaagcaggccatcgacaagatgcagatgaacaccaaccagctgaccagcatccatgctgacctgtgccagctgtgcctgctggccaagtgcttcaagccagccctgccctacctggatgtggacatgatggacatctgcaaggaaaatggagcctatgatgccaagcacttcctgtgctactactactatggaggcatgatctacacaggcctgaagaactttgagcgggccctgtacttctatgagcaggccatcaccaccccagccatggctgtgagccacatcatgctggagagctacaagaagtacatcctggtgtccctcatcctgctgggcaaggtgcagcagctgcccaagtacaccagccagatcgtgggccgcttcatcaagcccctgagcaatgcctaccacgagctggcccaggtgtacagcaccaacaaccccagcgagctgaggaacctggtgaacaagcacagcgagaccttcacccgggacaacaacatgggcctggtgaagcagtgcctgagcagcctgtacaagaagaacatccagaggctgaccaagaccttcctgaccctgagcctgcaggacatggccagccgggtgcagctgagcggcccccaggaggccgagaagtatgtgctgcacatgattgaagatggagagatctttgccagcatcaaccagaaggatggcatggtgtccttccatgacaaccctgagaagtacaacaacccagccatgctgcacaacatcgaccaggagatgctgaagtgcatcgagctggatgagcggctgaaggccatggaccaggagatcaccgtgaacccccagtttgtgcagaagtccatgggcagccaggaggatgattctggcaacaagcccagcagctacagctag

SEQ ID NO: 148414 - DNA, 1614 bp, synthetic construct
  misc_feature 1..1614: note = Description of Artificial Sequence: Synthetic coding sequence
  source 1..1614: mol_type = other DNA
atggccgcccagtgtgtgaccaaggtggccctgaatgtgtcctgtgccaacctgctggacaaggacatcggcagcaagagtgaccccctgtgtgtgctcttcctgaacaccagcggccagcagtggtatgaggtggagaggacagagcgcatcaagaactgcctgaacccccagttcagcaagaccttcatcatcgactactactttgaggtggtgcagaagctgaagtttggagtgtatgacatcgacaacaagaccatcgagctgagtgatgatgacttcctgggagaatgtgaatgtaccctgggccagatcgtgagcagcaagaagctgacccggcccctggtgatgaagacaggccggcctgctgggaagggcagcatcaccatctctgctgaggagatcaaggacaacagagtggtgctgtttgagatggaggccaggaagctggacaacaaggacctgtttgggaagagtgacccctacctggagttccacaagcagaccagtgatggcaactggctgatggtgcacaggacagaggtggtgaagaacaacctgaaccctgtgtggaggcccttcaagatcagcctgaacagcctgtgctatggagacatggacaagaccatcaaggtggagtgctatgactatgacaatgatggcagccatgacctgattggcaccttccagaccaccatgaccaagctgaaggaggccagccgcagcagccctgtggagtttgagtgcatcaatgagaagaagaggcagaagaagaagagctacaagaacagcggggtcatctctgtgaagcagtgtgagatcaccgtggagtgcaccttcctggactacatcatgggcggctgccagctgaacttcaccgtgggcgtggacttcaccggcagcaatggagaccccaggagcccagacagcctgcactacatcagccccaatggagtgaatgagtacctgacagccctgtggagcgtgggcctggtgatccaggactatgatgctgacaagatgtttcctgcctttggatttggagcccagatccccccccagtggcaggtgtcccatgagttccccatgaacttcaaccccagcaacccctactgcaatggcatccagggcatcgtggaggcctaccgcagctgcctgccccagatcaagctgtatggccccaccaacttcagccccatcatcaaccacgtggccaggtttgctgctgctgccacccagcagcagacagccagccagtactttgtgctgctgatcatcacagatggagtcatcacagacctggatgagacccggcaggccatcgtgaatgccagccggctgcccatgagcatcatcatcgtgggcgtgggcggcgctgacttcagcgccatggagttcctggatggagatggcggcagcctgcggagccccctgggggaggtggccatccgggacatcgtgcagtttgtgcccttccggcagttccagaatgcccccaaggaggccctggcccagtgtgtgctggccgagatcccccagcaggtggtgggctacttcaacacctacaagctgctgccccccaagaacccagccaccaagcagcagaagcagtag

SEQ ID NO: 148415 - DNA, 420 bp, synthetic construct
  misc_feature 1..420: note = Description of Artificial Sequence: Synthetic coding sequence
  source 1..420: mol_type = other DNA
atggccgcccagtgtgtgaccaaggtggccctgaatgtgtcctgtgccaacctgctggacaaggacatcggcagcaagagtgaccccctgtgtgtgctcttcctgaacaccagcggccagcagtggtatgaggtggagaggacagagcgcatcaagaactgcctgaacccccagttcagcaagaccttcatcatcgactactactttgaggtggtgcagaagctgaagtttggagtgtatgacatcgacaacaagaccatcgagctgagtgatgatgacttcctgggagaatgtgaatgtaccctgggccagatcgtgagcagcaagaagctgacccggcccctggtgatgaagacaggccggcctgctgggaagggcagcatcaccatctctgctgaggagatcaaggacaacagatag

SEQ ID NO: 148416 - DNA, 30 bp, synthetic construct
  misc_feature 1..30: note = Description of Artificial Sequence: Synthetic coding sequence
  source 1..30: mol_type = other DNA
atggccgcccagtgtgtgaccaaggtgtag

SEQ ID NO: 148417 - DNA, 1614 bp, synthetic construct; identical to SEQ ID NO: 148414
  misc_feature 1..1614: note = Description of Artificial Sequence: Synthetic coding sequence
  source 1..1614: mol_type = other DNA

SEQ ID NO: 148418 - DNA, 240 bp, synthetic construct
  misc_feature 1..240: note = Description of Artificial Sequence: Synthetic coding sequence
  source 1..240: mol_type = other DNA
atggccgcccagtgtgtgaccaaggtggccctgaatgtgtcctgtgccaacctgctggacaaggacatcggcagcaagagtgaccccctgtgtgtgctcttcctgaacaccagcggccagcagtggtatgaggtggagaggacagagcgcatcaagaactgcctgaacccccagttcagcaagaccttcatcatcgactactactttgaggtggtgcagaagctgaagtttggagtgtag

SEQ ID NO: 148419 - DNA, 408 bp, synthetic construct
  misc_feature 1..408: note = Description of Artificial Sequence: Synthetic coding sequence
  source 1..408: mol_type = other DNA
atggccgcccagtgtgtgaccaaggtggccctgaatgtgtcctgtgccaacctgctggacaaggacatcggcagcaagagtgaccccctgtgtgtgctcttcctgaacaccagcggccagcagtggtatgaggtggagaggacagagcgcatcaagaactgcctgaacccccagttcagcaagaccttcatcatcgactactactttgaggtggtgcagaagctgaagtttggagtgtatgacatcgacaacaagaccatcgagctgagtgatgatgacttcctgggagaatgtgaatgtaccctgggccagatcgtgagcagcaagaagctgacccggcccctggtgatgaagacaggccggcctgctgggaagggcagcatcaccatctctgctgaggagatctag

SEQ ID NO: 148420 - DNA, 705 bp, synthetic construct
  misc_feature 1..705: note = Description of Artificial Sequence: Synthetic coding sequence
  source 1..705: mol_type = other DNA
atggccgcccagtgtgtgaccaaggtggccctgaatgtgtcctgtgccaacctgctggacaaggacatcggcagcaagagtgaccccctgtgtgtgctcttcctgaacaccagcggccagcagtggtatgaggtggagaggacagagcgcatcaagaactgcctgaacccccagttcagcaagaccttcatcatcgactactactttgaggtggtgcagaagctgaagtttggagtgtatgacatcgacaacaagaccatcgagctgagtgatgatgacttcctgggagaatgtgaatgtaccctgggccagatcgtgagcagcaagaagctgacccggcccctggtgatgaagacaggccggcctgctgggaagggcagcatcaccatctctgctgaggagatcaaggacaacagagtggtgctgtttgagatggaggccaggaagctggacaacaaggacctgtttgggaagagtgacccctacctggagttccacaagcagaccagtgatggcaactggctgatggtgcacaggacagaggtggtgaagaacaacctgaaccctgtgtggaggcccttcaagatcagcctgaacagcctgtgctatggagacatggacaagaccatcaaggtggagtgctatgactatgacaatgatggcagccatgacctgattggcaccttccagaccaccatgacctag

SEQ ID NO: 148421 - DNA, 462 bp, synthetic construct
  misc_feature 1..462: note = Description of Artificial Sequence: Synthetic coding sequence
  source 1..462: mol_type = other DNA
atggccgcccagtgtgtgaccaaggtggccctgaatgtgtcctgtgccaacctgctggacaaggacatcggcagcaagagtgaccccctgtgtgtgctcttcctgaacaccagcggccagcagtggtatgaggtggagaggacagagcgcatcaagaactgcctgaacccccagttcagcaagaccttcatcatcgactactactttgaggtggtgcagaagctgaagtttggagtgtatgacatcgacaacaagaccatcgagctgagtgatgatgacttcctgggagaatgtgaatgtaccctgggccagatcgtgagcagcaagaagctgacccggcccctggtgatgaagacaggccggcctgctgggaagggcagcatcaccatctctgctgaggagatcaaggacaacagagtggtgctgtttgagatggaggccaggaagctggacaacaagtag

SEQ ID NO: 148422 - DNA, 1782 bp, synthetic construct
  misc_feature 1..1782: note = Description of Artificial Sequence: Synthetic coding sequence
  source 1..1782: mol_type = other DNA
atggagcagcctgaggacatggccagcctgtctgaatttgacagcctggccggcagcatcccagccaccaaggtggagatcaccgtgtcctgcaggaacctgctggacaaggacatgttcagcaagagtgaccccctgtgtgtgatgtacacccagggcatggagaacaagcagtggagggagtttggccgcacagaggtgattgacaacaccctgaacccagactttgtgaggaagttcatcgtggactacttctttgaggagaagcagaacctgcgctttgacctgtatgatgtggacagcaagagcccagacctgagcaagcatgacttcctgggccaggccttctgcaccctgggggagatcgtgggcagccctggcagccggctggagaagcccctgaccatcggggccttcagcctgaacagcaggacaggcaagcccatgcctgctgtgtccaatggaggagtgcctgggaagaagtgtggcaccatcatcctgtctgctgaggagctgagcaactgcagagatgtggccaccatgcagttctgtgccaacaagctggacaagaaggacttcttcggcaagagtgaccccttcctggtgttctaccgcagcaatgaagatggcaccttcaccatctgccacaagacagaggtgatgaagaacaccctgaaccctgtgtggcagaccttcagcatccctgtgcgggccctgtgcaatggagactatgacaggaccatcaaggtggaggtgtatgactgggacagagatggcagccatgacttcatcggggagttcaccaccagctaccgggagctggcccggggccagagccagttcaacatctatgaggtggtgaaccccaagaagaagatgaagaagaagaagtatgtgaacagcggcaccgtgaccctgctgagctttgctgtggagagcgagtgcaccttcctggactacatcaagggcggcacccagatcaacttcaccgtggccatcgacttcaccgccagcaatggaaaccccagccagagcaccagcctgcactacatgagcccctaccagctgaatgcctatgccctggccctgacagctgtgggggagatcatccagcactatgacagcgacaagatgtttcctgccctgggctttggagccaagctgcccccagatggccgggtgtcccatgagttccccctgaatggaaaccaggagaaccccagctgctgcggcattgatggcatcctggaggcctaccacaggagcctgaggacagtgcagctgtatggccccaccaactttgcccctgtggtgacccacgtggccagaaatgctgctgctgtgcaggacggcagccagtacagcgtgctgctgatcatcacagatggagtcatcagtgacatggcccagaccaaggaggccatcgtgaatgctgccaagctgcccatgagcatcatcatcgtgggcgtgggccaggccgagtttgatgccatggtggagctggatggagatgatgtgcgcatcagcagccggggcaagctggccgagcgggacatcgtgcagtttgtgcccttccgggactatgtggacagaacaggcaaccacgtgctgtccatggcccggctggccagagatgtgctggccgagatcccagaccagctggtgtcctacatgaaggcccagggcatccggcccaggcctcctcctgctgcccccacccacagccccagccagagccctgcccggaccccaccagccagccccctgcacacccacatctag

SEQ ID NO: 148423 - DNA, 906 bp, synthetic construct
  misc_feature 1..906: note = Description of Artificial Sequence: Synthetic coding sequence
  source 1..906: mol_type = other DNA
atgaagaagaagaagtatgtgaacagcggcaccgtgaccctgctgagctttgctgtggagagcgagtgcaccttcctggactacatcaagggcggcacccagatcaacttcaccgtggccatcgacttcaccgccagcaatggaaaccccagccagagcaccagcctgcactacatgagcccctaccagctgaatgcctatgccctggccctgacagctgtgggggagatcatccagcactatgacagcgacaagatgtttcctgccctgggctttggagccaagctgcccccagatggccgggtgtcccatgagttccccctgaatggaaaccaggagaaccccagctgctgcggcattgatggcatcctggaggcctaccacaggagcctgaggacagtgcagctgtatggccccaccaactttgcccctgtggtgacccacgtggccagaaatgctgctgctgtgcaggacggcagccagtacagcgtgctgctgatcatcacagatggagtcatcagtgacatggcccagaccaaggaggccatcgtgaatgctgccaagctgcccatgagcatcatcatcgtgggcgtgggccaggccgagtttgatgccatggtggagctggatggagatgatgtgcgcatcagcagccggggcaagctggccgagcgggacatcgtgcagtttgtgcccttccgggactatgtggacagaacaggcaaccacgtgctgtccatggcccggctggccagagatgtgctggccgagatcccagaccagctggtgtcctacatgaaggcccagggcatccggcccaggcctcctcctgctgcccccacccacagccccagccagagccctgcccggaccccaccagccagccccctgcacacccacatctag

SEQ ID NO: 148424 - DNA, 1515 bp, synthetic construct
  misc_feature 1..1515: note = Description of Artificial Sequence: Synthetic coding sequence
  source 1..1515: mol_type = other DNA
atggtgctggccgacctgggcaggaagatcaccagcgccctgcggagcctgagcaatgccaccatcatcaatgaggaggtgctgaatgccatgctgaaggaggtgtgcacagccctgctggaggctgatgtgaacatcaagctggtgaagcagctgcgggagaatgtgaagagcgccatcgacctggaggagatggccagcggcctgaacaagaggaagatgatccagcacgctgtgttcaaggagctggtgaagctggtggaccccggggtgaaggcctggacccccaccaagggcaagcagaatgtcatcatgtttgtgggcctgcagggcagcggcaagaccaccacctgcagcaagctggcctactactaccagaggaagggctggaagacctgcctgatctgtgccgacaccttccgggccggggcctttgaccagctgaagcagaatgccaccaaggcccgcatccccttctacggcagctacacagagatggaccccgtcatcatcgccagcgagggcgtggagaagttcaagaatgaaaattttgagatcatcatcgtggacaccagcggccgccacaagcaggaggacagcctgtttgaggagatgctgcaggtggccaatgccatccagcctgacaacatcgtgtatgtgatggatgccagcatcggccaggcctgtgaggcccaggccaaggccttcaaggacaaggtggatgtggccagcgtcatcgtgaccaagctggatggccacgccaagggcggcggggccctgtctgctgtggccgccaccaagagccccatcatcttcatcggcactggagagcacattgatgactttgagcccttcaagacccagcccttcatcagcaagctgctgggcatgggagacatcgagggcctgattgacaaggtgaatgagctgaagctggatgacaatgaggccctgattgagaagctgaagcacggccagttcaccctgcgggacatgtatgagcagttccagaacatcatgaagatgggccccttcagccagatcctgggcatgatccctggctttggaacagacttcatgagcaaaggaaatgagcaggagagcatggcccggctgaagaagctgatgaccatcatggacagcatgaatgaccaggagctggacagcacagatggagccaaggtgttcagcaagcagcccggccgcatccagagggtggcccggggcagcggcgtgtccaccagagatgtgcaggagctgctgacccagtacaccaagtttgcccagatggtgaagaagatgggcggcatcaagggcctcttcaagggcggggacatgagcaagaatgtgtcccagagccagatggccaagctgaaccagcagatggccaagatgatggacccccgggtgctgcaccacatgggcggcatggccggcctgcagagcatgatgaggcagttccagcagggcgccgccggcaacatgaagggcatgatgggcttcaacaacatgtag

SEQ ID NO: 148425 - DNA, 1674 bp, synthetic construct
  misc_feature 1..1674: note = Description of Artificial Sequence: Synthetic coding sequence
  source 1..1674: mol_type = other DNA
atgtctgaccctgagatgggctgggtgcctgagccccccaccatgaccctgggcgccagccgggtggagctgcgggtgtcctgccacggcctgctggaccgggacaccctgaccaagccccacccctgtgtgctgctgaagctgtacagtgatgagcagtgggtggaggtggagaggacagaggtgctgcggagctgcagcagccctgtgttcagccgggtgctggccctggagtacttctttgaggagaagcagcccctgcagttccacgtgtttgatgctgaagatggagccaccagccccagaaatgacaccttcctgggcagcacagaatgtaccctgggccagatcgtgtcccagaccaaggtgaccaagcccctgctgctgaagaatggcaagacagctgggaagagcaccatcaccatcgtggccgaggaggtgtctggcaccaatgactatgtgcagctgaccttccgggcctacaagctggacaacaaggacctcttcagcaagagtgaccccttcatggagatctacaagaccaatgaagaccagagcgaccagctggtgtggaggacagaggtggtgaagaacaacctgaaccccagctgggagcccttccggctgagcctgcacagcctgtgcagctgtgatgtgcaccggcccctgaagttcctggtgtatgactatgacagcagcggcaagcatgacttcatcggggagttcaccagcaccttccaggagatgcaggagggcacagccaaccctggccaggagatgcagtgggactgcatcaaccccaagtacagagacaagaagaagaactacaagagcagcggcaccgtggtgctggcccagtgcaccgtggagaaggtgcacaccttcctggactacatcatgggcggctgccagatctccttcaccgtggccatcgacttcaccgccagcaatggagaccccaggagcagccagagcctgcactgcctgagcccccggcagcccaaccactacctgcaggccctgcgggctgtgggcggcatctgccaggactatgacagcgacaagcgcttccctgccttcggctttggagcccgcatcccccccaactttgaggtgtcccatgactttgccatcaactttgatcctgaaaatccagaatgtgaggagatctctggagtcatcgccagctaccgccgctgcctgccccagatccagctgtatggccccaccaacgtggcccccatcatcaacagagtggccgagcccgcccagcgggagcagagcacaggccaggccaccaagtacagcgtgctgctggtgctgacagatggagtggtgtctgacatggccgagaccaggacagccatcgtgcgggccagccggctgcccatgagcatcatcatcgtgggcgtgggcaatgctgacttcagtgacatgaggctgctggatggagatgatggccccctgcgctgcccccggggcgtgcctgctgcccgggacatcgtgcagtttgtgcccttccgggacttcaaggatgctgcccccagcgccctggccaagtgtgtgctggccgaggtgccccggcaggtggtggagtactatgccagccagggcatcagccctggggccccccggccctgcaccctggccaccacccccagccccagcccctag

SEQ ID NO: 148426 - DNA, 1839 bp, synthetic construct
  misc_feature 1..1839: note = Description of Artificial Sequence: Synthetic coding sequence
  source 1..1839: mol_type = other DNA
atggccttcaaggagcacggcaagatcaccagctgctgcatccctggccccatcaacagcagcagagctggagctggagctggggccagcggctggagcagcaaaggagtgcgggcccgggcccgggagcctgagcggggggccccagaccgggagcccagcgacatgtctgaccctgagatgggctgggtgcctgagccccccaccatgaccctgggcgccagccgggtggagctgcgggtgtcctgccacggcctgctggaccgggacaccctgaccaagccccacccctgtgtgctgctgaagctgtacagtgatgagcagtgggtggaggtggagaggacagaggtgctgcggagctgcagcagccctgtgttcagccgggtgctggccctggagtacttctttgaggagaagcagcccctgcagttccacgtgtttgatgctgaagatggagccaccagccccagaaatgacaccttcctgggcagcacagagtgcaccctgggccagatcgtgtcccagaccaaggtgaccaagcccctgctgctgaagaatggcaagacagctgggaagagcaccatcaccatcgtggccgaggaggtgtctggcaccaatgactatgtgcagctgaccttccgggcctacaagctggacaacaaggacctcttcagcaagagtgaccccttcatggagatctacaagaccaatgaagaccagagcgaccagctggtgtggaggacagaggtggtgaagaacaacctgaaccccagctgggagcccttccggctgagcctgcacagcctgtgcagctgtgatgtgcaccggcccctgaagttcctggtgtatgactatgacagcagcggcaagcatgacttcatcggggagttcaccagcaccttccaggagatgcaggagggcacagccaaccctggccaggagatgcagtgggactgcatcaaccccaagtacagagacaagaagaagaactacaagagcagcggcaccgtggtgctggcccagtgcaccgtggagaaggtgcacaccttcctggactacatcatgggcggctgccagatctccttcaccgtggccatcgacttcaccgccagcaatggagaccccaggagcagccagagcctgcactgcctgagcccccggcagcccaaccactacctgcaggccctgcgggctgtgggcggcatctgccaggactatgacagcgacaagcgcttccctgcctttggatttggagcccgcatcccccccaactttgaggtgtcccatgactttgccatcaactttgatcctgagaacccagaatgtgaggagatcagcggcgtgattgccagctaccgccgctgcctgccccagatccagctgtatggccccaccaacgtggcccccatcatcaacagagtggccgagcccgcccagcgggagcagagcacaggccaggccaccaagtacagcgtgctgctggtgctgacagatggagtggtgtctgacatggccgagaccaggacagccatcgtgcgggccagccggctgcccatgagcatcatcatcgtgggcgtgggcaatgctgacttcagtgacatgaggctgctggatggagatgatggccccctgcgctgcccccggggcgtgcctgctgcccgggacatcgtgcagtttgtgcccttccgggacttcaaggatgctgcccccagcgccctggccaagtgtgtgctggccgaggtgccccggcaggtggtggagtactatgccagccagggcatcagccctggggccccccggccctgcaccctggccaccacccccagccccagcccctag

SEQ ID NO: 148427 - DNA, 159 bp, synthetic construct
  misc_feature 1..159: note = Description of Artificial Sequence: Synthetic coding sequence
  source 1..159: mol_type = other DNA
atgtctgaccctgagatgggctgggtgcctgagccccccaccatgaccctgggcgccagccgggtggagctgcgggtgtcctgccacggcctgctggaccgggacaccctgaccaagccccacccctgtgtgctgctgaagctgtacagtgatgaatag

SEQ ID NO: 148428 - DNA, 396 bp, synthetic construct
  misc_feature 1..396: note = Description of Artificial Sequence: Synthetic coding sequence
  source 1..396: mol_type = other DNA
atgtctgaccctgagatgggctgggtgcctgagccccccaccatgaccctgggcgccagccgggtggagctgcgggtgtcctgccacggcctgctggaccgggacaccctgaccaagccccacccctgtgtgctgctgaagctgtacagtgatgagcagtgggtggaggtggagaggacagaggtgctgcggagctgcagcagccctgtgttcagccgggtgctggccctggagtacttctttgaggagaagcagcccctgcagttccacgtgtttgatgctgaagatggagccaccagccccagaaatgacaccttcctgggcagcacagaatgtaccctgggccagatcgtgtcccagaccaaggtgaccaagcccctgctgctgaagaactag

SEQ ID NO: 148429 - DNA, 681 bp, synthetic construct
  misc_feature 1..681: note = Description of Artificial Sequence: Synthetic coding sequence
  source 1..681: mol_type = other DNA
atgtctgaccctgagatgggctgggtgcctgagccccccaccatgaccctgggcgccagccgggtggagctgcgggtgtcctgccacggcctgctggaccgggacaccctgaccaagccccacccctgtgtgctgctgaagctgtacagtgatgagcagtgggtggaggtggagaggacagaggtgctgcggagctgcagcagccctgtgttcagccgggtgctggccctggagtacttctttgaggagaagcagcccctgcagttccacgtgtttgatgctgaagatggagccaccagccccagaaatgacaccttcctgggcagcacagaatgtaccctgggccagatcgtgtcccagaccaaggtgaccaagcccctgctgctgaagaatggcaagacagctgggaagagcaccatcaccatcgtggccgaggaggtgtctggcaccaatgactatgtgcagctgaccttccgggcctacaagctggacaacaaggacctcttcagcaagagtgaccccttcatggagatctacaagaccaatgaagaccagagcgaccagctggtgtggaggacagaggtggtgaagaacaacctgaaccccagctgggagcccttccggctgagcctgcacagcctgtgcagctgtgatgtgcaccggcccctgaagttcctgtag

SEQ ID NO: 148430 - DNA, 318 bp, synthetic construct
  misc_feature 1..318: note = Description of Artificial Sequence: Synthetic coding sequence
  source 1..318: mol_type = other DNA
atgtctgaccctgagatgggctgggtgcctgagccccccaccatgaccctgggcgccagccgggtggagctgcgggtgtcctgccacggcctgctggaccgggacaccctgaccaagccccacccctgtgtgctgctgaagctgtacagtgatgagcagtgggtggaggtggagaggacagaggtgctgcggagctgcagcagccctgtgttcagccgggtgctggccctggagtacttctttgaggagaagcagcccctgcagttccacgtgtttgatgctgaagatggagccaccagccccagaaatgacacctag

SEQ ID NO: 148431 - DNA, 426 bp, synthetic construct
  misc_feature 1..426: note = Description of Artificial Sequence: Synthetic coding sequence
  source 1..426: mol_type = other DNA
atgtctgaccctgagatgggctgggtgcctgagccccccaccatgaccctgggcgccagccgggtggagctgcgggtgtcctgccacggcctgctggaccgggacaccctgaccaagccccacccctgtgtgctgctgaagctgtacagtgatgagcagtgggtggaggtggagaggacagaggtgctgcggagctgcagcagccctgtgttcagccgggtgctggccctggagtacttctttgaggagaagcagcccctgcagttccacgtgtttgatgctgaagatggagccaccagccccagaaatgacaccttcctgggcagcacagaatgtaccctgggccagatcgtgtcccagaccaaggtgaccaagcccctgctgctgaagaatggcaagacagctgggaagagcaccatcacctag

SEQ ID NO: 148432 - DNA, 450 bp, synthetic construct
  misc_feature 1..450: note = Description of Artificial Sequence: Synthetic coding sequence
  source 1..450: mol_type = other DNA
atgtctgaccctgagatgggctgggtgcctgagccccccaccatgaccctgggcgccagccgggtggagctgcgggtgtcctgccacggcctgctggaccgggacaccctgaccaagccccacccctgtgtgctgctgaagctgtacagtgatgagcagtgggtggaggtggagaggacagaggtgctgcggagctgcagcagccctgtgttcagccgggtgctggccctggagtacttctttgaggagaagcagcccctgcagttccacgtgtttgatgctgaagatggagccaccagccccagaaatgacaccttcctgggcagcacagaatgtaccctgggccagatcgtgtcccagaccaaggtgaccaagcccctgctgctgaagaatggcaagacagctgggaagagcaccatcaccatcgtggccgaggaggtgtctggatag

SEQ ID NO: 148433 - DNA, 1902 bp, synthetic construct
  misc_feature 1..1902: note = Description of Artificial Sequence: Synthetic coding sequence
  source 1..1902: mol_type = other DNA
atgtctgctggcagcgagagaggagctgctgccaccccaggcggcctgcctgccccctgtgccagcaaggtggagctgcggctgagctgccgccacctgctggaccgggaccccctgaccaagagtgaccccagcgtggccctgctgcagcaggcccagggccagtgggtgcaggtgggccgcacagaggtggtgcgcagcagcctgcaccctgtgttcagcaaggtgttcaccgtggactactactttgaggaggtgcagaggctgcgctttgaggtgtatgacacccacggccccagcggcttcagctgccaggaggatgacttcctgggcggcatggagtgcaccctgggccagcctgcccagaagtggctgctgcaggtggtgatgagggtgtctgtggatgtgctgggccctgctggccactgtgccaagcacttcctgtgctgcacagagagcagccacctggccaggacaggccccagcttcctgctgcgctatgatgacctgtgcctgccctgggccacagctggagctgtgcgctggtggacctgccggggcggccacacccagggctggcagatcgtggcccagaagaaggtgacccggcccctgctgctgaagtttggaagaaatgccggcaagagcaccatcaccgtgattgctgaggacatcagcggcaacaacggctacgtggagctgtccttccgggccaggaagctggatgacaaggacctcttcagcaagagtgaccccttcctggagctgtacagagtgaatgatgaccagggcctgcagctggtgtacagaacagaggtggtgaagaacaacctgaaccctgtgtgggaggccttcaaggtgtccctgagcagcctgtgcagctgtgaggagacccggcccctgaagtgcctggtgtgggactatgacagccggggcaagcatgacttcatcggggagttcagcaccacctttgaggagatgcagaaggcctttgaggagggccaggcccagtgggactgtgtgaaccccaagtacaagcagaagagaagaagctacaagaacagcggcgtggtggtgctggccgacctgaagttccaccgggtgtacagcttcctggactacatcatgggcggctgccagatccacttcaccgtggccatcgacttcaccgccagcaatggagaccccaggaacagctgcagcctgcactacatcaacccctaccagcccaatgagtacctgaaggccctggtgtctgtgggggagatctgccaggactatgacagcgacaagcgcttcagcgccctgggctttggagcccgcatcccccccaagtatgaggtgtcccatgactttgccatcaacttcaacccagaagatgatgaatgtgagggcatccagggcgtggtggaggcctaccagaactgcctgccccgggtgcagctgtatggccccaccaacgtggcccccatcatcagcaaggtggcccgggtggccgctgctgaggagagcacaggcaaggccagccagtactacatcctgctgatcctgacagatggagtggtgacagacatggctgacacccgggaggccatcgtgcgggccagccggctgcccatgagcatcatcatcgtgggcgtgggcaatgctgacttcacagacatgcaggtgctggatggagatgatggagtgctgcggagccccagaggagagcccgccctgcgggacatcgtgcagtttgtgcccttccgggagctgaagaatgccagccctgctgccctggccaagtgtgtgctggccgaggtgcccaagcaggtggtggagtactacagccaccggggcctgccccccaggagcctgggcgtgcctgctggggaggccagccctggctgcaccccctag

SEQ ID NO: 148434 - DNA, 1677 bp, synthetic construct
  misc_feature 1..1677: note = Description of Artificial Sequence: Synthetic coding sequence
  source 1..1677: mol_type = other DNA
atgtctgctggcagcgagagaggagctgctgccaccccaggcggcctgcctgccccctgtgccagcaaggtggagctgcggctgagctgccgccacctgctggaccgggaccccctgaccaagagtgaccccagcgtggccctgctgcagcaggcccagggccagtgggtgcaggtgggccgcacagaggtggtgcgcagcagcctgcaccctgtgttcagcaaggtgttcaccgtggactactactttgaggaggtgcagaggctgcgctttgaggtgtatgacacccacggccccagcggcttcagctgccaggaggatgacttcctgggcggcatggagtgcaccctgggccagatcgtggcccagaagaaggtgacccggcccctgctgctgaagtttggaagaaatgctgggaagagcaccatcaccgtgattgctgaggacatcagcggcaacaacggctacgtggagctgtccttccgggccaggaagctggatgacaaggacctcttcagcaagagtgaccccttcctggagctgtacagagtgaatgatgaccagggcctgcagctggtgtacagaacagaggtggtgaagaacaacctgaaccctgtgtgggaggccttcaaggtgtccctgagcagcctgtgcagctgtgaggagacccggcccctgaagtgcctggtgtgggactatgacagccggggcaagcatgacttcatcggggagttcagcaccacctttgaggagatgcagaaggcctttgaggagggccaggcccagtgggactgtgtgaaccccaagtacaagcagaagaggaggagctacaagaacagcggcgtggtggtgctggccgacctgaagttccaccgggtgtacagcttcctggactacatcatgggcggctgccagatccacttcaccgtggccatcgacttcaccgccagcaatggagaccccaggaacagctgcagcctgcactacatcaacccctaccagcccaatgagtacctgaaggccctggtgtctgtgggggagatctgccaggactatgacagcgacaagcgcttcagcgccctgggctttggagcccgcatcccccccaagtatgaggtgtcccatgactttgccatcaacttcaacccagaagatgatgaatgtgagggcatccagggcgtggtggaggcctaccagaactgcctgccccgggtgcagctgtatggccccaccaacgtggcccccatcatcagcaaggtggcccgggtggccgctgctgaggagagcacaggcaaggccagccagtactacatcctgctgatcctgacagatggagtggtgacagacatggctgacacccgggaggccatcgtgcgggccagccggctgcccatgagcatcatcatcgtgggcgtgggcaatgctgacttcacagacatgcaggtgctggatggagatgatggagtgctgcggagccccagaggagagcccgccctgcgggacatcgtgcagtttgtgcccttccgggagctgaagaatgccagccctgctgccctggccaagtgtgtgctggccgaggtgcccaagcaggtggtggagtactacagccaccggggcctgcccccaagaagcctgggcgtgcctgctggggaggccagccctggctgcaccccctag

SEQ ID NO: 148435 - DNA, 825 bp, synthetic construct
  misc_feature 1..825: note = Description of Artificial Sequence: Synthetic coding sequence
  source 1..825: mol_type = other DNA
atggccagtgacagcggcaaccagggcaccctgtgcaccctggagtttgctgtgcagatgacctgccagagctgtgtggatgctgtgaggaagagcctgcagggcgtggccggcgtgcaggatgtggaggtgcacctggaggaccagatggtgctggtgcacaccaccctgcccagccaggaggtgcaggccctgctggagggcaccggccggcaggccgtgctgaagggcatgggcagcggccagctgcagaacctgggcgctgctgtggccatcctgggcggccctggcaccgtgcagggcgtggtgcgcttcctgcagctgaccccagagcgctgcctgattgagggcaccattgatggcctggagcccggcctgcacggcctgcacgtgcaccagtacggggacctgaccaacaactgcaacagctgtggcaaccacttcaacccagatggagccagccatggaggcccccaggacagcgacagacacagaggagacctgggcaatgtgcgggcagatgctgatggccgggccatcttcaggatggaggatgagcagctgaaggtgtgggatgtgattggccgcagcctcatcattgatgaaggagaagatgacctgggccggggcggccaccccctgagcaagatcaccggcaacagcggggagcggctggcctgtggcatcatcgcccggtctgctggcctcttccagaaccccaagcagatctgcagctgtgatggcctgaccatctgggaggagcggggccggcccatcgccggcaagggcaggaaggagagcgcccagcccccagcccacctgtag

SEQ ID NO: 148436 - DNA, 1365 bp, synthetic construct
  misc_feature 1..1365: note = Description of Artificial Sequence: Synthetic coding sequence
  source 1..1365: mol_type = other DNA
atggccctgcagctgggccgcctgagcagcggcccctgctggctggtggcccggggcggctgcggcggcccccgggcctggagccagtgtggcggcggcggcctgcgggcctggagccagaggtctgctgctggccgggtgtgccggcccccaggccctgctggaacagagcagagccggggcctgggccacggcagcaccagccggggcggcccctgggtgggcaccggcctggccgccgccctggccggcctggtgggcctggccacagctgcctttggacatgtgcagagagctgagatgctgcccaagaccagcggcacccgggccaccagcctgggccggcctgaggaggaggaggatgagctggcccaccgctgcagcagcttcatggcccctcctgtgacagacctgggggagctgcggcggcggcctggggacatgaagaccaagatggagctgctgatcctggagacccaggcccaggtgtgccaggccctggcccaggtggatggaggagccaacttctctgtggaccgctgggagaggaaggagggcggcggcggcatcagctgtgtgctgcaggacggctgtgtgtttgagaaggccggcgtgtccatctctgtggtgcacggcaacctgtctgaggaggccgccaagcagatgaggagccggggcaaggtgctgaagaccaaggatggcaagctgcccttctgtgccatgggcgtgtcctctgtcatccaccccaagaacccccacgcccccaccatccacttcaactaccgctactttgaggtggaggaggctgatggcaacaagcagtggtggtttggaggcggctgtgacctgacccccacctacctgaaccaggaggatgctgtgcacttccacaggaccctgaaggaggcctgtgaccagcacggccctgacctgtaccccaagttcaagaagtggtgtgatgactacttcttcatcgcccacagaggagagcggcggggcatcggcggcatcttctttgatgacctggacagccccagcaaggaggaggtgttccgctttgtgcagagctgtgcccgggctgtggtgcccagctacatccccctggtgaagaagcactgtgatgacagcttcaccccccaggagaagctgtggcagcagctgcggcggggccgctacgtggagttcaacctgctgtatgaccggggcaccaagtttggcctcttcaccccaggcagccgcatcgagagcatcctgatgagcctgcccctgacagcccgctgggagtacatgcacagccccagcgagaacagcaaggaggccgagatcctggaggtgctgcggcacccccgggactgggtgaggtag

SEQ ID NO: 148437 - DNA, 1026 bp, synthetic construct
  misc_feature 1..1026: note = Description of Artificial Sequence: Synthetic coding sequence
  source 1..1026: mol_type = other DNA
atgggcgtggccaccaccctgcagccccccaccaccagcaagaccctgcagaagcagcacctggaggccgtgggcgcctaccagtatgtgctgaccttcctgttcatgggccccttcttcagcctgctggtgtttgtgctgctcttcaccagcctgtggcccttcagcgtcttctacctggtgtggctgtatgtggactgggacacccccaaccagggcggcagaagaagtgagtggatccggaacagagccatctggaggcagctgcgggactactaccctgtgaagctggtgaagacagctgagctgcccccagacagaaattatgtgctgggcgcccacccccacggcatcatgtgcaccggcttcctgtgcaacttcagcacagagagcaatggcttcagccagctgtttcctggcctgcggccctggctggccgtgctggccggcctcttctacctgcctgtgtacagagactacatcatgagctttggcctgtgccctgtgtcccggcagagcctggacttcatcctgagccagccccagctgggccaggccgtggtgatcatggtgggcggggcccacgaggccctgtacagcgtgcctggagagcactgcctgaccctgcagaagaggaaaggatttgtgcggctggccctgcggcacggggccagcctggtgcctgtgtacagctttggagaaaatgacatcttccggctgaaggcctttgccaccggctcctggcagcactggtgccagctgaccttcaagaagctgatgggcttcagcccctgcatcttctggggccggggcctcttcagcgccacctcctggggcctgctgccctttgctgtgcccatcaccaccgtggtgggccggcccatccctgtgccccagaggctgcaccccacagaggaggaggtgaaccactaccacgccctgtacatgacagccctggagcagctgtttgaggagcacaaggagagctgtggggtgcctgccagcacctgcctgaccttcatctag

SEQ ID NO: 148438 - DNA, 930 bp, synthetic construct
  misc_feature 1..930: note = Description of Artificial Sequence: Synthetic coding sequence
  source 1..930: mol_type = other DNA
atggccagcaagtcctggctgaacttcctgaccttcctgtgtggcagcgccatcggcttcctgctgtgcagccagctgttcagcatcctgctgggggagaaggtggacacccagcccaacgtgctgcacaatgacccccacgcccggcacagtgatgacaatggccagaaccacctggagggccagatgaacttcaatgctgacagcagccagcacaaggatgaaaatacagacattgctgaaaatctctaccagaaggtgcgcatcctgtgctgggtgatgacaggcccccagaacctggagaagaaggccaagcacgtgaaggccacctgggcccagcgctgcaacaaggtgctcttcatgagcagcgaggagaacaaggacttccctgctgtgggcctgaagaccaaggagggccgggaccagctgtactggaagaccatcaaggccttccagtatgtgcatgagcactacctggaggatgctgactggttcctgaaggcagatgatgacacctacgtgatcctggacaacctgcgctggctgctgagcaaatatgaccctgaggagcccatctacttcggccgccgcttcaagccctacgtgaagcagggctacatgtctgggggcgccggctacgtgctgagcaaggaggccctgaagagatttgtggatgccttcaagacagacaagtgcacccacagcagcagcattgaggacctggccctgggccgctgcatggagatcatgaatgtggaggccggggacagccgggacaccatcggcaaggagaccttccacccctttgtgcctgagcaccacctgatcaagggctacctgcccaggaccttctggtactggaactacaactactacccacctgtggaggtgtccctggagatcctgctgctgtgccagtacctggactag

SEQ ID NO: 148439 - DNA, 303 bp, synthetic construct
  misc_feature 1..303: note = Description of Artificial Sequence: Synthetic coding sequence
  source 1..303: mol_type = other DNA
atggccagcaagtcctggctgaacttcctgaccttcctgtgtggcagcgccatcggcttcctgctgtgcagccagctgttcagcatcctgctgggggagaaggtggacacccagcccaacgtgctgcacaatgacccccacgcccggcacagtgatgacaatggccagaaccacctggagggccagatgaacttcaatgctgacagcagccagcacaaggatgaaaatacagacattgctgaaaatctctaccagaaggtgcgcatcctgtgctgggtgatgacaggcccccagaacctgtag

SEQ ID NO: 148440 - DNA, 396 bp, synthetic construct
  misc_feature 1..396: note = Description of Artificial Sequence: Synthetic coding sequence
  source 1..396: mol_type = other DNA
atggccagcaagtcctggctgaacttcctgaccttcctgtgtggcagcgccatcggcttcctgctgtgcagccagctgttcagcatcctgctgggggagaaggtggacacccagcccaacgtgctgcacaatgacccccacgcccggcacagtgatgacaatggccagaaccacctggagggccagatgaacttcaatgctgacagcagccagcacaaggatgaaaatacagacattgctgaaaatctctaccagaaggtgcgcatcctgtgctgggtgatgacaggcccccagaacctggagaagaaggccaagcacgtgaaggccacctgggcccagcgctgcaacaaggtgctcttcatgagcagcgaggagaacaaggacttccctgcctag

SEQ ID NO: 148441 - DNA, 1092 bp, synthetic construct
  misc_feature 1..1092: note = Description of Artificial Sequence: Synthetic coding sequence
  source 1..1092: mol_type = other DNA
atggccagcaagtcctggctgaacttcctgaccttcctgtgtggcagcgccatcggcttcctgctgtgcagccagctgttcagcatcctgctgggggagaaggtggacacccagcccaacgtgctgcacaatgacccccacgcccggcacagtgatgacaatggccagaaccacctggagggccagatgaacttcaatgctgacagcagccagcacaaggatgaaaatacagacattgctgaaaatctctaccagaaggtgcgcatcctgtgctgggtgatgacaggcccccagaacctggagaagaaggccaagcacgtgaaggccacctgggcccagcgctgcaacaaggtgctcttcatgagcagcgaggagaacaaggacttccctgctgtgggcctgaagaccaaggagggccgggaccagctgtactggaagaccatcaaggccttccagtatgtgcatgagcactacctggaggatgctgactggttcctgaaggcagatgatgacacctacgtgatcctggacaacctgcgctggctgctgagcaaatatgaccctgaggagcccatctacttcggccgccgcttcaagccctacgtgaagcagggctacatgtctgggggcgccggctacgtgctgagcaaggaggccctgaagagatttgtggatgccttcaagacagacaagtgcacccacagcagcagcattgaggacctggccctgggccgctgcatggagatcatgaatgtggaggccggggacagccgggacaccatcggcaaggagaccttccacccctttgtgcctgagcaccacctgatcaagggctacctgcccaggaccttctggtactggaactacaactactacccacctgtggagggccctggctgctgcagcgacctggccgtgtccttccactacgtggacagcaccaccatgtatgagctggagtacctggtgtaccacctgcggccctacggctacctgtaccgctaccagcccaccctgcctgagcgcatcctgaaggagatcagccaggccaacaagaatgaagacaccaaggtgaagctgggcaacccctag

SEQ ID NO: 148442 - DNA, 549 bp, synthetic construct
  misc_feature 1..549: note = Description of Artificial Sequence: Synthetic coding sequence
  source 1..549: mol_type = other DNA
atgccccgggtggtgcctgaccagaggagcaagtttgaaaatgaggagttcttcaggaagctgagccgggagtgtgagatcaagtacacaggcttccgggaccggccccatgaggagcggcaggcccgcttccagaatgcctgcagagatggccgctcagaaattgcctttgtggccaccggcaccaacctgagcctgcagttcttccctgcctcctggcagggcgagcagaggcagacccccagccgggagtatgtggacctggagcgggaggccggcaaggtgtacctgaaggcccccatgatcctgaatggagtgtgtgtgatctggaagggctggattgacctgcagaggctggatggcatgggctgcctggagtttgatgaggagcgggcccagcaggaggatgccctggcccagcaggcctttgaggaggcccggcggaggacccgggagtttgaggaccgggacaggagccaccgggaggagatggaggtgcgggtgtcccagctgctggccgtgacaggcaagaagaccacccggccctag

SEQ ID NO: 148443 - DNA, 564 bp, synthetic construct
  misc_feature 1..564: note = Description of Artificial Sequence: Synthetic coding sequence
  source 1..564: mol_type = other DNA
atgccccgggtggtgcctgaccagaggagcaagtttgaaaatgaggagttcttcaggaagctgagccgggagtgtgagatcaagtacacaggcttccgggaccggccccatgaggagcggcaggcccgcttccagaatgcctgcagagatggccgctcagaaattgcctttgtggccaccggcaccaacctgagcctgcagttcttccctgcctcctggcagggcgagcagaggcagacccccagccgggagtatgtggacctggagcgggaggccggcaaggtgtacctgaaggcccccatgatcctgaatggagtgtgtgtgatctggaagggctggattgacctgcagaggctggatggcatgggctgcctggagtttgatgaggagcgggcccagcaggaggatgccctggcccagcaggcctttgaggaggcccggcggaggacccgggagtttgaggaccgggacaggagccaccgggaggagatggaggcccggcggcagcaggaccccagccctggcagcaacctgggcggcggagatgacctgaagctgaggtag

SEQ ID NO: 148444 - DNA, 1788 bp, synthetic construct
  misc_feature 1..1788: note = Description of Artificial Sequence: Synthetic coding sequence
  source 1..1788: mol_type = other DNA
atggtgggcgtgcctggagctgctgccttccagctgggccctgagaagagggtgcctgccatgcctggcagccctgtggaggtgaagatccagagccgcagcagcccccccaccatgccacccctgccccccatcaaccctgggggccccaggcctgtgtccttcacccccacagccctgagcaatggcatcaaccacagcccccccaccctgaatggagcccccagccccccccagcgcttcagcaatggacctgccagcagcaccagcagcgccctgaccaaccagcagctgcctgccacctgtggggcccggcagctgagcaagctgaagcgcttcctgaccaccctgcagcagtttggaaatgacatcagccctgagatcggggagaaggtgaggaccctggtgctggccctggtgaacagcacagtgaccatcgaggagttccactgcaagctgcaggaggccaccaacttccccctgcggcccttcgtcatccccttcctgaaggccaacctgcccctgctgcagcgggagctgctgcactgtgcccgggccgccaagcagacccccagccagtacctggcccagcacgagcacctgctgctgaacaccagcatcgccagccctgctgacagcagcgagctgctgatggaggtgcatggaaatggcaagaggcccagccctgagcggcgggaggagaacagctttgaccgggacaccatcgcccctgagcccccagccaagagggtgtgcaccatcagccctgcccccaggcacagccctgccctgactgtgcccctgatgaaccctgggggccagttccaccccaccccaccacccctgcagcactacaccctggaggacatcgccaccagccacctgtaccgggagcccaacaagatgctggagcaccgggaggtgcgggacagacaccacagcctgggcctgaatggaggctaccaggatgagctggtggaccaccggctgacagagcgggagtgggcagatgagtggaagcacctggaccacgccctgaactgcatcatggagatggtggagaagaccaggaggtccatggctgtgctgcggcgctgccaggagagtgaccgggaggagctgaactactggaagaggcgctacaatgaaaatacagagctgaggaagacaggaacagagctggtgtcccggcagcacagccctggcagcgctgacagcctgagcaatgacagccagcgggagttcaacagcaggcctggcaccggctacgtgcctgtggagttctggaagaagacagaggaggccgtgaacaaggtgaagatccaggccatgtctgaggtgcagaaggctgtggccgaggccgagcagaaggcctttgaagtcatcgccacagagcgggccaggatggagcagaccatcgcagatgtgaagaggcaggccgcagaagatgccttcctggtgatcaatgagcaggaggagagcacagagaactgctggaactgtggcaggaaggccagcgagacctgcagcggctgcaacatcgcccgctactgcggcagcttctgccagcacaaggactgggagcggcaccaccggctgtgtggccagaacctgcacggccagagcccccacggccagggccggcccctgctgcctgtgggccggggcagcagcgcccggtctgctgactgcagcgtgcccagccctgccctggacaagaccagcgccaccaccagccgcagcagcaccccagcctctgtgacagccatcgacaccaacggcctgtag

SEQ ID NO: 148445 - DNA, 1815 bp, synthetic construct
  misc_feature 1..1815: note = Description of Artificial Sequence: Synthetic coding sequence
  source 1..1815: mol_type = other DNA
atggccaaggagagcggcatcagcctgaaggagatccaggtgctggcccggcagtggaaggtgggccctgagaagagggtgcctgccatgcctggcagccctgtggaggtgaagatccagagccgcagcagcccccccaccatgccacccctgccccccatcaaccctgggggccccaggcctgtgtccttcacccccacagccctgagcaatggcatcaaccacagcccccccaccctgaatggagcccccagccccccccagcgcttcagcaatggacctgccagcagcaccagcagcgccctgaccaaccagcagctgcctgccacctgtggggcccggcagctgagcaagctgaagcgcttcctgaccaccctgcagcagtttggaaatgacatcagccctgagattggagagaaggtgaggaccctggtgctggccctggtgaacagcacagtgaccatcgaggagttccactgcaagctgcaggaggccaccaacttccccctgcggccctttgtgatccccttcctgaaggccaacctgcccctgctgcagcgggagctgctgcactgtgcccgggccgccaagcagacccccagccagtacctggcccagcacgagcacctgctgctgaacaccagcatcgccagccctgctgacagcagcgagctgctgatggaggtgcacggcaatggcaagaggcccagccctgagcggcgggaggagaacagctttgaccgggacaccatcgcccctgagcccccagccaagagggtgtgcaccatcagccctgcccccaggcacagccctgccctgactgtgcccctgatgaaccctgggggccagttccaccccaccccaccacccctgcagcactacaccctggaggacatcgccaccagccacctgtaccgggagcccaacaagatgctggagcaccgggaggtgcgggacagacaccacagcctgggcctgaatggaggctaccaggatgagctggtggaccaccggctgacagagcgggagtgggcagatgagtggaagcacctggaccacgccctgaactgcatcatggagatggtggagaagacccggcgctccatggctgtgctgcggcgctgccaggagagtgaccgggaggagctgaactactggaagaggcgctacaatgaaaatacagagctgaggaagacaggaacagagctggtgtcccggcagcacagccctggcagcgctgacagcctgagcaatgacagccagcgggagttcaacagccggcccggcaccggctacgtgcctgtggagttctggaagaagacagaggaggccgtgaacaaggtgaagatccaggccatgtctgaggtgcagaaggctgtggccgaggccgagcagaaggcctttgaggtgattgccacagagcgggccaggatggagcagaccatcgcagatgtgaagaggcaggccgcagaagatgccttcctggtgatcaatgagcaggaggagagcacagagaactgctggaactgtggcaggaaggccagcgagacctgcagcggctgcaacatcgcccgctactgcggcagcttctgccagcacaaggactgggagcggcaccaccggctgtgtggccagaacctgcacggccagagcccccacggccagggccggcccctgctgcctgtgggccggggcagcagcgcccggtctgctgactgcagcgtgcccagccctgccctggacaagaccagcgccaccaccagccgcagcagcaccccagcctctgtgacagccatcgacaccaacggcctgtag

SEQ ID NO: 148446 - DNA, 1815 bp, synthetic construct; identical to SEQ ID NO: 148445
  misc_feature 1..1815: note = Description of Artificial Sequence: Synthetic coding sequence
  source 1..1815: mol_type = other DNA

SEQ ID NO: 148447 - DNA, 792 bp, synthetic construct
  misc_feature 1..792: note = Description of Artificial Sequence: Synthetic coding sequence
  source 1..792: mol_type = other DNA
atgcctggcagccctgtggaggtgaagatccagagccgcagcagcccccccaccatgccacccctgccccccatcaaccctgggggccccaggcctgtgtccttcacccccacagccctgagcaatggcatcaaccacagcccccccaccctgaatggagcccccagccccccccagcgcttcagcaatggacctgccagcagcaccagcagcgccctgaccaaccagcagctgcctgccacctgtggggcccggcagctgagcaagctgaagcgcttcctgaccaccctgcagcagtttggaaatgacatcagccctgagatcggggagaaggtgaggaccctggtgctggccctggtgaacagcacagtgaccatcgaggagttccactgcaagctgcaggaggccaccaacttccccctgcggcccttcgtcatccccttcctgaaggccaacctgcccctgctgcagcgggagctgctgcactgtgcccgggccgccaagcagacccccagccagtacctggcccagcacgagcacctgctgctgaacaccagcatcgccagccctgctgacagcagcgagctgctgatggaggtgcatggaaatggcaagaggcccagccctgagagctgcatcatccacctgaagtccatgggcgtggccagcagacatgagtacttcagcggcaccctgcagatgcctgcccaccctgtgaggaacagcaccctggagaacctgtgggtggactgcagccgcagcctgcggagcacagtgctgcccttcccctag

SEQ ID NO: 148448 - DNA, 1728 bp, synthetic construct
  misc_feature 1..1728: note = Description of Artificial Sequence: Synthetic coding sequence
  source 1..1728: mol_type = other DNA
atgcctggcagccctgtggaggtgaagatccagagccgcagcagcccccccaccatgccacccctgccccccatcaaccctgggggccccaggcctgtgtccttcacccccacagccctgagcaatggcatcaaccacagcccccccaccctgaatggagcccccagccccccccagcgcttcagcaatggacctgccagcagcaccagcagcgccctgaccaaccagcagctgcctgccacctgtggggcccggcagctgagcaagctgaagcgcttcctgaccaccctgcagcagtttggaaatgacatcagccctgagatcggggagaaggtgaggaccctggtgctggccctggtgaacagcacagtgaccatcgaggagttccactgcaagctgcaggaggccaccaacttccccctgcggcccttcgtcatccccttcctgaaggccaacctgcccctgctgcagcgggagctgctgcactgtgcccgggccgccaagcagacccccagccagtacctggcccagcacgagcacctgctgctgaacaccagcatcgccagccctgctgacagcagcgagctgctgatggaggtgcatggaaatggcaagaggcccagccctgagcggcgggaggagaacagctttgaccgggacaccatcgcccctgagcccccagccaagagggtgtgcaccatcagccctgcccccaggcacagccctgccctgactgtgcccctgatgaaccctgggggccagttccaccccaccccaccacccctgcagcactacaccctggaggacatcgccaccagccacctgtaccgggagcccaacaagatgctggagcaccgggaggtgcgggacagacaccacagcctgggcctgaatggaggctaccaggatgagctggtggaccaccggctgacagagcgggagtgggcagatgagtggaagcacctggaccacgccctgaactgcatcatggagatggtggagaagaccaggaggtccatggctgtgctgcggcgctgccaggagagtgaccgggaggagctgaactactggaagaggcgctacaatgaaaatacagagctgaggaagacaggaacagagctggtgtcccggcagcacagccctggcagcgctgacagcctgagcaatgacagccagcgggagttcaacagcaggcctggcaccggctacgtgcctgtggagttctggaagaagacagaggaggccgtgaacaaggtgaagatccaggccatgtctgaggtgcagaaggctgtggccgaggccgagcagaaggcctttgaagtcatcgccacagagcgggccaggatggagcagaccatcgcagatgtgaagaggcaggccgcagaagatgccttcctggtgatcaatgagcaggaggagagcacagagaactgctggaactgtggcaggaaggccagcgagacctgcagcggctgcaacatcgcccgctactgcggcagcttctgccagcacaaggactgggagcggcaccaccggctgtgtggccagaacctgcacggccagagcccccacggccagggccggcccctgctgcctgtgggccggggcagcagcgcccggtctgctgactgcagcgtgcccagccctgccctggacaagaccagcgccaccaccagccgcagcagcaccccagcctctgtgacagccatcgacaccaacggcctgtag

SEQ ID NO: 148449 - DNA, 1137 bp, synthetic construct
  misc_feature 1..1137: note = Description of Artificial Sequence: Synthetic coding sequence
  source 1..1137: mol_type = other DNA
atggaggtgcacggcaatggcaagaggcccagccctgagcggcgggaggagaacagctttgaccgggacaccatcgcccctgagcccccagccaagagggtgtgcaccatcagccctgcccccaggcacagccctgccctgactgtgcccctgatgaaccctgggggccagttccaccccaccccaccacccctgcagcactacaccctggaggacatcgccaccagccacctgtaccgggagcccaacaagatgctggagcaccgggaggtgcgggacagacaccacagcctgggcctgaatggaggctaccaggatgagctggtggaccaccggctgacagagcgggagtgggcagatgagtggaagcacctggaccacgccctgaactgcatcatggagatggtggagaagacccggcgctccatggctgtgctgcggcgctgccaggagagtgaccgggaggagctgaactactggaagaggcgctacaatgaaaatacagagctgaggaagacaggaacagagctggtgtcccggcagcacagccctggcagcgctgacagcctgagcaatgacagccagcgggagttcaacagccggcccggcaccggctacgtgcctgtggagttctggaagaagacagaggaggccgtgaacaaggtgaagatccaggccatgtctgaggtgcagaaggctgtggccgaggccgagcagaaggcctttgaggtgattgccacagagcgggccaggatggagcagaccatcgcagatgtgaagaggcaggccgcagaagatgccttcctggtgatcaatgagcaggaggagagcacagagaactgctggaactgtggcaggaaggccagcgagacctgcagcggctgcaacatcgcccgctactgcggcagcttctgccagcacaaggactgggagcggcaccaccggctgtgtggccagaacctgcacggccagagcccccacggccagggccggcccctgctgcctgtgggccggggcagcagcgcccggtctgctgactgcagcgtgcccagccctgccctggacaagaccagcgccaccaccagccgcagcagcaccccagcctctgtgacagccatcgacaccaacggcctgtag

SEQ ID NO: 148450 - DNA, 546 bp, synthetic construct
  misc_feature 1..546: note = Description of Artificial Sequence: Synthetic coding sequence
  source 1..546: mol_type = other DNA
atggtgggcgtgcctggagctgctgccttccagctgggccctgagaagagggtgcctgccatgcctggcagccctgtggaggtgaagatccagagccgcagcagcccccccaccatgccacccctgccccccatcaaccctgggggccccaggcctgtgtccttcacccccacagccctgagcaatggcatcaaccacagcccccccaccctgaatggagcccccagccccccccagcgcttcagcaatggacctgccagcagcaccagcagcgccctgaccaaccagcagctgcctgccacctgtggggcccggcagctgagcaagctgaagcgcttcctgaccaccctgcagcagtttggaaatgacatcagccctgagatcggggagaaggtgaggaccctggtgctggccctggtgaacagcacagtgaccatcgaggagttccactgcaagctgcaggaggccaccaacttccccctgcggcccttcgtcatccccttcctgaaggccaacctgcccctgctgcagcgggagctgctgtag

SEQ ID NO: 148451 - DNA, 243 bp, synthetic construct
  misc_feature 1..243: note = Description of Artificial Sequence: Synthetic coding sequence
  source 1..243: mol_type = other DNA
atggccaaggagagcggcatcagcctgaaggagatccaggtgctggcccggcagtggaaggtgggccctgagaagagggtgcctgccatgcctggcagccctgtggaggtgaagatccagagccgcagcagcccccccaccatgccacccctgccccccatcaaccctgggggccccaggcctgtgtccttcacccccacagccctgagcaatggcatcaaccacagcccccccaccctgtag

SEQ ID NO: 148452 - DNA, 459 bp, synthetic construct
  misc_feature 1..459: note = Description of Artificial Sequence: Synthetic coding sequence
  source 1..459: mol_type = other DNA
atgtctgaggtgcagaaggctgtggccgaggccgagcagaaggcctttgaggtgattgccacagagcgggccaggatggagcagaccatcgcagatgtgaagaggcaggccgcagaagatgccttcctggtgatcaatgagcaggaggagagcacagagaactgctggaactgtggcaggaaggccagcgagacctgcagcggctgcaacatcgcccgctactgcggcagcttctgccagcacaaggactgggagcggcaccaccggctgtgtggccagaacctgcacggccagagcccccacggccagggccggcccctgctgcctgtgggccggggcagcagcgcccggtctgctgactgcagcgtgcccagccctgccctggacaagaccagcgccaccaccagccgcagcagcaccccagcctctgtgacagccatcgacaccaacggcctgtag

SEQ ID NO: 148453 - DNA, 1962 bp, synthetic construct
  misc_feature 1..1962: note = Description of Artificial Sequence: Synthetic coding sequence
  source 1..1962: mol_type = other DNA
atgcctgccagccggctgcgggaccgggccgccagcagcgccagcggcagcacctgtggctccatgagccagacccaccctgtgctggagagcggcctgctggccagcgctggctgcagcgccccccggggccccaggaaaggaggccctgcccctgtggacaggaaggccaaggccagcgccatgccagacagccctgctgaggtgaagacccagcccaggagcaccccacccagcatgcctcctcctcctcctgctgccagccagggcgccacccggccccccagcttcaccccccacacccaccgggaggatggccctgccaccctgccccacggccgcttccacggctgcctgaagtggagcatggtgtgcctgctgatgaatggcagcagccacagccccacagccatcaatggagccccctgcacccccaacggcttcagcaatggacctgccaccagcagcacagccagcctgagcacccagcacctgcccccagcctgtggggcccggcagctgagcaagctgaagcgcttcctgaccaccctgcagcagtttggaagtgacatcagccctgagattggagagcgggtgaggaccctggtgctgggcctggtgaacagcaccctgaccatcgaggagttccacagcaagctgcaggaggccaccaacttccccctgcggccctttgtgatccccttcctgaaggccaacctgcccctgctgcagcgggagctgctgcactgtgcccggctggccaagcagaccccagcccagtacctggcccagcacgagcagctgctgctggatgccagcgccagcagccccatcgacagcagcgagctgctgctggaggtgaatgaaaatggcaagaggaggaccccagacaggaccaaggaaaatggaagtgaccgggaccccctgcaccctgagcacctgagcaagaggccctgcaccctgaacccagcccagcgctacagccccagcaatggaccaccccagcccaccccaccaccccactaccgcctggaggacatcgccatggcccaccacttcagagatgcctaccgccacccagacccccgggagctgcgggagcggcaccggcccctggtggtgcccggcagccggcaggaggaggtgattgaccacaagctgacagagcgggagtgggccgaggagtggaagcacctgaacaacctgctgaactgcatcatggacatggtggagaagacccggcgcagcctgactgtgctgcggcgctgccaggaggccgaccgggaggagctgaaccactgggcccggcgctacagtgatgctgaggacaccaagaagggccctgccccagctgctgcccggcccaggagcagcagcgctggccctgagggcccccagctggatgtgccccgggagttcctgcccaggaccctgaccggctacgtgcctgaggacatctggaggaaggccgaggaggccgtgaatgaggtgaagaggcaggccatgtctgagctgcagaaggctgtgtctgatgctgagaggaaggcccacgagctgatcaccacagagcgggccaagatggagcgggccctggccgaggccaagaggcaggcctctgaagatgccctgaccgtcatcaaccagcaggaggacagcagcgagagctgctggaactgtggcaggaaggccagcgagacctgcagcggctgcaatgctgcccgctactgcggcagcttctgccagcaccgggactgggagaagcaccaccacgtgtgtggccagagcctgcagggccccacagctgtggtggccgaccctgtgcccggccccccagaggccgcccacagcctgggccccagcctgcctgtgggcgccgccagccccagcgaggccggcagcgctggccccagcaggcctggcagccccagccccccaggccccctggacacagtgcccaggtag

SEQ ID NO: 148454 - DNA, 1704 bp, synthetic construct
  misc_feature 1..1704: note = Description of Artificial Sequence: Synthetic coding sequence
  source 1..1704: mol_type = other DNA
atgccagacagccctgctgaggtgaagacccagcccaggagcaccccacccagcatgcctcctcctcctcctgctgccagccagggcgccaccaggcctccttccttcaccccccacaccctgatgaatggcagcagccacagccccacagccatcaatggagccccctgcacccccaacggcttcagcaatggacctgccaccagcagcacagccagcctgagcacccagcacctgcccccagcctgtggggcccggcagctgagcaagctgaagcgcttcctgaccaccctgcagcagtttggaagtgacatcagccctgagattggagagcgggtgaggaccctggtgctgggcctggtgaacagcaccctgaccatcgaggagttccacagcaagctgcaggaggccaccaacttccccctgcggccctttgtgatccccttcctgaaggccaacctgcccctgctgcagcgggagctgctgcactgtgcccggctggccaagcagaccccagcccagtacctggcccagcacgagcagctgctgctggatgccagcgccagcagccccatcgacagcagcgagctgctgctggaggtgaatgaaaatggcaagaggaggaccccagacaggaccaaggaaaatggaagtgaccgggaccccctgcaccctgagcacctgagcaagaggccctgcaccctgaacccagcccagcgctacagccccagcaatggaccaccccagcccaccccaccaccccactaccgcctggaggacatcgccatggcccaccacttcagagatgcctaccgccacccagacccccgggagctgcgggagcggcaccggcccctggtggtgcccggcagccggcaggaggaggtgattgaccacaagctgacagagcgggagtgggccgaggagtggaagcacctgaacaacctgctgaactgcatcatggacatggtggagaagacccggcgcagcctgactgtgctgcggcgctgccaggaggccgaccgggaggagctgaaccactgggcccggcgctacagtgatgctgaggacaccaagaagggccctgccccagctgctgcccggcccaggagcagcagcgctggccctgagggcccccagctggatgtgccccgggagttcctgcccaggaccctgaccggctacgtgcctgaggacatctggaggaaggccgaggaggccgtgaatgaggtgaagaggcaggccatgtctgagctgcagaaggctgtgtctgatgctgagaggaaggcccacgagctgatcaccacagagcgggccaagatggagcgggccctggccgaggccaagaggcaggcctctgaagatgccctgaccgtcatcaaccagcaggaggacagcagcgagagctgctggaactgtggcaggaaggccagcgagacctgcagcggctgcaatgctgcccgctactgcggcagcttctgccagcaccgggactgggagaagcaccaccacgtgtgtggccagagcctgcagggccccacagctgtggtggccgaccctgtgcccggccccccagaggccgcccacagcctgggccccagcctgcctgtgggcgccgccagccccagcgaggccggcagcgctggccccagcaggcctggcagccccagccccccaggccccctggacacagtgcccaggtag

SEQ ID NO: 148455 - DNA, 1704 bp, synthetic construct; identical to SEQ ID NO: 148454
  misc_feature 1..1704: note = Description of Artificial Sequence: Synthetic coding sequence
  source 1..1704: mol_type = other DNA

SEQ ID NO: 148456 - DNA, 1848 bp, synthetic construct
  misc_feature 1..1848: note = Description of Artificial Sequence: Synthetic coding sequence
  source 1..1848: mol_type = other DNA
atgcctgccagccggctgcgggaccgggccgccagcagcgccagcggcagcacctgtggctccatgagccagacccaccctgtgctggagagcggcctgctggccagcgctggctgcagcgccccccggggccccaggaaaggaggccctgcccctgtggacaggaaggccaaggccagcgccatgccagacagccctgctgaggtgaagacccagcccaggagcaccccacccagcatgcctcctcctcctcctgctgccagccagggcgccacccggccccccagcttcaccccccacaccctgatgaatggcagcagccacagccccacagccatcaacggggccccctgcaccccaaatggcttcagcaatggacctgccaccagcagcacagccagcctgagcacccagcacctgcccccagcctgtggggcccggcagctgagcaagctgaagcgcttcctgaccaccctgcagcagtttggaagtgacatcagccctgagatcggggagcgggtgaggaccctggtgctgggcctggtgaacagcaccctgaccatcgaggagttccacagcaagctgcaggaggccaccaacttccccctgcggcccttcgtcatccccttcctgaaggccaacctgcccctgctgcagcgggagctgctgcactgtgcccggctggccaagcagaccccagcccagtacctggcccagcacgagcagctgctgctggatgccagcgccagcagccccatcgacagcagcgagctgctgctggaggtgaatgaaaatggcaagaggaggaccccagacaggaccaaggaaaatggaagtgaccgggaccccctgcaccctgagcgctacagccccagcaatggaccaccccagcccaccccaccaccccactaccgcctggaggacatcgccatggcccaccacttcagagatgcctaccgccacccagacccccgggagctgcgggagcggcaccggcccctggtggtgcccggcagccggcaggaggaggtgattgaccacaagctgacagagcgggagtgggccgaggagtggaagcacctgaacaacctgctgaactgcatcatggacatggtggagaagacccggcgcagcctgactgtgctgcggcgctgccaggaggccgaccgggaggagctgaaccactgggcccggcgctacagtgatgctgaggacaccaagaagggccctgccccagctgctgcccggcccaggagcagcagcgctggccctgagggcccccagctggatgtgccccgggagttcctgcccaggaccctgaccggctacgtgcctgaggacatctggaggaaggccgaggaggccgtgaatgaggtgaagaggcaggccatgtctgagctgcagaaggctgtgtctgatgctgagaggaaggcccacgagctgatcaccacagagcgggccaagatggagcgggccctggccgaggccaagaggcaggcctctgaagatgccctgaccgtcatcaaccagcaggaggacagcagcgagagctgctggaactgtggcaggaaggccagcgagacctgcagcggctgcaatgctgcccgctactgcggcagcttctgccagcaccgggactgggagaagcaccaccacgtgtgtggccagagcctgcagggccccacagctgtggtggccgaccctgtgcccggccccccagaggccgcccacagcctgggccccagcctgcctgtgggcgccgccagccccagcgaggccggcagcgctggccccagcaggcctggcagccccagccccccaggccccctggacacagtgcccaggtag

SEQ ID NO: 148457 - DNA, 1734 bp, synthetic construct
  misc_feature 1..1734: note = Description of Artificial Sequence: Synthetic coding sequence
  source 1..1734: mol_type = other DNA
atgcctgccagccggctgcgggaccgggccgccagcagcgccagcggcagcacctgtggctccatgagccagacccaccctgtgctggagagcggcctgctggccagcgctggctgcagcgccccccggggccccaggaaaggaggccctgtgatgaatggcagcagccacagccccacagccatcaatggagccccctgcacccccaacggcttcagcaatggacctgccaccagcagcacagccagcctgagcacccagcacctgcccccagcctgtggggcccggcagctgagcaagctgaagcgcttcctgaccaccctgcagcagtttggaagtgacatcagccctgagattggagagcgggtgaggaccctggtgctgggcctggtgaacagcaccctgaccatcgaggagttccacagcaagctgcaggaggccaccaacttccccctgcggccctttgtgatccccttcctgaaggccaacctgcccctgctgcagcgggagctgctgcactgtgcccggctggccaagcagaccccagcccagtacctggcccagcacgagcagctgctgctggatgccagcgccagcagccccatcgacagcagcgagctgctgctggaggtgaatgaaaatggcaagaggaggaccccagacaggaccaaggaaaatggaagtgaccgggaccccctgcaccctgagcacctgagcaagaggccctgcaccctgaacccagcccagcgctacagccccagcaatggaccaccccagcccaccccaccaccccactaccgcctggaggacatcgccatggcccaccacttcagagatgcctaccgccacccagacccccgggagctgcgggagcggcaccggcccctggtggtgcccggcagccggcaggaggaggtgattgaccacaagctgacagagcgggagtgggccgaggagtggaagcacctgaacaacctgctgaactgcatcatggacatggtggagaagacccggcgcagcctgactgtgctgcggcgctgccaggaggccgaccgggaggagctgaaccactgggcccggcgctacagtgatgctgaggacaccaagaagggccctgccccagctgctgcccggcccaggagcagcagcgctggccctgagggcccccagctggatgtgccccgggagttcctgcccaggaccctgaccggctacgtgcctgaggacatctggaggaaggccgaggaggccgtgaatgaggtgaagaggcaggccatgtctgagctgcagaaggctgtgtctgatgctgagaggaaggcccacgagctgatcaccacagagcgggccaagatggagcgggccctggccgaggccaagaggcaggcctctgaagatgccctgaccgtcatcaaccagcaggaggacagcagcgagagctgctggaactgtggcaggaaggccagcgagacctgcagcggctgcaatgctgcccgctactgcggcagcttctgccagcaccgggactgggagaagcaccaccacgtgtgtggccagagcctgcagggccccacagctgtggtggccgaccctgtgcccggccccccagaggccgcccacagcctgggccccagcctgcctgtgggcgccgccagccccagcgaggccggcagcgctggccccagcaggcctggcagccccagccccccaggccccctggacacagtgcccaggtag

SEQ ID NO: 148458 - DNA, 558 bp, synthetic construct
  misc_feature 1..558: note = Description of Artificial Sequence: Synthetic coding sequence
  source 1..558: mol_type = other DNA
atggccgcccagaaggaccagcagaaggatgctgaggccgagggcctgagcggcaccaccctgctgcccaagctgatccccagcggggccggccgggagtggctggagcggcggcgggccaccatccggccctggagcacctttgtggaccagcagcgcttcagccggcccaggaacctgggggagctgtgccagaggctggtgagaaatgtggagtactaccagagcaactacgtgtttgtgttcctgggcctcatcctgtactgtgtggtgaccagccccatgctgctggtggccctggccgtgttcttcggggcctgctacatcctgtacctgcggaccctggagagcaagctggtgctgtttggccgggaggtgtccccagcccaccagtatgccctggccggcggcatctccttccccttcttctggctggccggggccggcagcgctgtgttctgggtgctgggcgccaccctggtggtgattggcagccatgctgccttccaccagatcgaggccgtggatggagaggagctgcagatggagcctgtgtag

SEQ ID NO: 148459 - DNA, 3147 bp, synthetic construct
  misc_feature 1..3147: note = Description of Artificial Sequence: Synthetic coding sequence
  source 1..3147: mol_type = other DNA
atgaaccgcttccgggtgtccaagttccgccacacagaggcccggcccccccggcgggagagctggatcagtgacatccgggccggcacagcccccagctgcaggaaccacatcaagagcagctgcagcctgattgccttcaacagcgacaggcctggggtgctgggcatcgtgcccctgcagggccagggcgaggacaagagaagagtggcccacctgggctgccacagcgacctggtgacagacctggacttcagcccctttgatgacttcctgctggccactggatctgctgacagaacagtgaagctgtggaggctgcccggccctggccaggccctgcccagcgcccctggggtggtgctgggccctgaggacctgcctgtggaggtgctgcagttccaccccaccagtgatggcatcctggtgtctgctgctggcaccaccgtgaaggtgtgggatgctgccaagcagcagcccctgacagagctggccgcccatggagacctggtgcagagcgctgtgtggagcagagatggagccctggtgggcacagcctgcaaggacaagcagctgcgcatctttgaccccaggaccaagccccgggccagccagagcacccaggcccacgagaacagccgggacagccggctggcctggatgggcacctgggagcacctggtgtccacaggcttcaaccagatgagggagcgggaggtgaagctgtgggacacccgcttcttcagcagcgccctggccagcctgaccctggacaccagcctgggctgcctggtgcccctgctggaccctgacagcggcctgctggtgctggccggcaagggggagcggcagctgtactgctatgaggtggtgccccagcagcctgccctgagccctgtgacccagtgtgtgctggagagcgtgctgcggggggccgccctggtgccccggcaggccctggccgtgatgagctgtgaggtgctgcgggtgctgcagctgagtgacacagccatcgtgcccatcggctaccacgtgcccaggaaggctgtggagttccacgaggacctcttcccagacacagctggctgtgtgcctgccacagacccccacagctggtgggccggggacaaccagcaggtgcagaaggtgtccctgaacccagcctgccggccccaccccagcttcaccagctgcctggtgcccccagctgagcccctgcctgacacagcccagcctgctgtgatggagacccctgtgggagatgctgatgccagcgagggcttcagcagcccccccagcagcctgaccagccccagcacccccagcagcctgggccccagcctgagcagcaccagcggcatcggcaccagccccagcctgcggagcctgcagagcctgctgggccccagcagcaagttcagacatgcccagggcaccgtgctgcaccgggacagccacatcaccaacctgaagggcctgaacctgaccaccccaggagagagtgatggcttctgtgccaacaagctgcgggtggccgtgcccctgctgagcagcggcggccaggtggccgtgctggagctgaggaagccaggccgcctgcctgacacagccctgcccaccctgcagaatggagctgctgtgacagacctggcctgggacccctttgacccccaccggctggccgtggccggagaagatgcccgcatccggctgtggagggtgcctgctgagggcctggaggaggtgctgaccaccccagagaccgtgctgaccggccacacagagaagatctgcagcctgcgcttccaccccctggccgccaacgtgctggccagcagcagctatgacctgactgtgcgcatctgggacctgcaggccggggctgaccggctgaagctgcagggccaccaggaccagatcttcagcctggcctggagcccagatggccagcagctggccaccgtgtgcaaggatggccgggtgcgggtgtaccggcccaggagcggccctgagcccctgcaggagggccctggccccaagggcggccgcggggccagaattgtgtgggtgtgtgatggccgctgcctgctggtgtctggctttgacagccagagcgagcggcagctgctgctgtatgaggccgaggccctggccggcggccccctggccgtgctgggcctggatgtggcccccagcaccctgctgcccagctatgaccctgacaccggcctggtgctgctgaccgggaagggggacaccagggtcttcctgtatgagctgctgcctgagagccccttcttcctggagtgcaacagcttcaccagcccagacccccacaagggcctggtgctgctgcccaagacagaatgtgatgtgcgggaggtggagctgatgcgctgcctgcggctgcggcagagcagcctggagcctgtggccttccggctgccccgggtgaggaaggagttcttccaggatgatgtgtttcctgacacagctgtgatctgggagcctgtgctgtctgctgaggcctggctgcagggcgccaacggccagccctggctgctgagcctgcagcccccagacatgagccctgtgtcccaggccccccgggaggccccagcccggcgggcccccagcagcgcccagtacctggaggagaagagtgaccagcagaagaaggaggagctgctgaatgccatggtggccaagctgggcaaccgggaggaccccctgccccaggacagctttgagggcgtggatgaagatgagtgggccaagtacctggcccagatcatcgtgatgggcgtgcaggtggtgggccgggcctttgcccgggccctgcggcaggagtttgctgccagcagagctgctgctgatgcccggggccgggccggccacaggtctgctgctgccagcaacctgagcggcctgagcctgcaggaggcccagcagatcctgaatgtgtccaagctgagccctgaggaggtgcagaagaactatgagcacctgttcaaggtgaatgacaagtctgtgggcggcagcttctacctgcagagcaaggtggtgcgggccaaggagcggctggatgaggagctgaagatccaggcccaggaggaccgggagaagggccagatgccccacacctag

SEQ ID NO: 148460 - DNA, 2778 bp, synthetic construct
  misc_feature 1..2778: note = Description of Artificial Sequence: Synthetic coding sequence
  source 1..2778: mol_type = other DNA
atgaaccgcttccgggtgtccaagttccgccacacagaggcccggcccccccggcgggagagctggatcagtgacatccgggccggcacagcccccagctgcaggaaccacatcaagagcagctgcagcctgattgccttcaacagcgacaggcctggggtgctgggcatcgtgcccctgcagggccagggcgaggacaagagaagagtggcccacctgggctgccacagcgacctggtgacagacctggacttcagcccctttgatgacttcctgctggccactggatctgctgacagaacagtgaagctgtggaggctgcccggccctggccaggccctgcccagcgcccctggggtggtgctgggccctgaggacctgcctgtggaggtgctgcagttccaccccaccagtgatggcatcctggtgtctgctgctggcaccaccgtgaaggtgtgggatgctgccaagcagcagcccctgacagagctggccgcccatggagacctggtgcagagcgctgtgtggagcagagatggagccctggtgggcacagcctgcaaggacaagcagctgcgcatctttgaccccaggaccaagccccgggccagccagagcacccaggcccacgagaacagccgggacagccggctggcctggatgggcacctgggagcacctggtgtccacaggcttcaaccagatgagggagcgggaggtgaagctgtgggacacccgcttcttcagcagcgccctggccagcctgaccctggacaccagcctgggctgcctggtgcccctgctggaccctgacagcggcctgctggtgctggccggcaagggggagcggcagctgtactgctatgaggtggtgccccagcagcctgccctgagccctgtgacccagtgtgtgctggagagcgtgctgcggggggccgccctggtgccccggcaggccctggccgtgatgagctgtgaggtgctgcgggtgctgcagctgagtgacacagccatcgtgcccatcggctaccacgtgcccaggaaggctgtggagttccacgaggacctcttcccagacacagctggctgtgtgcctgccacagacccccacagctggtgggccggggacaaccagcaggtgcagaaggtgtccctgaacccagcctgccggccccaccccagcttcaccagctgcctggtgcccccagctgagcccctgcctgacacagcccagcctgctgtgatggagacccctgtgggagatgctgatgccagcgagggcttcagcagcccccccagcagcctgaccagccccagcacccccagcagcctgggccccagcctgagcagcaccagcggcatcggcaccagccccagcctgcggagcctgcagagcctgctgggccccagcagcaagttcagacatgcccagggcaccgtgctgcaccgggacagccacatcaccaacctgaagggcctgaacctgaccaccccaggagagagtgatggcttctgtgccaacaagctgcgggtggccgtgcccctgctgagcagcggcggccaggtggccgtgctggagctgaggaagccaggccgcctgcctgacacagccctgcccaccctgcagaatggagctgctgtgacagacctggcctgggacccctttgacccccaccggctggccgtggccggagaagatgcccgcatccggctgtggagggtgcctgctgagggcctggaggaggtgctgaccaccccagagaccgtgctgaccggccacacagagaagatctgcagcctgcgcttccaccccctggccgccaacgtgctggccagcagcagctatgacctgactgtgcgcatctgggacctgcaggccggggctgaccggctgaagctgcagggccaccaggaccagatcttcagcctggcctggagcccagatggccagcagctggccaccgtgtgcaaggatggccgggtgcgggtgtaccggcccaggagcggccctgagcccctgcaggagggccctggccccaagggcggccgcggggccagaattgtgtgggtgtgtgatggccgctgcctgctggtgtctggctttgacagccagagcgagcggcagctgctgctgtatgaggccgaggccctggccggcggccccctggccgtgctgggcctggatgtggcccccagcaccctgctgcccagctatgaccctgacaccggcctggtgctgctgaccgggaagggggacaccagggtcttcctgtatgagctgctgcctgagagccccttcttcctggagtgcaacagcttcaccagcccagacccccacaagggcctggtgctgctgcccaagacagaatgtgatgtgcgggaggtggagctgatgcgctgcctgcggctgcggcagagcagcctggagcctgtggccttccggctgccccgggtgaggaaggagttcttccaggatgatgtgtttcctgacacagctgtgatctgggagcctgtgctgtctgctgaggcctggctgcagggcgccaacggccagccctggctgctgagcctgcagcccccagacatgagccctgtgtcccaggccccccgggaggccccagcccggcgggcccccagcagcgcccagtacctggaggagaagagtgaccagcagaagaaggaggagctgctgaatgccatggtggccaagctgggcaaccgggaggaccccctgccccaggacagctttgagggcgtggatgaagatgagtgggactag

SEQ ID NO: 148461 - DNA, 1104 bp, synthetic construct
  misc_feature 1..1104: note = Description of Artificial Sequence: Synthetic coding sequence
  source 1..1104: mol_type = other DNA
atgaaccgcttccgggtgtccaagttccgccacacagaggcccggcccccccggcgggaggacaagcagctgcgcatctttgaccccaggaccaagccccgggccagccagagcacccaggcccacgagaacagccgggacagccggctggcctggatgggcacctgggagcacctggtgtccacaggcttcaaccagatgagggagcgggaggtgaagctgtgggacacccgcttcttcagcagcgccctggccagcctgaccctggacaccagcctgggctgcctggtgcccctgctggaccctgacagcggcctgctggtgctggccggcaagggggagcggcagctgtactgctatgaggtggtgccccagcagcctgccctgagccctgtgacccagtgtgtgctggagagcgtgctgcggggggccgccctggtgccccggcaggccctggccgtgatgagctgtgaggtgctgcgggtgctgcagctgagtgacacagccatcgtgcccatcggctaccacgtgcccaggaaggctgtggagttccacgaggacctcttcccagacacagctggctgtgtgcctgccacagacccccacagctggtgggccggggacaaccagcaggtgcagaaggtgtccctgaacccagcctgccggccccaccccagcttcaccagctgcctggtgcccccagctgagcccctgcctgacacagcccagcctgctgtgatggagacccctgtgggagatgctgatgccagcgagggcttcagcagcccccccagcagcctgaccagccccagcacccccagcagcctgggccccagcctgagcagcaccagcggcatcggcaccagccccagcctgcggagcctgcagagcctgctgggccccagcagcaagttcagacatgcccagggcaccgtgctgcaccgggacagccacatcaccaacctgaagggcctgaacctgaccaccccaggagagagtgatggcttctgtgccaacaagctgcgggtggccgtgcccctgctgagcagcggcggccaggtggccgtgctggagatgagggagaagaggcaccgggaggtgtag

SEQ ID NO: 148462 - DNA, 2523 bp, synthetic construct
  misc_feature 1..2523: note = Description of Artificial Sequence: Synthetic coding sequence
  source 1..2523: mol_type = other DNA
atgaaccgcttccgggtgtccaagttccgccacacagaggcccggcccccccggcgggagagctggatcagtgacatccgggccggcacagcccccagctgcaggaaccacatcaagagcagctgcagcctgattgccttcaacagcgacaggcctggggtgctgggcatcgtgcccctgcagggccagggcgaggacaagagaagagtggcccacctgggctgccacagcgagctggccgcccacggggacctggtgcagagcgctgtgtggagcagagatggagccctggtgggcacagcctgcaaggacaagcagctgcgcatctttgaccccaggaccaagccccgggccagccagagcacccaggcccacgagaacagccgggacagccggctggcctggatgggcacctgggagcacctggtgtccacaggcttcaaccagatgagggagcgggaggtgaagctgtgggacacccgcttcttcagcagcgccctggccagcctgaccctggacaccagcctgggctgcctggtgcccctgctggaccctgattctggcctgctggtgctggccgggaaaggagagcggcagctgtactgctatgaggtggtgccccagcagcctgccctgagccctgtgacccagtgtgtgctggagagcgtgctgcggggagctgccctggtgccccggcaggccctggccgtgatgagctgtgaggtgctgcgggtgctgcagctgagtgacacagccatcgtgcccatcggctaccacgtgcccaggaaggctgtggagttccatgaagatctcttcccagacacagctggctgtgtgcctgccacagacccccacagctggtgggccggggacaaccagcaggtgcagaaggtgtccctgaacccagcctgccggccccaccccagcttcaccagctgcctggtgcccccagctgagcccctgcctgacacagcccagcctgctgtgatggagacccctgtgggagatgctgatgccagcgagggcttcagcagcccccccagcagcctgaccagccccagcacccccagcagcctgggccccagcctgagcagcaccagcggcatcggcaccagccccagcctgcggagcctgcagagcctgctgggccccagcagcaagttcagacatgcccagggcaccgtgctgcaccgggacagccacatcaccaacctgaagggcctgaacctgaccaccccaggagagagtgatggcttctgtgccaacaagctgcgggtggccgtgcccctgctgagcagcggcggccaggtggccgtgctggagctgaggaagccaggccgcctgcctgacacagccctgcccaccctgcagaatggagctgctgtgacagacctggcctgggacccctttgacccccaccggctggccgtggccggggaggatgcccgcatccggctgtggagggtgcctgctgagggcctggaggaggtgctgaccaccccagagaccgtgctgaccggccacacagagaagatctgcagcctgcgcttccaccccctggccgccaacgtgctggccagcagcagctatgacctgactgtgcgcatctgggacctgcaggccggggctgaccggctgaagctgcagggccaccaggaccagatcttcagcctggcctggagcccagatggccagcagctggccaccgtgtgcaaggatggccgggtgcgggtgtaccggcccaggagcggccctgagcccctgcaggagggccctggccccaagggcggccgcggggcccgcatcgtgtgggtgtgtgatggccgctgcctgctggtgtctggctttgacagccagagcgagcggcagctgctgctgtatgaagctgaggccctggccggcggccccctggccgtgctgggcctggatgtggcccccagcaccctgctgcccagctatgaccctgacaccggcctggtgctgctgactggaaaaggagacaccagggtcttcctgtatgagctgctgcctgagagccccttcttcctggagtgcaacagcttcaccagcccagacccccacaagggcctggtgctgctgcccaagacagaatgtgatgtgcgggaggtggagctgatgcgctgcctgcggctgcggcagagcagcctggagcctgtggccttccggctgccccgggtgaggaaggagttcttccaggatgatgtgtttcctgacacagctgtgatctgggagcctgtgctgtctgctgaggcctggctgcagggcgccaacggccagccctggctgctgagcctgcagcccccagacatgagccctgtgtcccaggccccccgggaggccccagcccggcgggcccccagcagcgcccagtacctggaggagaagagtgaccagcagaagaaggaggagctgctgaatgccatggtggccaagctgggcaaccgggaggaccccctgccccaggacagctttgaaggagtggatgaagatgagtgggactag

SEQ ID NO: 148463 - DNA, 2118 bp, synthetic construct
  misc_feature 1..2118: note = Description of Artificial Sequence: Synthetic coding sequence
  source 1..2118: mol_type = other DNA
atgggcacctgggagcacctggtgtccacaggcttcaaccagatgagggagcgggaggtgaagctgtgggacacccgcttcttcagcagcgccctggccagcctgaccctggacaccagcctgggctgcctggtgcccctgctggaccctgacagcggcctgctggtgctggccggcaagggggagcggcagctgtactgctatgaggtggtgccccagcagcctgccctgagccctgtgacccagtgtgtgctggagagcgtgctgcggggggccgccctggtgccccggcaggccctggccgtgatgagctgtgaggtgctgcgggtgctgcagctgagtgacacagccatcgtgcccatcggctaccacgtgcccaggaaggctgtggagttccacgaggacctcttcccagacacagctggctgtgtgcctgccacagacccccacagctggtgggccggggacaaccagcaggtgcagaaggtgtccctgaacccagcctgccggccccaccccagcttcaccagctgcctggtgcccccagctgagcccctgcctgacacagcccagcctgctgtgatggagacccctgtgggagatgctgatgccagcgagggcttcagcagcccccccagcagcctgaccagccccagcacccccagcagcctgggccccagcctgagcagcaccagcggcatcggcaccagccccagcctgcggagcctgcagagcctgctgggccccagcagcaagttcagacatgcccagggcaccgtgctgcaccgggacagccacatcaccaacctgaagggcctgaacctgaccaccccaggagagagtgatggcttctgtgccaacaagctgcgggtggccgtgcccctgctgagcagcggcggccaggtggccgtgctggagctgaggaagccaggccgcctgcctgacacagccctgcccaccctgcagaatggagctgctgtgacagacctggcctgggacccctttgacccccaccggctggccgtggccggagaagatgcccgcatccggctgtggagggtgcctgctgagggcctggaggaggtgctgaccaccccagagaccgtgctgaccggccacacagagaagatctgcagcctgcgcttccaccccctggccgccaacgtgctggccagcagcagctatgacctgactgtgcgcatctgggacctgcaggccggggctgaccggctgaagctgcagggccaccaggaccagatcttcagcctggcctggagcccagatggccagcagctggccaccgtgtgcaaggatggccgggtgcgggtgtaccggcccaggagcggccctgagcccctgcaggagggccctggccccaagggcggccgcggggccagaattgtgtgggtgtgtgatggccgctgcctgctggtgtctggctttgacagccagagcgagcggcagctgctgctgtatgaggccgaggccctggccggcggccccctggccgtgctgggcctggatgtggcccccagcaccctgctgcccagctatgaccctgacaccggcctggtgctgctgaccgggaagggggacaccagggtcttcctgtatgagctgctgcctgagagccccttcttcctggagtgcaacagcttcaccagcccagacccccacaagggcctggtgctgctgcccaagacagaatgtgatgtgcgggaggtggagctgatgcgctgcctgcggctgcggcagagcagcctggagcctgtggccttccggctgccccgggtgaggaaggagttcttccaggatgatgtgtttcctgacacagctgtgatctgggagcctgtgctgtctgctgaggcctggctgcagggcgccaacggccagccctggctgctgagcctgcagcccccagacatgagccctgtgtcccaggccccccgggaggccccagcccggcgggcccccagcagcgcccagtacctggaggagaagagtgaccagcagaagaaggaggagctgctgaatgccatggtggccaagctgggcaaccgggaggaccccctgccccaggacagctttgagggcgtggatgaagatgagtgggactag

SEQ ID NO: 148464 - DNA, 1386 bp, synthetic construct; identical to SEQ ID NO: 142513
  misc_feature 1..1386: note = Description of Artificial Sequence: Synthetic coding sequence
  source 1..1386: mol_type = other DNA

SEQ ID NO: 148465 - DNA, 1443 bp, synthetic construct
  misc_feature 1..1443: note = Description of Artificial Sequence: Synthetic coding sequence
  source 1..1443: mol_type = other DNA
atgacagtgaccaagatgtcctggaggccccagtaccgcagcagcaagttcagaaatgtgtatggcaaggtggccaaccgggagcactgctttgatggcatccccatcaccaagaatgtgcatgacaaccacttctgtgctgtgaacacccgcttcctggccatcgtgacagaatctgctgggggcggcagcttcctggtgatccccctggagcagacaggccgcatcgagcccaactaccccaaggtgtgtggccaccagggcaatgtgctggacatcaagtggaaccccttcatcgacaacatcatcgccagctgcagcgaggacacctctgtgcgcatctgggagatccctgagggcggcctgaagaggaacatgacagaggccctgctggagctgcacggccacagccggcgggtgggcctggtggagtggcaccccaccaccaacaacatcctcttctctgctggctatgactacaaggtgctgatctggaacctggatgtgggggagcctgtgaagatgattgactgccacacagatgtgatcctgtgcatgtccttcaacacagatggcagcctgctgaccaccacctgcaaggacaagaagctgcgggtgattgagcccaggagcggccgggtgctgcaggaggccaactgcaagaaccaccgggtgaacagagtggtgttcctgggcaacatgaagaggctgctgaccaccggggtgagccgctggaacacccggcagatcgccctgtgggaccaggaggacctgtccatgcccctgattgaggaggagattgatggcctgagcggcctgctcttccccttctatgatgctgacacccacatgctgtacctggccgggaaaggagatggcaacatccgctactatgagatcagcacagagaagccctacctgagctacctgatggagttccgcagccctgccccccagaagggcctgggcgtgatgcccaagcacggcctggatgtgtctgcctgtgaggtgttccgcttctacaagctggtgaccctgaagggcctcatcgagcccatctccatgattgtgcccaggagaagtgacagctaccaggaggacatctaccccatgaccccaggcacagagcccgccctgaccccagatgagtggctgggcggcatcaacagagatcctgtgctgatgagcctgaaggagggctacaagaagagcagcaagatggtgttcaaggcccccatcaaggagaagaagtctgtggtggtgaatggcatcgacctgctggagaatgtgccccccaggacagaaaatgagctgctgaggatgttcttccggcagcaggatgagatccggcggctgaaggaggagctggcccagaaggacatccgcatccggcagctgcagctggagctgaagaacctgaggaacagccccaagaactgctag

SEQ ID NO: 148466 - DNA, 1269 bp, synthetic construct
  misc_feature 1..1269: note = Description of Artificial Sequence: Synthetic coding sequence
  source 1..1269: mol_type = other DNA
atgctggacctggaggtggtgcctgagaggagcctgggcaatgagcagtgggagttcaccctgggcatgcccctggcccaggccgtggccatcctgcagaagcactgccgcatcatcaagaatgtgcaggtgctgtacagcgagcagagccccctgagccatgacctgatcctgaacctgacccaggacggcatcaagctgatgtttgatgccttcaaccagaggctgaaggtgattgaggtgtgtgacctgaccaaggtgaagctgaagtactgcggcgtgcacttcaacagccaggccatcgcccccaccatcgagcagattgaccagagctttggagccacccaccctggggtgtacaacagcgctgagcagctgttccacctgaacttccggggcctgtccttctccttccagctggacagctggacagaggcccccaagtatgagcccaactttgcccacggcctggccagcctgcagatcccccacggggccaccgtgaagaggatgtacatctacagcggcaacagcctgcaggacaccaaggcccccatgatgcccctgagctgcttcctgggcaatgtgtatgcagagagcgtggatgtgctgagagatggcaccggccctgctggcctgcggctgcggctgctggccgccggctgcggccctggcctgctggctgatgccaagatgagggtgtttgagaggtctgtgtactttggagacagctgccaggatgtgctgtccatgctgggcagcccccacaaggtgttctacaagtctgaggacaagatgaagatccacagccccagcccccacaagcaggtgcccagcaagtgcaatgactacttcttcaactacttcaccctgggcgtggacatcctgtttgatgccaacacccacaaggtgaagaagtttgtgctgcacaccaactacccaggccactacaacttcaacatctaccaccgctgtgagttcaagatccccctggccatcaagaaggaaaatgctgatggccagacagagacctgcaccacctacagcaagtgggacaacatccaggagctgctgggccaccctgtggagaagcctgtggtgctgcacaggagcagcagccccaacaacaccaaccccttcggcagcaccttctgcttcggcctgcagaggatgatctttgaggtgatgcagaacaaccacatcgcctctgtgaccctgtatggccccccccggcccggcagccacctgaggacagctgagctgccctag

SEQ ID NO: 148467 - DNA, 1470 bp, synthetic construct
  misc_feature 1..1470: note = Description of Artificial Sequence: Synthetic coding sequence
  source 1..1470: mol_type = other DNA
atgtccttcaggaaggtggtgcggcagagcaagttccgccacgtgtttggccagcctgtgaagaatgaccagtgctatgaggacatccgggtgtcccgggtgacctgggacagcaccttctgtgctgtgaaccccaagttcctggccgtgattgtggaggccagcggcggcggggccttcctggtgctgcccctgagcaagacaggaagaattgacaaggcctaccccaccgtgtgtggccacacaggccctgtgctggacatcgactggtgcccccacaatgatgaagtcatcgccagcggcagcgaggactgcaccgtgatggtgtggcagatcccagaaaatggcctgaccagccccctgacagagcctgtggtggtgctggagggccacaccaagagggtgggcatcatcgcctggcaccccacagccagaaatgtgctgctgtctgctggctgtgacaacgtggtgctgatctggaatgtgggcacagctgaggagctgtaccgcctggacagcctgcacccagacctgatctacaacgtgtcctggaaccacaacggcagcctcttctgcagcgcctgcaaggacaagtctgtgcgcatcatcgacccccggcggggcaccctggtggccgagcgggagaaggcccacgagggcgcccggcccatgagggccatcttcctggctgatggcaaggtgttcaccaccggcttcagcaggatgtctgagcggcagctggccctgtgggaccctgagaacctggaggagcccatggccctgcaggagctggacagcagcaatggagccctgctgcccttctatgaccctgacacctctgtggtgtatgtgtgtgggaaaggagacagcagcatccgctactttgagatcacagaggagcccccctacatccacttcctgaacaccttcaccagcaaggagccccagaggggcatgggctccatgcccaagaggggcctggaggtgtccaaatgtgagatcgcccgcttctacaagctgcacgagaggaaatgtgagcccatcgtgatgacagtgcccaggaagagtgacctcttccaggatgacctgtacccagacacagctggccctgaggccgccctggaggccgaggagtgggtgtctggaagagatgctgaccccatcctgatcagcctgcgggaggcctacgtgcccagcaagcagagggacctgaagatcagcagaagaaatgtgctgagtgacagcaggcctgccatggcccctggcagcagccacctgggcgccccagccagcaccaccacagctgctgatgccaccccatctggcagcctggcccgggccggggaggccggcaagctggaggaggtgatgcaggagctgcgggccctgcgggccctggtgaaggagcagggcgaccgcatctgccgcctggaggagcagctgggccgcatggagaatggagatgcctag

SEQ ID NO: 148468 - DNA, 864 bp, synthetic construct
  misc_feature 1..864: note = Description of Artificial Sequence: Synthetic coding sequence
  source 1..864: mol_type = other DNA
tgcttcctgctgccccggggccgggaccctgagcccccagaggccggggccgccgccccctgtgcccctggggccccagacatgtccttcaggaaggtggtgcggcagagcaagttcagacatgtgtttggccagcctgtgaagaatgaccagtgctatgaggacatccgggtgtcccgggtgacctgggacagcaccttctgtgctgtgaaccccaagttcctggccgtcatcgtggaggccagcggcggcggggccttcctggtgctgcccctgagcaagacaggaagaattgacaaggcctaccccaccgtgtgtggccacactggacctgtgctggacatcgactggtgcccccacaatgatgaggtgattgccagcggcagcgaggactgcaccgtgatggtgtggcagatcccagaaaatggcctgaccagccccctgacagagcctgtggtggtgctggagggccacaccaagagggtgggcatcatcgcctggcaccccacagccagaaatgtgctgctgtctgctggctgtgacaacgtggtgctgatctggaatgtgggcacagctgaggagctgtaccgcctggacagcctgcacccagacctgatctacaacgtgtcctggaaccacaacggcagcctcttctgcagcgcctgcaaggacaagtctgtgcgcatcatcgacccccggcggggcaccctggtggccgagcgggagaaggcccatgaaggagcccggcccatgagggccatcttcctggctgatggcaaggtgttcaccaccggcttcagcaggatgtctgagcggcagctggccctgtgggaccccggggtgcggcgcttctgcctggcctag

SEQ ID NO: 148469 - DNA, 1470 bp, synthetic construct; identical to SEQ ID NO: 148467
  misc_feature 1..1470: note = Description of Artificial Sequence: Synthetic coding sequence
  source 1..1470: mol_type = other DNA

SEQ ID NO: 148470 - DNA, 870 bp, synthetic construct
  misc_feature 1..870: note = Description of Artificial Sequence: Synthetic coding sequence
  source 1..870: mol_type = other DNA
atgtccttcaggaaggtggtgcggcagagcaagttccgccacgtgtttggccagcctgtgaagaatgaccagtgctatgaggacatccgggtgtcccgggtgacctgggacagcaccttctgtgctgtgaaccccaagttcctggccgtgattgtggaggccagcggcggcggggccttcctggtgctgcccctgagcaagacaggaagaattgacaaggcctaccccaccgtgtgtggccacacaggccctgtgctggacatcgactggtgcccccacaatgatgaagtcatcgccagcggcagcgaggactgcaccgtgatggtgtggcagatcccagaaaatggcctgaccagccccctgacagagcctgtggtggtgctggagggccacaccaagagggtgggcatcatcgcctggcaccccacagccagaaatgtgctgctgtctgctggctgtgacaacgtggtgctgatctggaatgtgggcacagctgaggagctgtaccgcctggacagcctgcacccagacctgatctacaacgtgtcctggaaccacaacggcagcctcttctgcagcgcctgcaaggacaagtctgtgcgcatcatcgacccccggcggggcaccctggtggccgagcgggagaaggcccacgagggcgcccggcccatgagggccatcttcctggctgatggcaaggtgttcaccaccggcttcagcaggatgtctgagcggcagctggccctgtgggaccctgtgtctggccagcctgagggcgccaacctgcggctgggcccccaccctggccctggccggcagggcagcccctggggcggcctgtggttcctggccagcctgcccggcacctag

SEQ ID NO: 148471 - DNA, 552 bp, synthetic construct
  misc_feature 1..552: note = Description of Artificial Sequence: Synthetic coding sequence
  source 1..552: mol_type = other DNA
atgtccttcaggaaggtggtgcggcagagcaagttccgccacgtgtttggccagcctgtgaagaatgaccagtgctatgaggacatccgggtgtcccgggtgacctgggacagcaccttctgtgctgtgaaccccaagttcctggccgtgattgtggaggccagcggcggcggggccttcctggtgctgcccctgagcaagacaggaagaattgacaaggcctaccccaccgtgtgtggccacacaggccctgtgctggacatcgactggtgcccccacaatgatgaagtcatcgccagcggcagcgaggactgcaccgtgatggtgtggcagatcccagaaaatggcctgaccagccccctgacagagcctgtggtggtgctggagggccacaccaagagggtgggcatcatcgcctggcaccccacagccagaaatgtgctgctgtctgctggcctgcaccggccccccttctgtgcccccccaccccacggccccctgcacaccagccagcagcccctgcagggcccccatgacaagtgggagagctag

SEQ ID NO: 148472 - DNA, 1425 bp, synthetic construct
  misc_feature 1..1425: note = Description of Artificial Sequence: Synthetic coding sequence
  source 1..1425: mol_type = other DNA
atgagaagagtggtgcggcagagcaagttccgccacgtgtttggccaggccgtgaagaatgaccagtgctatgatgacatccgggtgtcccgggtgacctgggacagcagcttctgtgctgtgaaccccaggtttgtggccatcatcatcgaggccagcggcggcggggccttcctggtgctgcccctgcacaagacaggaagaattgacaagagctaccccaccgtgtgtggccacacaggccctgtgctggacatcgactggtgcccccacaatgaccaggtgattgccagcggcagcgaggactgcaccgtgatggtgtggcagatcccagaaaatggcctgaccctgagcctgacagagcctgtggtgatcctggagggccacagcaagagggtgggcatcgtggcctggcaccccacagccagaaatgtgctgctgtctgctggctgtgacaatgccatcatcatctggaatgtgggcaccggggaggccctgatcaacctggatgacatgcacagcgacatgatctacaacgtgtcctggaacagaaatggcagcctcatctgcacagccagcaaggacaagaaggtgcgggtgattgaccccaggaagcaggagatcgtggccgagaaggagaaggcccacgagggcgcccggcccatgagggccatcttcctggctgatggaaatgtgttcaccaccggcttcagcaggatgtctgagcggcagctggccctgtggaaccccaagaacatgcaggagcccatcgccctgcacgagatggacaccagcaatggagtgctgctgcccttctatgaccctgacaccagcatcatctacctgtgtgggaaaggagacagcagcatccgctactttgagatcacagatgagagcccctacgtgcactacctgaacaccttcagcagcaaggagccccagaggggcatgggctacatgcccaagaggggcctggatgtgaacaagtgtgagatcgcccgcttcttcaagctgcacgagaggaaatgtgagcccatcatcatgacagtgcccaggaagagtgacctcttccaggatgacctgtacccagacacagctggccctgaggccgccctggaggccgaggagtggtttgagggcaagaatgctgaccccatcctgatcagcctgaagcacggctacatccctgggaagaacagagacctgaaggtggtgaagaagaacatcctggacagcaagcccacagccaacaagaagtgtgacctgatcagcatccccaagaagaccacagacacagcctctgtgcagaatgaggccaagctggatgagatcctgaaggagatcaagagcatcaaggacaccatctgcaaccaggatgagcgcatcagcaagctggagcagcagatggccaagattgctgcctag

SEQ ID NO: 148473 - DNA, 1584 bp, synthetic construct
  misc_feature 1..1584: note = Description of Artificial Sequence: Synthetic coding sequence
  source 1..1584: mol_type = other DNA
atgtatggccctggcagccagctgggcaagagcggcaacaacagctgggccaaggagcggggctgcagcatcgcctgccagggcagcctgaccagcgcccggctgcacgcccccagcatcggggagcggcccctgagccacatgcgctggaaggacaccatgagaagagtggtgcggcagagcaagttcagacatgtgtttggccaggccgtgaagaatgaccagtgctatgatgacatccgggtgtcccgggtgacctgggacagcagcttctgtgctgtgaaccccaggtttgtggccatcatcatcgaggccagcggcggcggggccttcctggtgctgcccctgcacaagacaggaagaattgacaagagctaccccaccgtgtgtggccacactggacctgtgctggacatcgactggtgcccccacaatgaccaggtgattgccagcggcagcgaggactgcaccgtgatggtgtggcagatcccagaaaatggcctgaccctgagcctgacagagcctgtggtgatcctggagggccacagcaagagggtgggcatcgtggcctggcaccccacagccagaaatgtgctgctgtctgctggctgtgacaatgccatcatcatctggaatgtgggcactggagaggccctgatcaacctggatgacatgcacagcgacatgatctacaacgtgtcctggaacagaaatggcagcctcatctgcacagccagcaaggacaagaaggtgcgggtcatcgaccccaggaagcaggagatcgtggccgagaaggagaaggcccatgaaggagcccggcccatgagggccatcttcctggctgatggaaatgtgttcaccaccggcttcagcaggatgtctgagcggcagctggccctgtggaaccccaagaacatgcaggagcccatcgccctgcacgagatggacaccagcaatggagtgctgctgcccttctatgaccctgacaccagcatcatctacctgtgtgggaagggggacagcagcatccgctactttgagatcacagatgagagcccctacgtgcactacctgaacaccttcagcagcaaggagccccagaggggcatgggctacatgcccaagaggggcctggatgtgaacaagtgtgaaattgcccgcttcttcaagctgcacgagaggaaatgtgagcccatcatcatgacagtgcccaggaagagtgacctcttccaggatgacctgtacccagacacagctggccctgaggccgccctggaggccgaggagtggtttgagggcaagaatgctgaccccatcctgatcagcctgaagcacggctacatccctgggaagaacagagacctgaaggtggtgaagaagaacatcctggacagcaagcccacagccaacaagaagtgtgacctgatcagcatccccaagaagaccacagacacagcctctgtgcagaatgaggccaagctggatgagatcctgaaggagatcaagagcatcaaggacaccatctgcaaccaggatgagcgcatcagcaagctggagcagcagatggccaagattgctgcctag

SEQ ID NO: 148474 - DNA, 1425 bp, synthetic construct; identical to SEQ ID NO: 148472
  misc_feature 1..1425: note = Description of Artificial Sequence: Synthetic coding sequence
  source 1..1425: mol_type = other DNA

SEQ ID NO: 148475 - DNA, 489 bp, synthetic construct
  misc_feature 1..489: note = Description of Artificial Sequence: Synthetic coding sequence
  source 1..489: mol_type = other DNA
atgagaagagtggtgcggcagagcaagttccgccacgtgtttggccaggccgtgaagaatgaccagtgctatgatgacatccgggtgtcccgggtgacctgggacagcagcttctgtgctgtgaaccccaggtttgtggccatcatcatcgaggccagcggcggcggggccttcctggtgctgcccctgcacaagacaggaagaattgacaagagctaccccaccgtgtgtggccacacaggccctgtgctggacatcgactggtgcccccacaatgaccaggtgattgccagcggcagcgaggactgcaccgtgatggtgtggcagatcccagaaaatggcctgaccctgagcctgacagagcctgtggtgatcctggagggccacagcaagagggtgggcatcgtggcctggcaccccacagccagaaatgtgctgctgtctgctggctgtgacaatgccatcatcatctggaatgtgggcacctag

SEQ ID NO: 148476 - DNA, 498 bp, synthetic construct
  misc_feature 1..498: note = Description of Artificial Sequence: Synthetic coding sequence
  source 1..498: mol_type = other DNA
agcaaggagccccagaggggcatgggctacatgcccaagaggggcctggatgtgaacaagtgtgaaattgcccgcttcttcaagctgcacgagaggaaatgtgagcccatcatcatgacagtgcccaggaagagtgacctcttccaggatgacctgtacccagacacagctggccctgaggccgccctggaggccgaggagtggtttgagggcaagaatgctgaccccatcctgatcagcctgaagcacggctacatccctgggaagaacagagacctgaaggtggtgaagaagaacatcctggacagcaagcccacagccaacaagaagtgtgacctgatcagcatccccaagaagaccacagacacagcctctgtgcagaatgaggccaagctggatgagatcctgaaggagatcaagagcatcaaggacaccatctgcaaccaggatgagcgcatcagcaagctggagcagcagatggccaagattgctgcctag

SEQ ID NO: 148477 - DNA, 546 bp, synthetic construct
  misc_feature 1..546: note = Description of Artificial Sequence: Synthetic coding sequence
  source 1..546: mol_type = other DNA
atgagaagagtggtgcggcagagcaagttccgccacgtgtttggccaggccgtgaagaatgaccagtgctatgatgacatccgggtgtcccgggtgacctgggacagcagcttctgtgctgtgaaccccaggtttgtggccatcatcatcgaggccagcggcggcggggccttcctggtgctgcccctgcacaagacaggaagaattgacaagagctaccccaccgtgtgtggccacacaggccctgtgctggacatcgactggtgcccccacaatgaccaggtgattgccagcggcagcgaggactgcaccgtgatggtgtggcagatcccagaaaatggcctgaccctgagcctgacagagcctgtggtgatcctggagggccacagcaagagggtgggcatcgtggcctggcaccccacagccagaaatgtgctgctgtctgctggctgtgacaatgccatcatcatctggaatgtgggcaccggggaggccctgatcaacctggatgacatgcacagcgacatgatctacaacgtgtcctag

SEQ ID NO: 148478 - DNA, 1443 bp, synthetic construct
  misc_feature 1..1443: note = Description of Artificial Sequence: Synthetic coding sequence
  source 1..1443: mol_type = other DNA
atgcgctggaaggacaccatgagaagagtggtgcggcagagcaagttccgccacgtgtttggccaggccgtgaagaatgaccagtgctatgatgacatccgggtgtcccgggtgacctgggacagcagcttctgtgctgtgaaccccaggtttgtggccatcatcatcgaggccagcggcggcggggccttcctggtgctgcccctgcacaagacaggaagaattgacaagagctaccccaccgtgtgtggccacacaggccctgtgctggacatcgactggtgcccccacaatgaccaggtgattgccagcggcagcgaggactgcaccgtgatggtgtggcagatcccagaaaatggcctgaccctgagcctgacagagcctgtggtgatcctggagggccacagcaagagggtgggcatcgtggcctggcaccccacagccagaaatgtgctgctgtctgctggctgtgacaatgccatcatcatctggaatgtgggcaccggggaggccctgatcaacctggatgacatgcacagcgacatgatctacaacgtgtcctggaacagaaatggcagcctcatctgcacagccagcaaggacaagaaggtgcgggtgattgaccccaggaagcaggagatcgtggccgagaaggagaaggcccacgagggcgcccggcccatgagggccatcttcctggctgatggaaatgtgttcaccaccggcttcagcaggatgtctgagcggcagctggccctgtggaaccccaagaacatgcaggagcccatcgccctgcacgagatggacaccagcaatggagtgctgctgcccttctatgaccctgacaccagcatcatctacctgtgtgggaaaggagacagcagcatccgctactttgagatcacagatgagagcccctacgtgcactacctgaacaccttcagcagcaaggagccccagaggggcatgggctacatgcccaagaggggcctggatgtgaacaagtgtgagatcgcccgcttcttcaagctgcacgagaggaaatgtgagcccatcatcatgacagtgcccaggaagagtgacctcttccaggatgacctgtacccagacacagctggccctgaggccgccctggaggccgaggagtggtttgagggcaagaatgctgaccccatcctgatcagcctgaagcacggctacatccctgggaagaacagagacctgaaggtggtgaagaagaacatcctggacagcaagcccacagccaacaagaagtgtgacctgatcagcatccccaagaagaccacagacacagcctctgtgcagaatgaggccaagctggatgagatcctgaaggagatcaagagcatcaaggacaccatctgcaaccaggatgagcgcatcagcaagctggagcagcagatggccaagattgctgcctag

SEQ ID NO: 148479 - DNA, 510 bp, synthetic construct
  misc_feature 1..510: note = Description of Artificial Sequence: Synthetic coding sequence
  source 1..510: mol_type = other DNA
atgagaagagtggtgcggcagagcaagttccgccacgtgtttggccaggccgtgaagaatgaccagtgctatgatgacatccgggtgtcccgggtgacctgggacagcagcttctgtgctgtgaaccccaggtttgtggccatcatcatcgaggccagcggcggcggggccttcctggtgctgcccctgcacaagacaggaagaattgacaagagctaccccaccgtgtgtggccacacaggccctgtgctggacatcgactggtgcccccacaatgaccaggtgattgccagcggcagcgaggactgcaccgtgatggtgtggcagatcccagaaaatggcctgaccctgagcctgacagagcctgtggtgatcctggagggccacagcaagagggtgggcatcgtggcctggcaccccacagccagaaatgtgctgctgtctgctggctgtgacaatgccatcatcatctggaatgtgggcaccggggaggccctgatcaacctgtag

SEQ ID NO: 148480 - DNA, 456 bp, synthetic construct
  misc_feature 1..456: note = Description of Artificial Sequence: Synthetic coding sequence
  source 1..456: mol_type = other DNA
atgagaagagtggtgcggcagagcaagttccgccacgtgtttggccaggccgtgaagaatgaccagtgctatgatgacatccgggtgtcccgggtgacctgggacagcagcttctgtgctgtgaaccccaggtttgtggccatcatcatcgaggccagcggcggcggggccttcctggtgctgcccctgcacaagacaggaagaattgacaagagctaccccaccgtgtgtggccacacaggccctgtgctggacatcgactggtgcccccacaatgaccaggtgattgccagcggcagcgaggactgcaccgtgatggtgtggcagatcccagaaaatggcctgaccctgagcctgacagagcctgtggtgatcctggagggccacagcaagagggtgggcatcgtggcctggcaccccacagccagaaatgtgctgctgtctgctgggggctag

SEQ ID NO: 148481 - DNA, 492 bp, synthetic construct
  misc_feature 1..492: note = Description of Artificial Sequence: Synthetic coding sequence
  source 1..492: mol_type = other DNA
atgagaagagtggtgcggcagagcaagttccgccacgtgtttggccaggccgtgaagaatgaccagtgctatgatgacatccgggtgtcccgggtgacctgggacagcagcttctgtgctgtgaaccccaggtttgtggccatcatcatcgaggccagcggcggcggggccttcctggtgctgcccctgcacaagacaggaagaattgacaagagctaccccaccgtgtgtggccacacaggccctgtgctggacatcgactggtgcccccacaatgaccaggtgattgccagcggcagcgaggactgcaccgtgatggtgtggcagatcccagaaaatggcctgaccctgagcctgacagagcctgtggtgatcctggagggccacagcaagagggtgggcatcgtggcctggcaccccacagccagaaatgtgctgctgtctgctggctgtgacaatgccatcatcatctggaatgtgggcaccggctag

SEQ ID NO: 148482 - DNA, 1578 bp, synthetic construct
  misc_feature 1..1578: note = Description of Artificial Sequence: Synthetic coding sequence
  source 1..1578: mol_type = other DNA
atgtcctggcacccccagtaccgcagcagcaagttccgccacgtgtttgggaagccagccagcaaagaaaactgctatgacagcgtgcccatcaccaggtctgtgcatgacaaccacttctgtgctgtgaacccccacttcatcgctgtggtgacagaatgtgccggcggcggggccttcctggtgatccccctgcaccagacaggcaagctggacccccactaccccaaggtgtgtggccacagaggaaatgtgctggatgtgaagtggaacccctttgatgactttgagatcgccagctgcagtgaagatgccaccatcaagatctggagcatccccaagcagctgctgaccaggaacctgacagcctacaggaaggagctggtgggccacgccaggagagtgggcctggtggagtggcaccccacagctgccaacatcctcttctctgctggctatgactacaaggtgatgatctggaacctggacaccaaggagagcgtcatcaccagccccatgagcaccatcagctgccaccaggatgtgatcctgtccatgtccttcaacaccaacggcagcctgctggccaccacctgcaaggacaggaagatccgggtgattgaccccagggctggcaccgtgctgcaggaggccagctacaagggccaccgggccagcaaggtgctcttcctgggcaacctgaagaagctgatgagcacaggcaccagccgctggaacaaccggcaggtggccctgtgggaccaggacaacctgtctgtgcccctgatggaggaggacctggatggcagcagtggagtgctcttccccttctatgatgctgacacctccatgctgtatgtggtgggcaaaggagatggcaacatccgctactatgaggtgtctgctgacaagccccacctgagctacctgacagagtaccgcagctacaacccccagaagggcatcggcgtgatgcccaagaggggcctggatgtgagcagctgtgagatcttccgcttctacaagctgatcaccaccaagagcctcatcgagcccatctccatgattgtgcccaggagaagtgagagctaccaggaggacatctacccacccacagctggggcccagcccagcctgacagcccaggagtggctgagcggcatgaacagagaccccatcctggtgtccctgcggcccggcagcgagctgctgcggccccaccccctgcctgctgagcggcccatcttcaacagcatggccccagccagcccccggctgctgaaccagacagagaagctggccgcagaagatggctggaggagcagcagcctgctggaggagaagatgccccgctgggccgctgagcaccggctggaggagaagaagacctggctgaccaatggatttgatgtgtttgaatgtcctccacccaagacagaaaatgagctgctgcagatgttctaccggcagcaggaggagatccggcggctgcgggagctgctgacccagcgggaggtgcaggccaagcagctggagctggagatcaagaacctgaggatgggcagcgagcagctgtag

SEQ ID NO: 148483 - DNA, 1578 bp, synthetic construct; identical to SEQ ID NO: 148482
  misc_feature 1..1578: note = Description of Artificial Sequence: Synthetic coding sequence
  source 1..1578: mol_type = other DNA

SEQ ID NO: 148484 - DNA, 1443 bp, synthetic construct; identical to SEQ ID NO: 148465
  misc_feature 1..1443: note = Description of Artificial Sequence: Synthetic coding sequence
  source 1..1443: mol_type = other DNA

SEQ ID NO: 148485 - DNA, 1428 bp, synthetic construct
  misc_feature 1..1428: note = Description of Artificial Sequence: Synthetic coding sequence
  source 1..1428: mol_type = other DNA
atgtcctggaggccccagtaccgcagcagcaagttcagaaatgtgtatggcaaggtggccaaccgggagcactgctttgatggcatccccatcaccaagaatgtgcatgacaaccacttctgtgctgtgaacacccgcttcctggccatcgtgacagagagcgctgggggcggcagcttcctggtgatccccctggagcagacaggaagaattgagcccaactaccccaaggtgtgtggccaccagggcaatgtgctggacatcaagtggaaccccttcatcgacaacatcatcgccagctgcagcgaggacacctctgtgcgcatctgggagatccctgagggcggcctgaagaggaacatgacagaggccctgctggagctgcacggccacagcagaagagtgggcctggtggagtggcaccccaccaccaacaacatcctcttctctgctggctatgactacaaggtgctgatctggaacctggatgtgggggagcctgtgaagatgattgactgccacacagatgtgatcctgtgcatgtccttcaacacagatggcagcctgctgaccaccacctgcaaggacaagaagctgcgggtcatcgagcccaggagcggccgggtgctgcaggaggccaactgcaagaaccaccgggtgaacagagtggtgttcctgggcaacatgaagaggctgctgaccactggagtgagccgctggaacacccggcagatcgccctgtgggaccaggaggacctgtccatgcccctcatcgaggaggagattgatggcctgagcggcctgctcttccccttctatgatgctgacacccacatgctgtacctggccgggaaaggagatggcaacatccgctactatgagatcagcacagagaagccctacctgagctacctgatggagttccgcagccctgccccccagaagggcctgggcgtgatgcccaagcacggcctggatgtgtctgcctgtgaggtgttccgcttctacaagctggtgaccctgaagggcctgattgagcccatctccatgattgtgccccggcggagtgacagctaccaggaggacatctaccccatgaccccaggcacagagcccgccctgaccccagatgagtggctgggcggcatcaacagagatcctgtgctgatgagcctgaaggagggctacaagaagagcagcaagatggtgttcaaggcccccatcaaggagaagaagtctgtggtggtgaatggaattgacctgctggagaatgtgccccccaggacagaaaatgagctgctgaggatgttcttccggcagcaggatgagatccggcggctgaaggaggagctggcccagaaggacatccgcatccggcagctgcagctggagctgaagaacctgaggaacagccccaagaactgctag

SEQ ID NO: 148486 - DNA, 1428 bp, synthetic construct; identical to SEQ ID NO: 148485
  misc_feature 1..1428: note = Description of Artificial Sequence: Synthetic coding sequence
  source 1..1428: mol_type = other DNA

SEQ ID NO: 148487 - DNA, 4992 bp, synthetic construct
  misc_feature 1..4992: note = Description of Artificial Sequence: Synthetic coding sequence
  source 1..4992: mol_type = other DNA
atggccacagatggagccagctgtgagccagacctgagccgggccccagaagatgctgctggagctgctgctgaggccgccaagaaggagtttgatgtggacaccctgagcaagtctgagctgaggatgctgctgtctgtgatggagggggagctggaggcccgggacctggtgattgaggccctgcgggcccggaggaaggaggtgttcatccaggagagatatggccgcttcaacctgaatgaccccttcctggccctgcagagggactatgaagctggagctggggacaaggagaagaagcctgtgtgcaccaaccccctgagcatcctggaggccgtgatggcccactgcaagaagatgcaggagaggatgtctgcccagctggccgctgctgagagccggcagaagaagctggagatggagaagctgcagctgcaggccctggagcaggagcacaagaagctggccgcccggctggaggaggagcggggcaagaacaagcaggtggtgctgatgctggtgaaggagtgcaagcagctgagcggcaaggtgattgaggaggcccagaagctggaggatgtgatggccaagctggaggaggagaagaagaagaccaatgagctggaggaggagctgtctgctgagaagaggaggagcacagagatggaggcccagatggagaagcagctgtctgaatttgacacagagcgggagcagctgcgggccaagctgaaccgggaggaggcccacaccacagacctgaaggaggagattgacaagatgaggaagatgattgagcagctgaagaggggcagtgacagcaagcccagcctgagcctgcccaggaagaccaaggaccggcggctggtgtccatctctgtgggcacagagggcaccgtgaccaggtctgtggcctgccagacagacctggtgacagaaaatgctgaccacatgaagaagctgcccctgaccatgcctgtgaagcccagcacaggcagccccctggtgtctgccaatgccaagggctctgtgtgcaccagcgccaccatggcccggcccggcatcgaccggcaggccagctatggagacctgattggagcctctgtgcctgccttccccccaccttctgccaacaagattgaagaaaatggccccagcacaggcagcaccccagaccccaccagcagcaccccacccctgcccagcaatgctgccccacccacagcccagaccccaggcatcgccccccagaacagccaggccccacccatgcacagcctgcacagcccctgtgccaacaccagcctgcaccctggcctgaacccccgcatccaggccgcccgcttccgcttccagggcaatgccaatgaccctgaccagaatggaaacaccacccagagcccccccagcagagatgtgagccccaccagccgggacaacctggtggccaagcagctggccaggaacacagtgacccaggccctgagccgcttcaccagcccccaggccggggcccccagcaggcctggggtgcccccaactggagatgtgggcacccacccccctgtgggccgcaccagcctgaagacccacggcgtggcccgggtggaccggggcaaccccccacccatcccccccaagaagccaggcctgagccagacccccagccccccccacccccagctgaaggtgatcatcgacagcagccgggccagcaacacaggagccaaggtggacaacaagacagtggccagcacccccagcagcctgccccagggcaacagagtcatcaatgaggagaacctgcccaagagcagcagcccccagctgccccccaagcccagcattgacctgactgtggccccagctggctgtgctgtgtctgccctggccaccagccaggtgggcgcctggccagctgccaccccaggcctgaaccagcctgcctgcagcgacagcagcctggtgatccccaccaccatcgccttctgcagcagcatcaaccctgtgtctgccagcagctgcaggcctggggccagtgacagcctgctggtgacagccagcggctggagccccagcctgacccccctgctgatgtctgggggccctgcccccctggccggccggcccaccctgctgcagcaggccgccgcccagggcaatgtgaccctgctgtccatgctgctgaatgaggagggcctggacatcaactacagctgtgaagatggccacagcgccctgtacagcgctgccaagaatggccacacagactgtgtgcggctgctgctgtctgctgaggcccaggtgaatgctgctgacaagaatggcttcacccccctgtgtgccgctgctgcccagggccactttgaatgtgtggagctgctgatctcctatgatgccaacatcaaccacgccgcagatggcggccagacccccctgtacctggcctgcaagaatggaaacaaggagtgcatcaagctgctgctggaggccggcaccaacagatctgtgaagaccacagatggctggacccctgtgcatgctgctgtggacacaggaaatgtggacagcctgaagctgctgatgtaccaccgcatcccagcccacggcaacagcttcaatgaggaggagagcgagagctctgtgtttgacctggatggaggagaggagagccctgagggcatcagcaagcctgtggtgcctgctgacctgatcaaccacgccaaccgggagggctggacagctgcccacatcgccgccagcaagggcttcaagaactgcctggagatcctgtgcagacatggaggcctggagcctgagcggcgggacaagtgcaacagaacagtgcatgatgtggccacagatgactgcaagcacctgctggagaacctgaatgccctgaagatccccctgcgcatctctgtgggggagattgagcccagcaactacggcagtgatgacctggagtgtgagaacaccatctgtgccctgaacatcaggaagcagacctcctgggatgacttcagcaaggctgtgtcccaggccctgaccaaccacttccaggccatcagcagtgatggctggtggagcctggaggatgtgacctgcaacaacaccacagacagcaacatcggcctgagcgcccggagcatccgcagcatcaccctgggcaatgtgccctggagcgtgggccagagctttgcccagagcccctgggacttcatgaggaagaacaaggccgagcacatcaccgtgctgctgagcggcccccaggagggctgcctgagctctgtgacctacgcctccatgatccccctgcagatgatgcagaactacctgcggctggtggagcagtaccacaacgtcatcttccacggccctgagggcagcctgcaggactacatcgtgcaccagctggccctgtgcctgaagcaccggcagatggctgctggcttcagctgtgaaattgtgcgggcagaggtggatgctggcttcagcaaggagcagctgctggacctcttcatcagcagcgcctgcctgatccctgtgaagcagagccccagcaagaagaagatcatcatcatcctggagaacctggagaagagcagcctgtctgagctgctgcgggacttcctggcccccctggagaacagaagcacagagagcccctgcaccttccagaagggaaatggcctgtctgagtgctactacttccacgagaactgcttcctgatgggcaccatcgccaaggcctgcctgcagggcagtgacctgctggtgcagcagcacttccgctgggtgcagctgcgctgggatggagagcccatgcagggcctgctgcagcgcttcctgcggaggaaggtggtgaacaagttcaagggccaggcccccagcccctgtgaccctgtgtgcaagatcgtggactgggccctgtctgtgtggaggcagctgaacagctgcctggcccggctgggcaccccagaggccctgctgggccccaagtacttcctgagctgccctgtggtgcccggccacgcccaggtgacagtgaagtggatgagcaagctgtggaatggagtcatcgccccccgggtgcaggaggccatcctgagccgggcctctgtgaagaggcagcccggcttcggccagaccacagccaagaggcaccccagccagggccagcaggccgtggtgaaggccgccctgagcatcctgctgaacaaggctgtgctgcacggctgccccctgcccagggctgagctggaccagcacacagctgacttcaagggcggcagcttccccctgagcatcgtgtcctcctacaacacctgcaacaagaagaagggggagagcggggcctggaggaaggtgaacaccagccccaggaggaagagcggccgcttcagcctgcccacctggaacaagccagacctgagcacagagggcatgaagaacaagaccatcagccagctgaactgcaacagaaatgccagcctgagcaagcagaagagcctggagaatgacctgagcctgaccctgaacctggaccagaggctgagcctgggcagtgatgatgaggccgacctggtgaaggagctgcagagcatgtgcagcagcaagtctgagagtgacatcagcaagattgctgacagcagagatgacctgaggatgtttgacagcagcggcaacaaccctgtgctgagcgccaccatcaacaacctgaggatgcctgtgtcccagaaggaggtgagccccctgagcagccaccagaccacagagtgcagcaacagcaagagcaagacagagctgggcgtgtcccgggtgaagagcttcctgcctgtgcccaggagcaaggtgacccagtgcagccagaacaccaagaggagcagcagcagcagcaacacccggcagatcgagatcaacaacaacagcaaggaggtgaactggaacctgcacaagaatgagcacctggagaagcccaacaagtag

SEQ ID NO: 148488 - DNA, 249 bp, synthetic construct
  misc_feature 1..249: note = Description of Artificial Sequence: Synthetic coding sequence
  source 1..249: mol_type = other DNA
atgtctgccacctggaccctgagccctgagcccctgccccccagcacaggcccccctgtgggcgccggcctggatgctgagcagaggacagtgtttgcctttgtgctgtgcctgctggtggtgctggtgctgctgatggtgcgctgtgtgcgcatcctgctggacccctacagcaggatgcctgccagctcctggacagaccacaaggaggccctggagcggggccagtttgattatgccctggtgtag

SEQ ID NO: 148489 - DNA, 969 bp, synthetic construct
  misc_feature 1..969: note = Description of Artificial Sequence: Synthetic coding sequence
  source 1..969: mol_type = other DNA
atgagccccaacttcaagctgcagtgccacttcatcctgatcttcctgacagccctgcggggggagagccgctacctggagctgcgggaggccgctgactatgaccccttcctgctcttcagcgccaacctgaagcgggagctggccggggagcagccctacagaagagccctgcgctgcctggacatgctgagcctgcagggccagttcaccttcaccgctgaccggccccagctgcactgtgccgccttcttcatcagcgagcctgaggagttcatcaccatccactatgaccaggtgtccattgactgccagggcggggacttcctgaaggtgtttgatggctggatcctgaagggggagaagttccccagcagccaggaccaccccctgcccagcgctgagcgctacatcgacttctgtgagagcggcctgagcagaagaagcatccgcagcagccagaatgtggccatgatcttcttccgggtgcatgagcctggaaatggcttcaccctgaccatcaagacagaccccaacctcttcccctgcaacgtcatcagccagaccccaaatggcaagttcaccctggtggtgccccaccagcacaggaactgcagcttcagcatcatctaccctgtggtgatcaagatcagtgacctgaccctgggccacgtgaatggcctgcagctgaagaagagcagcgctggctgtgagggcatcggggactttgtggagctgctgggcggcaccggcctggaccccagcaagatgacccccctggccgacctgtgctaccccttccacggccctgcccagatgaaggtgggctgtgacaacacagtggtgaggatggtgtcctctgggaagcacgtgaacagagtgacctttgagtaccggcagctggagccctatgagctggagaaccccaacggcaacagcatcggggagttctgcctgagcggcctgtag

SEQ ID NO: 148490 - DNA, 723 bp, synthetic construct
  misc_feature 1..723: note = Description of Artificial Sequence: Synthetic coding sequence
  source 1..723: mol_type = other DNA
atgagccctgaggtgcaccagagcaatgtgggctggtgccgcctggtgacagctgcctacaactacttccacgtgaccaacttcttctggatgtttggagagggctgctacctgcacacagccatcgtgctgacctacagcacagaccggctgaggaagtggatgttcatctgcatcggctggggcgtgcccttccccatcatcgtggcctgggccatcggcaagctgtactatgacaatgagaagtgctggtttgggaagaggcctggggtgtacacagactacatctaccagggccccatgatcctggtgctgctgatcaacttcatcttcctgttcaacatcgtgcgcatcctgatgaccaagctgcgggccagcaccaccagcgagaccatccagtacaggaaggctgtgaaggccaccctggtgctgctgcccctgctgggcatcacctacatgctgttctttgtgaaccctggagaagatgaggtgtcccgggtggtgttcatctacttcaacagcttcctggagagcttccagggcttctttgtgtctgtgttctactgcttcctgaacagcgaggtgcgcagcgccatcaggaagcgctggcaccgctggcaggacaagcacagcatccgggcccgggtggcccgggccatgagcatccccaccagccccaccagggtgtccttccacagcatcaagcagagcacagctgtgtag

SEQ ID NO: 148491 - DNA, 1248 bp, synthetic construct
  misc_feature 1..1248: note = Description of Artificial Sequence: Synthetic coding sequence
  source 1..1248: mol_type = other DNA
atgggcggccacccccagctgcggctggtgaaggccctgctgctgctgggcctgaaccctgtgtctgccagcctgcaggaccagcactgtgagagcctgagcctggccagcaacatcagcggcctgcagtgcaatgcctctgtggacctgattggcacctgctggcccaggagccctgctggccagctggtggtgcggccctgcccagccttcttctatggagtgcgctacaacaccaccaacaacggctaccgggagtgcctggccaacggctcctgggccgcccgggtgaactacagcgagtgccaggagatcctgaatgaggagaagaagagcaaggtgcactaccacgtggccgtcatcatcaactacctgggccactgcatcagcctggtggccctgctggtggcctttgtgctcttcctgcggctgcggagcatccgctgcctgaggaacatcatccactggaacctgatcagcgccttcatcctgagaaatgccacctggtttgtggtgcagctgaccatgagccctgaggtgcaccagagcaatgtgggctggtgccgcctggtgacagctgcctacaactacttccacgtgaccaacttcttctggatgtttggagagggctgctacctgcacacagccatcgtgctgacctacagcacagaccggctgaggaagtggatgttcatctgcatcggctggggcgtgcccttccccatcatcgtggcctgggccatcggcaagctgtactatgacaatgagaagtgctggtttgggaagaggcctggggtgtacacagactacatctaccagggccccatgatcctggtgctgctgatcaacttcatcttcctgttcaacatcgtgcgcatcctgatgaccaagctgcgggccagcaccaccagcgagaccatccagtacaggaaggctgtgaaggccaccctggtgctgctgcccctgctgggcatcacctacatgctgttctttgtgaaccctggagaagatgaggtgtcccgggtggtgttcatctacttcaacagcttcctggagagcttccagggcttctttgtgtctgtgttctactgcttcctgaacagcgaggtgcgcagcgccatcaggaagcgctggcaccgctggcaggacaagcacagcatccgggcccgggtggcccgggccatgagcatccccaccagccccaccagggtgtccttccacagcatcaagcagagcacagctgtgtag

SEQ ID NO: 148492 - DNA, 858 bp, synthetic construct
  misc_feature 1..858: note = Description of Artificial Sequence: Synthetic coding sequence
  source 1..858: mol_type = other DNA
atggtgtctgccaccatcccccagaagaagagcaaggtgcactaccacgtggccgtcatcatcaactacctgggccactgcatcagcctggtggccctgctggtggcctttgtgctcttcctgcggctgcggagcatccgctgcctgaggaacatcatccactggaacctgatcagcgccttcatcctgagaaatgccacctggtttgtggtgcagctgaccatgagccctgaggtgcaccagagcaatgtgggctggtgccgcctggtgacagctgcctacaactacttccacgtgaccaacttcttctggatgtttggagagggctgctacctgcacacagccatcgtgctgacctacagcacagaccggctgaggaagtggatgttcatctgcatcggctggggcgtgcccttccccatcatcgtggcctgggccatcggcaagctgtactatgacaatgagaagtgctggtttgggaagaggcctggggtgtacacagactacatctaccagggccccatgatcctggtgctgctgatcaacttcatcttcctgttcaacatcgtgcgcatcctgatgaccaagctgcgggccagcaccaccagcgagaccatccagtaccgggccagcctgtgcctgtgcagcacagtgagcagcatcgtgcgctctgtgctgcccagcggccggggcggcactggaggccgcaccagcaccaggtctgtgcctgagtggcctgtgccctgccccagccccccaccccagcctgtgtctgccttcaccgccagcagcagcccccagcagagcgagctggccggccacggggccgcccccaaggagctgtggctgggcggctag

SEQ ID NO: 148493 - DNA, 1206 bp, synthetic construct
  misc_feature 1..1206: note = Description of Artificial Sequence: Synthetic coding sequence
  source 1..1206: mol_type = other DNA
atgggcggccacccccagctgcggctggtgaaggccctgctgctgctgggcctgaaccctgtgtctgccagcctgcaggaccagcactgtgagagcctgagcctggccagcaacatcagcggcctgcagtgcaatgcctctgtggacctgattggcacctgctggcccaggagccctgctggccagctggtggtgcggccctgcccagccttcttctatggagtgcgctacaacaccaccaacaacggctaccgggagtgcctggccaacggctcctgggccgcccgggtgaactacagcgagtgccaggagatcctgaatgaggagaagaagagcaaggtgcactaccacgtggccgtcatcatcaactacctgggccactgcatcagcctggtggccctgctggtggcctttgtgctcttcctgcggctgcggagcatccgctgcctgaggaacatcatccactggaacctgatcagcgccttcatcctgagaaatgccacctggtttgtggtgcagctgaccatgagccctgaggtgcaccagagcaatgtgggctggtgccgcctggtgacagctgcctacaactacttccacgtgaccaacttcttctggatgtttggagagggctgctacctgcacacagccatcgtgctgacctacagcacagaccggctgaggaagtggatgttcatctgcatcggctggggcgtgcccttccccatcatcgtggcctgggccatcggcaagctgtactatgacaatgagaagtgctggtttgggaagaggcctggggtgtacacagactacatctaccagggccccatgatcctggtgctgctgatcaacttcatcttcctgttcaacatcgtgcgcatcctgatgaccaagctgcgggccagcaccaccagcgagaccatccagtacaggaaggctgtgaaggccaccctggtgctgctgcccctgctgggcatcacctacatgctgttctttgtgaaccctggagaagatgaggtgtcccgggtggtgttcatctacttcaacagcttcctggagagcttccaggtgcgcagcgccatcaggaagcgctggcaccgctggcaggacaagcacagcatccgggcccgggtggcccgggccatgagcatccccaccagccccaccagggtgtccttccacagcatcaagcagagcacagctgtgtag

SEQ ID NO: 148494 - DNA, 1128 bp, synthetic construct
  misc_feature 1..1128: note = Description of Artificial Sequence: Synthetic coding sequence
  source 1..1128: mol_type = other DNA
atgggcggccacccccagctgcggctggtgaaggccctgctgctgctgggcctgaaccctgtgtctgccagcctgcaggaccagcactgtgagagcctgagcctggccagcaacatcagtgacaatggctaccgggagtgcctggccaacggctcctgggccgcccgggtgaactacagcgagtgccaggagatcctgaatgaggagaagaagagcaaggtgcactaccacgtggccgtcatcatcaactacctgggccactgcatcagcctggtggccctgctggtggcctttgtgctcttcctgcggctgcggagcatccgctgcctgaggaacatcatccactggaacctgatcagcgccttcatcctgagaaatgccacctggtttgtggtgcagctgaccatgagccctgaggtgcaccagagcaatgtgggctggtgccgcctggtgacagctgcctacaactacttccacgtgaccaacttcttctggatgtttggagagggctgctacctgcacacagccatcgtgctgacctacagcacagaccggctgaggaagtggatgttcatctgcatcggctggggcgtgcccttccccatcatcgtggcctgggccatcggcaagctgtactatgacaatgagaagtgctggtttgggaagaggcctggggtgtacacagactacatctaccagggccccatgatcctggtgctgctgatcaacttcatcttcctgttcaacatcgtgcgcatcctgatgaccaagctgcgggccagcaccaccagcgagaccatccagtacaggaaggctgtgaaggccaccctggtgctgctgcccctgctgggcatcacctacatgctgttctttgtgaaccctggagaagatgaggtgtcccgggtggtgttcatctacttcaacagcttcctggagagcttccagggcttctttgtgtctgtgttctactgcttcctgaacagcgaggtgcgcagcgccatcaggaagcgctggcaccgctggcaggacaagcacagcatccgggcccgggtggcccgggccatgagcatccccaccagccccaccagggtgtccttccacagcatcaagcagagcacagctgtgtag

SEQ ID NO: 148495 - DNA, 1335 bp, synthetic construct
  misc_feature 1..1335: note = Description of Artificial Sequence: Synthetic coding sequence
  source 1..1335: mol_type = other DNA
atgggcggccacccccagctgcggctggtgaaggccctgctgctgctgggcctgaaccctgtgtctgccagcctgcaggaccagcactgtgagagcctgagcctggccagcaacatcagcggcctgcagtgcaatgcctctgtggacctgattggcacctgctggcccaggagccctgctggccagctggtggtgcggccctgcccagccttcttctatggagtgcgctacaacaccaccaacaacggctaccgggagtgcctggccaacggctcctgggccgcccgggtgaactacagcgagtgccaggagatcctgaatgaggagaagaagagcaaggtgcactaccacgtggccgtcatcatcaactacctgggccactgcatcagcctggtggccctgctggtggcctttgtgctcttcctgcggctgcggcccggctgcacccactggggagaccaggctgatggagccctggaggtgggcgccccctggagcggggcccccttccaggtgagaagaagcatccgctgcctgaggaacatcatccactggaacctgatcagcgccttcatcctgagaaatgccacctggtttgtggtgcagctgaccatgagccctgaggtgcaccagagcaatgtgggctggtgccgcctggtgacagctgcctacaactacttccacgtgaccaacttcttctggatgtttggagagggctgctacctgcacacagccatcgtgctgacctacagcacagaccggctgaggaagtggatgttcatctgcatcggctggggcgtgcccttccccatcatcgtggcctgggccatcggcaagctgtactatgacaatgagaagtgctggtttgggaagaggcctggggtgtacacagactacatctaccagggccccatgatcctggtgctgctgatcaacttcatcttcctgttcaacatcgtgcgcatcctgatgaccaagctgcgggccagcaccaccagcgagaccatccagtacaggaaggctgtgaaggccaccctggtgctgctgcccctgctgggcatcacctacatgctgttctttgtgaaccctggagaagatgaggtgtcccgggtggtgttcatctacttcaacagcttcctggagagcttccagggcttctttgtgtctgtgttctactgcttcctgaacagcgaggtgcgcagcgccatcaggaagcgctggcaccgctggcaggacaagcacagcatccgggcccgggtggcccgggccatgagcatccccaccagccccaccagggtgtccttccacagcatcaagcagagcacagctgtgtag

SEQ ID NO: 148496 - DNA, 114 bp, synthetic construct
  misc_feature 1..114: note = Description of Artificial Sequence: Synthetic coding sequence
  source 1..114: mol_type = other DNA
gtgtacacagactacatctacttcaacagcttcctggagagcttccagggcttctttgtgtctgtgttctactgcttcctgaacagcgaggtgcgcagcgccatcaggaagtag

SEQ ID NO: 148497 - DNA, 1206 bp, synthetic construct; identical to SEQ ID NO: 148493
  misc_feature 1..1206: note = Description of Artificial Sequence: Synthetic coding sequence
  source 1..1206: mol_type = other DNA

SEQ ID NO: 148498 - DNA, 1194 bp, synthetic construct
  misc_feature 1..1194: note = Description of Artificial Sequence: Synthetic coding sequence
  source 1..1194: mol_type = other DNA
atgggccgggagccctggccagaggaccgggacctgggcttcccccagctgttctgccagggcccctacagctactgcaacaccaccctggaccagatcggcacctgctggcccaggtctgctgctggggccctggtggagcggccctgcccagagtacttcaatggagtgaagtacaacaccaccagaaatgcctaccgggagtgcctggagaatggcacctgggccagcaagatcaactacagccagtgtgagcccatcctggatgacaagcagaggaaatatgacctgcactacagaattgccctggtggtgaactacctgggccactgtgtgtctgtggccgccctggtggccgccttcctgctcttcctggccctgcggagcatccgctgcctgagaaatgtcatccactggaacctgatcaccaccttcatcctgagaaatgtgatgtggttcctgctgcagctggtggaccacgaggtgcatgagagcaatgaggtgtggtgccgctgcatcaccaccatcttcaactactttgtggtgaccaacttcttctggatgtttgtggagggctgctacctgcacacagccatcgtgatgacctacagcacagagcggctgaggaagtgcctcttcctgttcatcggctggtgcatccccttccccatcatcgtggcctgggccatcggcaagctgtactatgaaaatgagcagtgctggtttgggaaggagcccggggacctggtggactacatctaccagggccccatcatcctggtgctgctgatcaactttgtgttcctgttcaacatcgtgcgcatcctgatgaccaagctgcgggccagcaccaccagcgagaccatccagtacaggaaggctgtgaaggccaccctggtgctgctgcccctgctgggcatcacctacatgctgttctttgtgaaccctggagaagatgacctgagccagatcatgttcatctacttcaacagcttcctgcagagcttccagggcttctttgtgtctgtgttctactgcttcttcaatggagaggtgcgctctgctgtgaggaagcgctggcaccgctggcaggaccaccacagcctgcgggtgcccatggcccgggccatgagcatccccaccagccccacccgcatctccttccacagcatcaagcagacagctgctgtgtag

SEQ ID NO: 148499 - DNA, 1317 bp, synthetic construct
  misc_feature 1..1317: note = Description of Artificial Sequence: Synthetic coding sequence
  source 1..1317: mol_type = other DNA
atgaggggccccagcggccccccaggcctgctgtatgtgccccacctgctgctgtgcctgctgtgcctgctgcccccacccctgcagtatgctgctggccagagccagatgcccaaggaccagcccctgtgggccctgctggagcagtactgccacaccatcatgaccctgaccaacctgagcggcccctacagctactgcaacaccaccctggaccagatcggcacctgctggcccaggtctgctgctggggccctggtggagcggccctgcccagagtacttcaacggggtgaagtacaacaccaccagaaatgcctacagagaatgtctggagaatggcacctgggccagcaagatcaactacagccagtgtgagcccatcctggatgacaagcagaggaaatatgacctgcactaccgcatcgccctggtggtgaactacctgggccactgtgtgtctgtggccgccctggtggccgccttcctgctcttcctggccctgcggagcatccgctgcctgagaaatgtcatccactggaacctgatcaccaccttcatcctgagaaatgtgatgtggttcctgctgcagctggtggaccacgaggtgcatgagagcaatgaggtgtggtgccgctgcatcaccaccatcttcaactactttgtggtgaccaacttcttctggatgtttgtggagggctgctacctgcacacagccatcgtgatgacctacagcacagagcggctgaggaaatgtctcttcctgttcatcggctggtgcatccccttccccatcatcgtggcctgggccatcggcaagctgtactatgaaaatgagcagtgctggtttgggaaggagcccggggacctggtggactacatctaccagggccccatcatcctggtgctgctgatcaactttgtgttcctgttcaacatcgtgcgcatcctgatgaccaagctgcgggccagcaccaccagcgagaccatccagtacaggaaggctgtgaaggccaccctggtgctgctgcccctgctgggcatcacctacatgctgttctttgtgaaccctggagaagatgacctgagccagatcatgttcatctacttcaacagcttcctgcagagcttccagggcttctttgtgtctgtgttctactgcttcttcaacggggaggtgcgctctgctgtgaggaagcgctggcaccgctggcaggaccaccacagcctgcgggtgcccatggcccgggccatgagcatccccaccagccccacccgcatctccttccacagcatcaagcagacagctgctgtgtag

SEQ ID NO: 148500 - DNA, 1236 bp, synthetic construct
  misc_feature 1..1236: note = Description of Artificial Sequence: Synthetic coding sequence
  source 1..1236: mol_type = other DNA
atggatgctgccctgctgcacagcctgctggaggccaactgcagcctggccctggccgaggagctgctgctggatggctggggcccccccctggaccctgagggcccctacagctactgcaacaccaccctggaccagatcggcacctgctggcccaggtctgctgctggggccctggtggagcggccctgcccagagtacttcaatggagtgaagtacaacaccaccagaaatgcctaccgggagtgcctggagaatggcacctgggccagcaagatcaactacagccagtgtgagcccatcctggatgacaagcagaggaaatatgacctgcactacagaattgccctggtggtgaactacctgggccactgtgtgtctgtggccgccctggtggccgccttcctgctcttcctggccctgcggagcatccgctgcctgagaaatgtcatccactggaacctgatcaccaccttcatcctgagaaatgtgatgtggttcctgctgcagctggtggaccacgaggtgcatgagagcaatgaggtgtggtgccgctgcatcaccaccatcttcaactactttgtggtgaccaacttcttctggatgtttgtggagggctgctacctgcacacagccatcgtgatgacctacagcacagagcggctgaggaagtgcctcttcctgttcatcggctggtgcatccccttccccatcatcgtggcctgggccatcggcaagctgtactatgaaaatgagcagtgctggtttgggaaggagcccggggacctggtggactacatctaccagggccccatcatcctggtgctgctgatcaactttgtgttcctgttcaacatcgtgcgcatcctgatgaccaagctgcgggccagcaccaccagcgagaccatccagtacaggaaggctgtgaaggccaccctggtgctgctgcccctgctgggcatcacctacatgctgttctttgtgaaccctggagaagatgacctgagccagatcatgttcatctacttcaacagcttcctgcagagcttccagggcttctttgtgtctgtgttctactgcttcttcaatggagaggtgcgctctgctgtgaggaagcgctggcaccgctggcaggaccaccacagcctgcgggtgcccatggcccgggccatgagcatccccaccagccccacccgcatctccttccacagcatcaagcagacagctgctgtgtag

SEQ ID NO: 148501 - DNA, 1113 bp, synthetic construct
  misc_feature 1..1113: note = Description of Artificial Sequence: Synthetic coding sequence
  source 1..1113: mol_type = other DNA
atggatgctgccctgctgcacagcctgctggaggccaactgcagcctggccctggccgaggagctgctgctggatggctggggcccccccctggaccctgagggcccctacagctactgcaacaccaccctggaccagatcggcacctgctggcccaggtctgctgctggggccctggtggagcggccctgcccagagtacttcaatggagtgaagtacaacaccaccagaaatgcctaccgggagtgcctggagaatggcacctgggccagcaagatcaactacagccagtgtgagcccatcctggatgacaagcagaggaaatatgacctgcactacagaattgccctggtggtgaactacctgggccactgtgtgtctgtggccgccctggtggccgccttcctgctcttcctggccctgcggagcatccgctgcctgagaaatgtcatccactggaacctgatcaccaccttcatcctgagaaatgtgatgtggttcctgctgcagctggtggaccacgaggtgcatgagagcaatgaggtgtggtgccgctgcatcaccaccatcttcaactactttgtggtgaccaacttcttctggatgtttgtggagggctgctacctgcacacagccatcgtgatgacctacagcacagagcggctgaggaagtgcctcttcctgttcatcggctggtgcatccccttccccatcatcgtggcctgggccatcggcaagctgtactatgaaaatgagcagtgctggtttgggaaggagcccggggacctggtggactacatctaccagggccccatcatcctggtgctgctgatcaactttgtgttcctgttcaacatcgtgcgcatcctgatgaccaagctgcgggccagcaccaccagcgagaccatccagtacaggaaggctgtgaaggccaccctggtgctgctgcccctgctgggcatcacctacatgctgttctttgtgaaccctggagaagatgacctgagccagatcatgttcatctacttcaacagcttcctgcagagcttccagggcttctttgtgtctgtgttctactgcttcttcaatggagagggcctggagcctgtgtag

SEQ ID NO: 148502 - DNA, 468 bp, synthetic construct
  misc_feature 1..468: note = Description of Artificial Sequence: Synthetic coding sequence
  source 1..468: mol_type = other DNA
atgtaccgccacaagaacagctggaggctgggcctgaagtacccacccagcagcaaggaggagacccaggtgcccaagaccctcatcagcggcctgcccggcaggaagagcagcagccgggtgggggagaagctgcagagcgcccacaagatgcccctgagccctggcctgctgctgctgctgctgagcggggccacagccacagctgccctgcccctggagggcggccccaccggccgggacagcgagcacatgcaggaggccgccggcatcaggaagagcagcctgctgaccttcctggcctggtggtttgagtggaccagccaggccagcgctggccccctcatcggggaggaggcccgggaggtggcccggcggcaggagggcgccccaccccagcagagcgcccggcgggacaggatgccctgcaggaacttcttctggaagaccttcagcagctgcaagtag

SEQ ID NO: 148503 - DNA, 318 bp, synthetic construct
  misc_feature 1..318: note = Description of Artificial Sequence: Synthetic coding sequence
  source 1..318: mol_type = other DNA
atgcccctgagccctggcctgctgctgctgctgctgagcggggccacagccacagctgccctgcccctggagggcggccccaccggccgggacagcgagcacatgcaggaggccgccggcatcaggaagagcagcctgctgaccttcctggcctggtggtttgagtggaccagccaggccagcgctggccccctcatcggggaggaggcccgggaggtggcccggcggcaggagggcgccccaccccagcagagcgcccggcgggacaggatgccctgcaggaacttcttctggaagaccttcagcagctgcaagtag

SEQ ID NO: 148504 - DNA, 1332 bp, synthetic construct
  misc_feature 1..1332: note = Description of Artificial Sequence: Synthetic coding sequence
  source 1..1332: mol_type = other DNA
atggccgccagcccccacaccctgagcagccggctgctgaccggctgtgtgggcggctctgtgtggtacctggagaggaggaccatccaggacagcccccacaagttcctgcacctgctgagaaatgtgaacaagcagtggatcaccttccagcacttctccttcctgaagaggatgtatgtgacccagctgaacagaagccacaaccagcaggtgcggcccaagccagagcctgtggccagccccttcctggagaagaccagcagcggccaggccaaggccgagatctatgagatgaggcccctgagcccccccagcctgagcctgagcaggaagcccaatgagaaggagctgattgagctggagccagattctgtgattgaggacagcattgatgtgggcaaggagaccaaggaggagaagcgctggaaggagatgaagctgcaggtgtatgacctgcccggcatcctggcccggctgagcaagatcaagctgacagccctggtggtgtccaccacagctgctggctttgccctggcccctggcccctttgactggccctgcttcctgctgacctctgtgggcaccggcctggccagctgtgccgccaacagcatcaaccagttctttgaggtgccctttgacagcaacatgaacagaaccaagaaccggcccctggtgcggggccagatcagccccctgctggccgtgtcctttgccacctgctgtgctgtgcctggggtggccatcctgaccctgggcgtgaaccccctgactggagccctgggcctcttcaacatcttcctgtacacctgctgctacacccccctgaagaggatcagcatcgccaacacctgggtgggcgctgtggtgggcgccatcccccctgtgatgggctggacagctgccaccggcagcctggatgctggggccttcctgctgggcggcatcctgtacagctggcagttcccccacttcaatgccctgtcctggggcctgcgggaggactacagccggggcggctactgcatgatgtctgtgacccaccctggcctgtgccggcgggtggccctgcggcactgcctggccctgctggtgctgtctgctgctgcccctgtgctggacatcaccacctggaccttccccatcatggccctgcccatcaatgcctacatctcctacctgggcttccgcttctacgtggatgctgacagaagaagcagcagaagactcttcttctgcagcctgtggcacctgcccctgctgctgctgctgatgctgacctgcaagaggccttctggaggaggagatgctggccccccacccagctag

SEQ ID NO: 148505 - DNA, 399 bp, synthetic construct
  misc_feature 1..399: note = Description of Artificial Sequence: Synthetic coding sequence
  source 1..399: mol_type = other DNA
tgaagaaatgtgaacaagcagtggatcaccttccagcacttctccttcctgaagaggatgtatgtgacccagctgaacagaagccacaaccagcaggtgcggcccaagccagagcctgtggccagccccttcctggagaagaccagcagcggccaggccaaggccgagatctatgagatgaggcccctgagcccccccagcctgagcctgagcaggaagcccaatgagaaggagctgattgagctggagccagacagcgtgattgaagattccattgatgtgggcaaggagaccaaggaggagaagcgctggaaggagatgaagctgcaggtgtatgacctgcccggcatcctggcccggctgagcaagatcaagctgaccggcaccctcttcttctag

SEQ ID NO: 148506 - DNA, 756 bp, synthetic construct
  misc_feature 1..756: note = Description of Artificial Sequence: Synthetic coding sequence
  source 1..756: mol_type = other DNA
atgatctgccaggagttctggctggactaccccaagagcaacagccagttctttgaggtgccctttgacagcaacatgaacagaaccaagaaccggcccctggtgcggggccagatcagccccctgctggccgtgtcctttgccacctgctgtgctgtgcctggggtggccatcctgaccctgggcgtgaaccccctgactggagccctgggcctcttcaacatcttcctgtacacctgctgctacacccccctgaagaggatcagcatcgccaacacctgggtgggcgctgtggtgggcgccatcccccctgtgatgggctggacagctgccaccggcagcctggatgctggggccttcctgctgggcggcatcctgtacagctggcagttcccccacttcaatgccctgtcctggggcctgcgggaggactacagccggggcggctactgcatgatgtctgtgacccaccctggcctgtgccggcgggtggccctgcggcactgcctggccctgctggtgctgtctgctgctgcccctgtgctggacatcaccacctggaccttccccatcatggccctgcccatcaatgcctacatctcctacctgggcttccgcttctacgtggatgctgacagaagaagcagcagaagactcttcttctgcagcctgtggcacctgcccctgctgctgctgctgatgctgacctgcaagaggccttctggaggaggagatgctggccccccacccagctag

SEQ ID NO: 148507 - DNA, 681 bp, synthetic construct
  misc_feature 1..681: note = Description of Artificial Sequence: Synthetic coding sequence
  source 1..681: mol_type = other DNA
atgaacagaaccaagaaccggcccctggtgcggggccagatcagccccctgctggccgtgtcctttgccacctgctgtgctgtgcctggggtggccatcctgaccctgggcgtgaaccccctgaccggggccctgggcctcttcaacatcttcctgtacacctgctgctacacccccctgaagaggatcagcatcgccaacacctgggtgggcgctgtggtgggcgccatcccccctgtgatgggctggacagctgccaccggcagcctggatgctggggccttcctgctgggcggcatcctgtacagctggcagttcccccacttcaatgccctgtcctggggcctgcgggaggactacagcagaggaggctactgcatgatgtctgtgacccaccctggcctgtgcagaagagtggccctgcggcactgcctggccctgctggtgctgtctgctgctgcccctgtgctggacatcaccacctggaccttccccatcatggccctgcccatcaatgcctacatctcctacctgggcttccgcttctacgtggatgctgaccggcgcagcagccggcggctcttcttctgcagcctgtggcacctgcccctgctgctgctgctgatgctgacctgcaagaggcccagcggcggcggagatgctggccccccacccagctag

SEQ ID NO: 148508 - DNA, 831 bp, synthetic construct
  misc_feature 1..831: note = Description of Artificial Sequence: Synthetic coding sequence
  source 1..831: mol_type = other DNA
atgggcggcctgtggaggcctggctggaggtgtgtgcccttctgtggctggcgctggatccaccctggcagccccaccagggctgctgagcgggtggagcccttcctgcggcctgagtggagcggcactggaggagctgagcggggcctgcgctggctgggcacctggaagcgctgcagcctgcgggcccggcacccagccctgcagcccccccggcggcccaagagcagcaaccccttcacccgggcccaggaggaggagcggcggcggcagaacaagaccaccctgacctacgtggccgctgtggccgtgggcatgctgggcgccagctatgctgctgtgcccctgtaccgcctgtactgccagaccaccggcctgggcggcagcgctgtggccggccacgccagtgacaagattgagaacatggtgcctgtgaaggaccgcatcatcaagatctccttcaatgctgatgtgcacgccagcctgcagtggaacttccggccccagcagacagagatctacgtggtgcctggagaaacagccctggccttctaccgggccaagaaccccacagacaagcctgtgattggcatcagcacctacaacatcgtgccctttgaggccggccagtacttcaacaagatccagtgcttctgctttgaggagcagaggctgaacccccaggaggaggtggacatgcctgtgttcttctacattgatcctgagtttgctgaggaccccaggatgatcaaggtggacctgatcaccctgagctacaccttctttgaggccaaggagggccacaagctgcctgtgcccggctacaactag

SEQ ID NO: 148509 - DNA, 1233 bp, synthetic construct
  misc_feature 1..1233: note = Description of Artificial Sequence: Synthetic coding sequence
  source 1..1233: mol_type = other DNA
atgcagaggctgctcttcccccccctgcgggccctgaagggccggcagtacctgcccctgctggcccccagggctgccccccgggcccagtgtgactgcatcagaagacccctgcggcccggccagtacagcaccatcagcgaggtggccctgcagagcggccggggcaccgtgtccctgcccagcaaggctgctgagcgggtggtgggccgctggctgctggtgtgcagcggcaccgtggccggggctgtgatcctgggcggcgtgacccggctgacagaaagtggcctgtccatggtggactggcacctgatcaaggagatgaagccacccaccagccaggaggagtgggaggccgagttccagcgctaccagcagtttcctgagttcaagatcctgaaccacgacatgaccctgacagagttcaagttcatctggtacatggagtacagccacaggatgtggggccgcctggtgggcctggtgtacatcctgcctgctgcctacttctggaggaagggctggctgagccggggcatgaagggccgggtgctggccctgtgtggcctggtgtgcttccagggcctgctgggctggtacatggtgaagagcggcctggaggagaagagtgacagccatgacatcccccgggtgtcccagtaccgcctggccgcccacctgggcagcgccctggtgctgtactgtgccagcctgtggaccagcctgagcctgctgctgcccccccacaagctgcctgagacccaccagctgctgcagctgcggagatttgcccatggaacagctggcctggtgttcctgacagccctgagcggggcctttgtggccggcctggatgctggcctggtgtacaacagcttccccaagatgggagagagctggatcccagaagatctcttcaccttcagccccatcctgagaaatgtgtttgagaaccccaccatggtgcagtttgaccaccgcatcctgggcatcacctctgtgacagccatcaccgtgctgtacttcctgagccgccgcatccccctgcccaggaggaccaagatggctgctgtgaccctgctggccctggcctacacccaggtgggcctgggcatcagcaccctgctgatgtatgtgcccacccccctggccgccacccaccagagcggcagcctggccctgctgaccggggccctgtggctgatgaatgagctgcggcgggtgcccaagtag

SEQ ID NO: 148510 - DNA, 1167 bp, synthetic construct
  misc_feature 1..1167: note = Description of Artificial Sequence: Synthetic coding sequence
  source 1..1167: mol_type = other DNA
atgcagaggctgctcttcccccccctgcgggccctgaagggccggcagtacctgcccctgctggcccccagggctgccccccgggcccagtgtgactgcatcagaagacccctgcggcccggccagtacagcaccatcagcgaggtggccctgcagagcggccggggcaccgtgtccctgcccagcaaggctgctgagcgggtggtgggccgctggctgctggtgtgcagcggcaccgtggccggggctgtgatcctgggcggcgtgacccggctgacagaaagtggcctgtccatggtggactggcacctgatcaaggagatgaagccacccaccagccaggaggagtgggaggccgagttccagcgctaccagcagtttcctgagttcaagatcctgaaccacgacatgaccctgacagagttcaagttcatctggtacatggagtacagccacaggatgtggggccgcctggtgggcctggtgtacatcctgcctgctgcctacttctggaggaagggctggctgagccggggcatgaagggccgggtgctggccctgtgtggcctggtgtgcttccagggcctgctgggctggtacatggtgaagagcggcctggaggagaagagtgacagccatgacatcccccgggtgtcccagtaccgcctggccgcccacctgggcagcgccctggtgctgtactgtgccagcctgtggaccagcctgagcctgctgctgcccccccacaagctgcctgagacccaccagctgctgcagctgcggagatttgcccatggaacagctggcctggtgttcctgacagccctgagcggggcctttgtggccggcctggatgctggcctggtgtacaacagcttccccaagatgggagagagctggatcccagaagatctcttcaccttcagccccatcctgagaaatgtgtttgagaaccccaccatggtgcagtttgaccaccgcatcctgggcatcacctctgtgacagccatcaccgtgctgtacttcctgagccgccgcatccccctgcccaggaggaccaagatggctgctgtgaccctgctggccctggcctacacccagggccctgtgctcttcaacttcaccttcaagatcagtgacctggatgagggcatccggaacatctag

SEQ ID NO: 148511 - DNA, 192 bp, synthetic construct
  misc_feature 1..192: note = Description of Artificial Sequence: Synthetic coding sequence
  source 1..192: mol_type = other DNA
atgcctggcctggtggacagcaacccagcccctcctgagagccaggagaagaagcccctgaagccctgctgtgcctgcccagagaccaagaaggccagagatgcctgcatcatcgagaagggggaggagcactgcggccacctgattgaggcccacaaggagtgcatgagggccctgggcttcaagatctag

SEQ ID NO: 148512 - DNA, 192 bp, synthetic construct; identical to SEQ ID NO: 148511
  misc_feature 1..192: note = Description of Artificial Sequence: Synthetic coding sequence
  source 1..192: mol_type = other DNA

SEQ ID NO: 148513 - DNA, 297 bp, synthetic construct
  misc_feature 1..297: note = Description of Artificial Sequence: Synthetic coding sequence
  source 1..297: mol_type = other DNA
atgcctggcctggtggacagcaacccagcccctcctgagagccaggagaagaagcccctgaagccctgctgtgcctgcccagagaccaagaaggccagagatgcctggttccggggccgggtgtctgtggacctgagccgcagcctggtgcctggaaatgatggagagcggggggagcggcaggccagcaccacccacagcttcctgcagatcatcattgaaaaaggagaggagcactgcggccacctgattgaggcccacaaggagtgcatgagggccctgggcttcaagatctag

SEQ ID NO: 148514 - DNA, 192 bp, synthetic construct; identical to SEQ ID NO: 148511
  misc_feature 1..192: note = Description of Artificial Sequence: Synthetic coding sequence
  source 1..192: mol_type = other DNA

SEQ ID NO: 148515 - DNA, 1098 bp, synthetic construct
  misc_feature 1..1098: note = Description of Artificial Sequence: Synthetic coding sequence
  source 1..1098: mol_type = other DNA
atggccctgctgctgtgctttgtgctgctgtgtggggtggtggactttgcccggagcctgagcatcaccaccccagaggagatgattgagaaggccaagggggagacagcctacctgccctgcaagttcaccctgagccctgaggaccagggccccctggacatcgagtggctgatcagccctgctgacaaccagaaggtggaccaggtgatcatcctgtacagcggggacaagatctatgatgactactacccagacctgaagggccgggtgcacttcaccagcaatgacctgaagtctggagatgccagcatcaacgtgaccaacctgcagctgagtgacatcggcacctaccagtgcaaggtgaagaaggcccctggggtggccaacaagaagatccacctggtggtgctggtgaagcccagcggggcccgctgctacgtggatggcagcgaggagatcggcagtgacttcaagatcaagtgtgagcccaaggagggcagcctgcccctgcagtatgagtggcagaagctgagtgacagccagaagatgcccacctcctggctggccgagatgaccagcagcgtcatctctgtgaagaatgccagcagcgagtacagcggcacctacagctgcaccgtgaggaacagagtgggcagtgaccagtgcctgctgcggctgaatgtggtgccccccagcaacaaggccggcctgattgctggggccatcatcggcaccctgctggccctggccctgattggcctcatcatcttctgctgcaggaagaagaggcgggaggagaagtatgagaaggaggtgcaccacgacatcagagaagatgtgcccccacccaagagcaggaccagcacagcccggagctacatcggcagcaaccacagcagcctgggctccatgagccccagcaacatggagggctacagcaagacccagtacaaccaggtgcccagcgaggactttgagaggaccccccagagccccaccctgcccccagccaaggtggccgcccccaacctgagcaggatgggcgccatccctgtgatgatcccagcccagagcaaggatggcagcatcgtgtag

SEQ ID NO: 148516 - DNA, 975 bp, synthetic construct
  misc_feature 1..975: note = Description of Artificial Sequence: Synthetic coding sequence
  source 1..975: mol_type = other DNA
atggccctgctgctgtgctttgtgctgctgtgtggggtggtggactttgcccggagcctgagcatcaccaccccagaggagatgattgagaaggccaagggggagacagcctacctgccctgcaagttcaccctgagccctgaggaccagggccccctggacatcgagtggctgatcagccctgctgacaaccagaaggtggaccaggtgatcatcctgtacagcggggacaagatctatgatgactactacccagacctgaagggccgggtgcacttcaccagcaatgacctgaagtctggagatgccagcatcaacgtgaccaacctgcagctgagtgacatcggcacctaccagtgcaaggtgaagaaggcccctggggtggccaacaagaagatccacctggtggtgctggtgaagcccagcggggcccgctgctacgtggatggcagcgaggagatcggcagtgacttcaagatcaagtgtgagcccaaggagggcagcctgcccctgcagtatgagtggcagaagctgagtgacagccagaagatgcccacctcctggctggccgccagcaacaaggccggcctgattgctggggccatcatcggcaccctgctggccctggccctgattggcctcatcatcttctgctgcaggaagaagagaagagaggagaagtatgagaaggaggtgcaccacgacatccgggaggatgtgcccccacccaagagcaggaccagcacagcccggagctacatcggcagcaaccacagcagcctgggctccatgagccccagcaacatggagggctacagcaagacccagtacaaccaggtgcccagtgaagattttgagaggaccccccagagccccaccctgcccccagccaaggtggccgcccccaacctgagcaggatgggcgccatccctgtgatgatcccagcccagagcaaggatggcagcatcgtgtag

SEQ ID NO: 148517 - DNA, 603 bp, synthetic construct
  misc_feature 1..603: note = Description of Artificial Sequence: Synthetic coding sequence
  source 1..603: mol_type = other DNA
atggccctgctgctgtgctttgtgctgctgtgtggggtggtggactttgcccggagcctgagcatcaccaccccagaggagatgattgagaaggccaagggggagacagcctacctgccctgcaagttcaccctgagccctgaggaccagggccccctggacatcgagtggctgatcagccctgctgacaaccagaaggtggaccaggtgatcatcctgtacagcggggacaagatctatgatgactactacccagacctgaagggccgggtgcacttcaccagcaatgacctgaagtctggagatgccagcatcaacgtgaccaacctgcagctgagtgacatcggcacctaccagtgcaaggtgaagaaggcccctggggtggccaacaagaagatccacctggtggtgctgggcaagatgtgccacctgcagagagctgtgcggcccctgcctgaggccaccagcgctgtgatcatccacccctggggcccctgcctgctgcccacctggaaggacatcccccggctgagcatcaccaagtaccaggtgaagaccctgaatgccctgctgcgggtgcggctgagccacctgctgaggtag

SEQ ID NO: 148518 - DNA, 759 bp, synthetic construct
  misc_feature 1..759: note = Description of Artificial Sequence: Synthetic coding sequence
  source 1..759: mol_type = other DNA
atggccctgctgctgtgctttgtgctgctgtgtggggtggtggactttgcccggagcctgagcatcaccaccccagaggagatgattgagaaggccaagggggagacagcctacctgccctgcaagttcaccctgagccctgaggaccagggccccctggacatcgagtggctgatcagccctgctgacaaccagaaggtggaccaggtgatcatcctgtacagcggggacaagatctatgatgactactacccagacctgaagggccgggtgcacttcaccagcaatgacctgaagtctggagatgccagcatcaacgtgaccaacctgcagctgagtgacatcggcacctaccagtgcaaggtgaagaaggcccctggggtggccaacaagaagatccacctggtggtgctggtgaagcccagcggggcccgctgctacgtggatggcagcgaggagatcggcagtgacttcaagatcaagtgtgagcccaaggagggcagcctgcccctgcagtatgagtggcagaagctgagtgacagccagaagatgcccacctcctggctggccggcaagatgtgccacctgcagagagctgtgcggcccctgcctgaggccaccagcgctgtgatcatccacccctggggcccctgcctgctgcccacctggaaggacatcccccggctgagcatcaccaagtaccaggtgaagaccctgaatgccctgctgcgggtgcggctgagccacctgctgaggtag

SEQ ID NO: 148519 - DNA, 1059 bp, synthetic construct
  misc_feature 1..1059: note = Description of Artificial Sequence: Synthetic coding sequence
  source 1..1059: mol_type = other DNA
atggccctgctgctgtgctttgtgctgctgtgtggggtggtggactttgcccggagcctgagcatcaccaccccagaggagatgattgagaaggccaagggggagacagcctacctgccctgcaagttcaccctgagccctgaggaccagggccccctggacatcgagtggctgatcagccctgctgacaaccagaaggtggaccaggtgatcatcctgtacagcggggacaagatctatgatgactactacccagacctgaagggccgggtgcacttcaccagcaatgacctgaagtctggagatgccagcatcaacgtgaccaacctgcagctgagtgacatcggcacctaccagtgcaaggtgaagaaggcccctggggtggccaacaagaagatccacctggtggtgctggtgaagcccagcggggcccgctgctacgtggatggcagcgaggagatcggcagtgacttcaagatcaagtgtgagcccaaggagggcagcctgcccctgcagtatgagtggcagaagctgagtgacagccagaagatgcccacctcctggctggccgagatgaccagcagcgtcatctctgtgaagaatgccagcagcgagtacagcggcacctacagctgcaccgtgaggaacagagtgggcagtgaccagtgcctgctgcggctgaatgtggtgccccccagcaacaaggccggcctgattgctggggccatcatcggcaccctgctggccctggccctgattggcctcatcatcttctgctgcaggaagaagaggcgggaggagaagtatgagaaggaggtgcaccacgacatcagagaagatgtgcccccacccaagagcaggaccagcacagcccggagctacatcggcagcaaccacagcagcctgggctccatgagccccagcaacatggagggctacagcaagacccagtacaaccaggtgcccagcgaggactttgagaggaccccccagagccccaccctgcccccagccaagttcaagtacccctacaagacagatggcatcaccgtggtgtag

SEQ ID NO: 148520 - DNA, 270 bp, synthetic construct
  misc_feature 1..270: note = Description of Artificial Sequence: Synthetic coding sequence
  source 1..270: mol_type = other DNA
atggccctgctgctgtgctttgtgctgctgtgtggggtggtggactttgcccggagcctgagcatcaccaccccagaggagatgattgagaaggccaagggggagacagcctacctgccctgcaagttcaccctgagccctgaggaccagggccccctggacatcgagtggctgatcagccctgctgacaaccagaaggtggaccaggtgggccgctgtgccaccagcaaggagccctacgtgcactgccagaagctgcaccggcagtag

SEQ ID NO: 148521 - DNA, 900 bp, synthetic construct
  misc_feature 1..900: note = Description of Artificial Sequence: Synthetic coding sequence
  source 1..900: mol_type = other DNA
atggaggagtttgacagcgaggacttcagcaccagcgaggaggatgaggactatgtgcccagcggcggggagtacagtgaagatgatgtgaatgagctggtgaaggaggatgaggtggatggagaggagcagacccagaagacccagggcaagaagaggaaggcccagagcatcccagccaggaagaggcggcagggcggcctgagcctggaggaggaggaggaggaggatgccaacagcgagagcgagggcagcagcagcgaggaggaggatgatgctgctgagcaggagaagggcatcggctctgaagatgccaggaagaagaaggaggatgagctgtgggccagcttcctgaatgatgtgggccccaagagcaaggtgccccccagcacccaggtgaagaagggggaggagacagaggagaccagcagcagcaagctgctggtgaaggccgaggagctggagaagcccaaggagacagagaaggtgaagatcaccaaggtgtttgattttgctggggaggaggtgcgggtgaccaaggaggtggatgccaccagcaaggaggccaagagcttcttcaagcagaatgagaaggagaagccccaggccaacgtgcccagcgccctgcccagcctgcctgctggcagcggcctgaagaggagcagcggcatgagcagcctgctgggcaagattggagccaagaagcagaagatgagcaccctggagaagagcaagctggactgggagagcttcaaggaggaggagggcattggagaggagctggccatccacaacagaggcaaggagggctacatcgagaggaaggccttcctggacagagtggaccaccggcagtttgaaattgaaagagacctgcggctgagcaagatgaagccctag

SEQ ID NO: 148522 - DNA, 675 bp, synthetic construct
  misc_feature 1..675: note = Description of Artificial Sequence: Synthetic coding sequence
  source 1..675: mol_type = other DNA
atggagaagctgctgtgcttcctggtgctgaccagcctgagccacgccttcggccagacagacatgagcaggaaggcctttgtgttccccaaggagagtgacaccagctatgtgtccctgaaggcccccctgaccaagcccctgaaggccttcaccgtgtgcctgcacttctacacagagctgagcagcacccggggctacagcatcttctcctatgccaccaagaggcaggacaatgagatcctgatcttctggagcaaggacatcggctacagcttcaccgtgggcggcagcgagatcctgtttgaggtgcctgaggtgacagtggcccctgtgcacatctgcacctcctgggagagcgccagcggcatcgtggagttctgggtggatggcaagccccgggtgaggaagagcctgaagaagggctacacagtgggcgctgaggccagcatcatcctgggccaggagcaggacagctttggaggcaactttgagggcagccagagcctggtgggggacattggaaatgtgaacatgtgggactttgtgctgagcccagatgagatcaacaccatctacctgggcggccccttcagccccaacgtgctgaactggagggccctgaagtatgaggtgcagggcgaggtgttcaccaagccccagctgtggccctag

SEQ ID NO: 148523 - DNA, 309 bp, synthetic construct
  misc_feature 1..309: note = Description of Artificial Sequence: Synthetic coding sequence
  source 1..309: mol_type = other DNA
atggagaagctgctgtgcttcctggtgctgaccagcctgagccacgccttcggccagacagacatgagcaggaaggcctttgtgttccccaaggagagtgacaccagctatgtgtccctgaaggcccccctgaccaagcccctgaaggccttcaccgtgtgcctgcacttctacacagagctgagcagcacccatgagatcaacaccatctacctgggcggccccttcagccccaacgtgctgaactggagggccctgaagtatgaggtgcagggcgaggtgttcaccaagccccagctgtggccctag

SEQ ID NO: 148524 - DNA, 309 bp, synthetic construct; identical to SEQ ID NO: 148523
  misc_feature 1..309: note = Description of Artificial Sequence: Synthetic coding sequence
  source 1..309: mol_type = other DNA

SEQ ID NO: 148525 - DNA, 309 bp, synthetic construct; identical to SEQ ID NO: 148523
  misc_feature 1..309: note = Description of Artificial Sequence: Synthetic coding sequence
  source 1..309: mol_type = other DNA

SEQ ID NO: 148526 - DNA, 276 bp, synthetic construct
  misc_feature 1..276: note = Description of Artificial Sequence: Synthetic coding sequence
  source 1..276: mol_type = other DNA
atggagaagctgctgtgcttcctggtgctgaccagcctgagccacgccttcggccagacagacatgagcaggaaggcctttgtgttccccaaggagagtgacaccagctatgtgtccctgaaggcccccctgaccaagcccctgaaggccttcaccgtgtgcctgcacttctacacagagctgagcagcacccggggccccaacgtgctgaactggagggccctgaagtatgaggtgcagggcgaggtgttcaccaagccccagctgtggccctag

SEQ ID NO: 148527 - DNA, 141 bp, synthetic construct
  misc_feature 1..141: note = Description of Artificial Sequence: Synthetic coding sequence
  source 1..141: mol_type = other DNA
atgtgggactttgtgctgagcccagatgagatcaacaccatctacctgggcggccccttcagccccaacgtgctgaactggagggccctgaagtatgaggtgcagggcgaggtgttcaccaagccccagctgtggccctag

SEQ ID NO: 148528 - DNA, 1146 bp, synthetic construct
  misc_feature 1..1146: note = Description of Artificial Sequence: Synthetic coding sequence
  source 1..1146: mol_type = other DNA
atgcccttcagcaacagccacaatgccctgaagctgcgcttcccagcagaagatgagttcccagacctgagcgcccacaacaaccacatggccaaggtgctgaccccagagctgtatgcagagctgcgggccaagagcaccccatctggcttcaccctggatgatgtgatccagacaggagtggacaaccctggccacccctacatcatgacagtgggctgtgtggccggagatgaggagagctatgaggtgttcaaggacctgtttgaccccatcatcgaggacagacatggaggctacaagcccagtgatgagcacaagacagacctgaacccagacaacctgcagggcggagatgacctggaccccaactacgtgctgagcagccgggtgaggacaggccgcagcatccggggcttctgcctgcccccccactgcagcagaggagagcggcgggccatcgagaagctggccgtggaggccctgagcagcctggatggagacctggccggccgctactatgccctgaagtccatgacagaggccgagcagcagcagctgattgatgaccacttcctgtttgacaagcctgtgagccccctgctgctggccagcggcatggcccgggactggccagatgcccggggcatctggcacaatgacaacaagaccttcctggtgtgggtgaatgaggaggaccacctgcgggtcatctccatgcagaagggcggcaacatgaaggaggtgttcacccgcttctgcaccggcctgacccagatcgagaccctcttcaagagcaaggactatgagttcatgtggaacccccacctgggctacatcctgacctgccccagcaacctgggcaccggcctgcgggccggcgtgcacatcaagctgcccaacctgggcaagcatgagaagttcagcgaggtgctgaagaggctgcggctgcagaagaggggcaccggcggcgtggacacagctgctgtgggcggcgtgtttgatgtgtccaatgctgaccggctgggcttcagcgaggtggagctggtgcagatggtggtggatggagtgaagctgctgattgagatggagcagaggctggagcagggccaggccattgatgacctgatgcctgcccagaagtag

SEQ ID NO: 148529 - DNA, 1041 bp, synthetic construct
  misc_feature 1..1041: note = Description of Artificial Sequence: Synthetic coding sequence
  source 1..1041: mol_type = other DNA
atgcccttcagcaacagccacaatgccctgaagctgcgcttcccagcagaagatgagttcccagacctgagcgcccacaacaaccacatggccaaggtgctgaccccagagctgtatgcagagctgcgggccaagagcaccccatctggcttcaccctggatgatgtgatccagacaggagtggacaaccctggccacccctacatcatgacagtgggctgtgtggccggagatgaggagagctatgaggtgttcaaggacctgtttgaccccatcatcgaggacagacatggaggctacaagcccagtgatgagcacaagacagacctgaacccccccaggggggcccccagaattgagaagctggccgtggaggccctgagcagcctggatggagacctggccggccgctactatgccctgaagtccatgacagaagctgagcagcagcagctgattgatgaccacttcctgtttgacaagcctgtgagccccctgctgctggccagcggcatggcccgggactggccagatgcccggggcatctggcacaatgacaacaagaccttcctggtgtgggtgaatgaggaggaccacctgcgggtcatctccatgcagaagggcggcaacatgaaggaggtgttcacccgcttctgcaccggcctgacccagatcgagaccctcttcaagagcaaggactatgagttcatgtggaacccccacctgggctacatcctgacctgccccagcaacctgggcaccggcctgcgggccggcgtgcacatcaagctgcccaacctgggcaagcatgagaagttcagcgaggtgctgaagaggctgcggctgcagaagaggggcactggaggagtggacacagctgctgtgggcggcgtgtttgatgtgtccaatgctgaccggctgggcttcagcgaggtggagctggtgcagatggtggtggatggagtgaagctgctgattgagatggagcagaggctggagcagggccaggccattgatgacctgatgcctgcccagaagtag

SEQ ID NO: 148530 - DNA, 654 bp, synthetic construct
  misc_feature 1..654: note = Description of Artificial Sequence: Synthetic coding sequence
  source 1..654: mol_type = other DNA
atgcccttcagcaacagccacaatgccctgaagctgcgcttcccagcagaagatgagttcccagacctgagcgcccacaacaaccacatggccaaggtgctgaccccagagctgtatgcagagctgcgggccaagagcaccccatctggcttcaccctggatgatgtgatccagacaggagtggacaaccctggccacccctacatcatgacagtgggctgtgtggccggagatgaggagagctatgaggtgttcaaggacctgtttgaccccatcatcgaggacagacatggaggctacaagcccagtgatgagcacaagacagacctgaacccagacaacctgcagggcggagatgacctggaccccaactacgtgctgagcagccgggtgaggacaggccgcagcatccggggcttctgcctgcccccccactgcagcagaggagagcggcgggccatcgagaagctggccgtggaggccctgagcagcctggatggagacctggccggccgctactatgccctgaagtccatgacagaggccgagcagcagcagctgattgatgaccacttcctgtttgacaagcctgtgagccccctgctgctggccagcggcatggcccgggactggccagatgcccggggcatctag

SEQ ID NO: 148531 - DNA, 447 bp, synthetic construct
  misc_feature 1..447: note = Description of Artificial Sequence: Synthetic coding sequence
  source 1..447: mol_type = other DNA
atggccggccccttcagccggctgctgagcgcccggcccggcctgcggctgctggccctggccggggccggcagcctggccgccggcttcctgctgcggcctgagcctgtgcgggccgccagcgagcggcggcggctgtacccacccagcgctgagtacccagacctgaggaagcacaacaactgcatggccagccacctgaccccagctgtgtatgcccggctgtgtgacaagaccacccccaccggctggaccctggaccagtgcatccagacaggagtggacaaccctggccaccccttcatcaagacagtgggcatggtggccggagatgaggagacctatgaggtgtttgctgacctgtttgaccccgtcatccaggagcggcacaacggctatgaccccaggaccatgaagcacaccacagacctggatgccagcaagtag

SEQ ID NO: 148532 - DNA, 1254 bp, synthetic construct
  misc_feature 1..1254: note = Description of Artificial Sequence: Synthetic coding sequence
  source 1..1254: mol_type = other DNA
atggccggccccttcagccggctgctgagcgcccggcccggcctgcggctgctggccctggccggggccggcagcctggccgccggcttcctgctgcggcctgagcctgtgcgggccgccagcgagcggcggcggctgtacccacccagcgctgagtacccagacctgaggaagcacaacaactgcatggccagccacctgaccccagctgtgtatgcccggctgtgtgacaagaccacccccaccggctggaccctggaccagtgcatccagacaggagtggacaaccctggccaccccttcatcaagacagtgggcatggtggccggagatgaggagacctatgaggtgtttgctgacctgtttgaccccgtcatccaggagcggcacaacggctatgaccccaggaccatgaagcacaccacagacctggatgccagcaagatccgcagcggctactttgatgagcgctacgtgctgagcagccgggtgaggacaggccgcagcatccggggcctgagcctgcccccagcctgcaccagggctgagcggcgggaggtggagcgggtggtggtggatgccctgagcggcctgaagggggacctggccggccgctactaccgcctgtctgagatgacagaagctgagcagcagcagctgattgatgaccacttcctgtttgacaagcctgtgagccccctgctgacagctgctggcatggcccgggactggccagatgcccggggcatctggcacaacaatgagaagagcttcctgatctgggtgaatgaggaggaccacaccagggtcatctccatggagaagggcggcaacatgaagagggtgtttgagcgcttctgccggggcctgaaggaggtggagcggctcatccaggagcggggctgggagttcatgtggaatgaaaggctgggctacatcctgacctgccccagcaacctgggcaccggcctgcgggccggcgtgcacatcaagctgcccctgctgagcaaggacagccgcttccccaagatcctggagaacctgcggctgcagaagaggggcactggaggagtggacacagctgccactggaggagtgtttgacatcagcaacctggaccggctgggcaagtctgaggtggagctggtgcagctggtgattgatggagtgaactacctgattgactgtgagcggcggctggagcggggccaggacatccgcatccccacccctgtgatccacaccaagcactag

SEQ ID NO: 148533 - DNA, 1347 bp, synthetic construct
  misc_feature 1..1347: note = Description of Artificial Sequence: Synthetic coding sequence
  source 1..1347: mol_type = other DNA
atggccggccccttcagccggctgctgagcgcccggcccggcctgcggctgctggccctggccggggccggcagcctggccgccggcttcctgctgcggcctgagcctgtgcgggccgccagcgagcggcggcggctgtacccacccagccagacctggcccaccggccagctgcccggcaactgcaccaggagccggcggctgtgcccccccagcatggtgacaggctaccccctgcccagcgctgagtacccagacctgaggaagcacaacaactgcatggccagccacctgaccccagctgtgtatgcccggctgtgtgacaagaccacccccaccggctggaccctggaccagtgcatccagacaggagtggacaaccctggccaccccttcatcaagacagtgggcatggtggccggagatgaggagacctatgaggtgtttgctgacctgtttgatcctgtgatccaggagcggcacaacggctatgaccccaggaccatgaagcacaccacagacctggatgccagcaagatccgcagcggctactttgatgaaagatatgtgctgagcagccgggtgaggacaggccgcagcatccggggcctgagcctgcccccagcctgcaccagggctgagcggcgggaggtggagcgggtggtggtggatgccctgagcggcctgaagggggacctggccggccgctactaccgcctgtctgagatgacagaggccgagcagcagcagctgattgatgaccacttcctgtttgacaagcctgtgagccccctgctgacagctgctggcatggcccgggactggccagatgcccggggcatctggcacaacaatgagaagagcttcctgatctgggtgaatgaggaggaccacaccagggtcatctccatggagaagggcggcaacatgaagagggtgtttgagcgcttctgccggggcctgaaggaggtggagcggctcatccaggagcggggctgggagttcatgtggaatgaaaggctgggctacatcctgacctgccccagcaacctgggcaccggcctgcgggccggcgtgcacatcaagctgcccctgctgagcaaggacagccgcttccccaagatcctggagaacctgcggctgcagaagaggggcaccggcggcgtggacacagctgccaccggcggcgtgtttgacatcagcaacctggaccggctgggcaagtctgaggtggagctggtgcagctggtgattgatggagtgaactacctgattgactgtgaaagaaggctggagcggggccaggacatccgcatccccacccctgtgatccacaccaagcactag

SEQ ID NO: 148534 - DNA, 1254 bp, synthetic construct; identical to SEQ ID NO: 148532
  misc_feature 1..1254: note = Description of Artificial Sequence: Synthetic coding sequence
  source 1..1254: mol_type = other DNA

SEQ ID NO: 148535 - DNA, 765 bp, synthetic construct
  misc_feature 1..765: note = Description of Artificial Sequence: Synthetic coding sequence
  source 1..765: mol_type = other DNA
atggccggccccttcagccggctgctgagcgcccggcccggcctgcggctgctggccctggccggggccggcagcctggccgccggcttcctgctgcggcctgagcctgtgcgggccgccagcgagcggcggcggctgtacccacccagcgctgagtacccagacctgaggaagcacaacaactgcatggccagccacctgaccccagctgtgtatgcccggctgtgtgacaagaccacccccaccggctggaccctggaccagtgcatccagacaggagtggacaaccctggccaccccttcatcaagacagtgggcatggtggccggagatgaggagacctatgaggtgtttgctgacctgtttgaccccgtcatccggggcctgagcctgcccccagcctgcaccagggctgagcggcgggaggtggagcgggtggtggtggatgccctgagcggcctgaagggggacctggccggccgctactaccgcctgtctgagatgacagaagctgagcagcagcagctgattgatgaccacttcctgtttgacaagcctgtgagccccctgctgacagctgctggcatggcccgggactggccagatgcccggggcatctggcacaacaatgagaagagcttcctgatctgggtgaatgaggaggaccacaccagggtcatctccatggagaagggcggcaacatgaagagggtgtttgagcgcttctgccggggcctgaaggaggtggtggtgggcatcaagtag

SEQ ID NO: 148536 - DNA, 1254 bp, synthetic construct; identical to SEQ ID NO: 148532
  misc_feature 1..1254: note = Description of Artificial Sequence: Synthetic coding sequence
  source 1..1254: mol_type = other DNA

SEQ ID NO: 148537 - DNA, 441 bp, synthetic construct
  misc_feature 1..441: note = Description of Artificial Sequence: Synthetic coding sequence
  source 1..441: mol_type = other DNA
atgcctgtgaaggtgaggacaggccgcagcatccggggcctgagcctgcccccagcctgcaccagggctgagcggcgggaggtggagcgggtggtggtggatgccctgagcggcctgaagggggacctggccggccgctactaccgcctgtctgagatgacagaggccgagcagcagcagctgattgatgaccacttcctgtttgacaagcctgtgagccccctgctgacagctgctggcatggcccgggactggccagatgcccggggcatctggcacaacaatgagaagagcttcctgatctgggtgaatgaggaggaccacaccagggtcatctccatggagaagggcggcaacatgaagagggtgtttgagcgcttctgccggggcctgaaggaggtgcgggaggactgtgtgggggagctgggcggccgcacctag

SEQ ID NO: 148538 - DNA, 507 bp, synthetic construct
  misc_feature 1..507: note = Description of Artificial Sequence: Synthetic coding sequence
  source 1..507: mol_type = other DNA
atgaagcacaccacagacctggatgccagcaagatccgcagcggctactttgatgaaagatatgtgctgagcagccgggtgaggacaggccgcagcatccggggcctgagcctgcccccagcctgcaccagggctgagcggcgggaggtggagcgggtggtggtggatgccctgagcggcctgaagggggacctggccggccgctactaccgcctgtctgagatgacagaggccgagcagcagcagctgattgatgaccacttcctgtttgacaagcctgtgagccccctgctgacagctgctggcatggcccgggactggccagatgcccggggcatctggcacaacaatgagaagagcttcctgatctgggtgaatgaggaggaccacaccagggtcatctccatggagaagggcggcaacatgaagagggtgtttgagcgcttctgccggggcctgaaggaggtgcgggaggactatgtgggggagctgggcggccgcacctag

SEQ ID NO: 148539 - DNA, 312 bp, synthetic construct
  misc_feature 1..312: note = Description of Artificial Sequence: Synthetic coding sequence
  source 1..312: mol_type = other DNA
atggccggccccttcagccggctgctgagcgcccggcccggcctgcggctgctggccctggccggggccggcagcctggccgccggcttcctgctgcggcctgagcctgtgcgggccgccagcgagcggcggcggctgtacccacccagcgctgagtacccagacctgaggaagcacaacaactgcatggccagccacctgaccccagctgtgtatgcccggctgtgtgacaagaccacccccaccggctggaccctggaccagtgcatccagacaggagtggacaaccctggccaccccttcatcaagtag

SEQ ID NO: 148540 - DNA, 390 bp, synthetic construct
  misc_feature 1..390: note = Description of Artificial Sequence: Synthetic coding sequence
  source 1..390: mol_type = other DNA
atggccggccccttcagccggctgctgagcgcccggcccggcctgcggctgctggccctggccggggccggcagcctggccgccggcttcctgctgcggcctgagcctgtgcgggccgccagcgagcggcggcggctgtacccacccagcgctgagtacccagacctgaggaagcacaacaactgcatggccagccacctgaccccagctgtgtatgcccggctgtgtgacaagaccacccccaccggctggaccctggaccagtgcatccagacaggagtggacaaccctggccaccccttcatcaagacagtgggcatggtggccggagatgaggagacctatgaggtgtttgctgacctgtttgaccccgtcatccaggagaggtag

SEQ ID NO: 148541 - DNA, 1017 bp, synthetic construct
  misc_feature 1..1017: note = Description of Artificial Sequence: Synthetic coding sequence
  source 1..1017: mol_type = other DNA
atggccggccccttcagccggctgctgagcgcccggcccggcctgcggctgctggccctggccggggccggcagcctggccgccggcttctgcagcgacaggaacctgtatgagctgcctgtgaatgatggcggctgcatcccccgggagcagagccagacctggcccaccggccagctgcccggcaactgcaccaggagccggcggctgtgcccccccagcatggtgacaggctaccccctgcccagcgctgagtacccagacctgaggaagcacaacaactgcatggccagccacctgaccccagctgtgtatgcccggctgtgtgacaagaccacccccaccggctggaccctggaccagtgcatccagacaggagtggacaaccctggccaccccttcatcaagacagtgggcatggtggccggagatgaggagacctatgaggtgtttgctgacctgtttgatcctgtgatccaggagcggcacaacggctatgaccccaggaccatgaagcacaccacagacctggatgccagcaagatccgcagcggctactttgatgaaagatatgtgctgagcagccgggtgaggacaggccgcagcatccggggcctgagcctgcccccagcctgcaccagggctgagcggcgggaggtggagcgggtggtggtggatgccctgagcggcctgaagggggacctggccggccgctactaccgcctgtctgagatgacagaggccgagcagcagcagctgattgatgaccacttcctgtttgacaagcctgtgagccccctgctgacagctgctggcatggcccgggactggccagatgcccggggcatctggcacaacaatgagaagagcttcctgatctgggtgaatgaggaggaccacaccagggtcatctccatggagaagggcggcaacatgaagagggtgtttgagcgcttctgccggggcctgaaggaggtgcgggaggactatgtgggggagctgggcggccgcacctag

SEQ ID NO: 148542 - DNA, 1254 bp, synthetic construct; identical to SEQ ID NO: 148532
  misc_feature 1..1254: note = Description of Artificial Sequence: Synthetic coding sequence
  source 1..1254: mol_type = other DNA

SEQ ID NO: 148543 - DNA, 774 bp, synthetic construct
  misc_feature 1..774: note = Description of Artificial Sequence: Synthetic coding sequence
  source 1..774: mol_type = other DNA
atggtgacaggctaccccctgcccagcgctgagtacccagacctgaggaagcacaacaactgcatggccagccacctgaccccagctgtgtatgcccggctgtgtgacaagaccacccccaccggctggaccctggaccagtgcatccagacaggagtggacaaccctggccaccccttcatcaagacagtgggcatggtggccggagatgaggagacctatgaggtgtttgctgacctgtttgatcctgtgatccaggagcggcacaacggctatgaccccaggaccatgaagcacaccacagacctggatgccagcaagatccgcagcggctactttgatgaaagatatgtgctgagcagccgggtgaggacaggccgcagcatccggggcctgagcctgcccccagcctgcaccagggctgagcggcgggaggtggagcgggtggtggtggatgccctgagcggcctgaagggggacctggccggccgctactaccgcctgtctgagatgacagaggccgagcagcagcagctgattgatgaccacttcctgtttgacaagcctgtgagccccctgctgacagctgctggcatggcccgggactggccagatgcccggggcatctggcacaacaatgagaagagcttcctgatctgggtgaatgaggaggaccacaccagggtcatctccatggagaagggcggcaacatgaagagggtgtttgagcgcttctgccggggcctgaaggaggtggtggtgggcatcaagtag

SEQ ID NO: 148544 - DNA, 726 bp, synthetic construct
  misc_feature 1..726: note = Description of Artificial Sequence: Synthetic coding sequence
  source 1..726: mol_type = other DNA
atggccggccccttcagccggctgctgagcgcccggcccggcctgcggctgctggccctggccggggccggcagcctggccgccggcttcctgctgcggcctgagcctgtgcgggccgccagcgagcggcggcggctgtacccacccagcgctgagtacccagacctgaggaagcacaacaactgcatggccagccacctgaccccagctgtgtatgcccggctgtgtgacaagaccacccccaccggctggaccctggaccagtgcatccagacaggagtggacaaccctggccaccccttcatcaagacagtgggcatggtggccggagatgaggagacctatgaggtgtttgctgacctgtttgaccccgtcatccaggagcggcacaacggctatgaccccaggaccatgaagcacaccacagacctggatgccagcaagatccgcagcggctactttgatgagcgctacgtgctgagcagccgggtgaggacaggccgcagcatccggggcctgagcctgcccccagcctgcaccagggctgagcggcgggaggtggagcgggtggtggtggatgccctgagcggcctgaagggggacctggccggccgctactaccgcctgtctgagatgacagaagctgagcagcagcagctgattgatgaccacttcctgtttgacaagcctgtgagccccctgctgacagctgctggcatggcctag

SEQ ID NO: 148545 - DNA, 1260 bp, synthetic construct
  misc_feature 1..1260: note = Description of Artificial Sequence: Synthetic coding sequence
  source 1..1260: mol_type = other DNA
atggccagcatcttcagcaagctgctgaccggcagaaatgccagcctgctgtttgccaccatgggcacctctgtgctgaccaccggctacctgctgaaccggcagaaggtgtgtgccgaggtgcgggagcagcccaggctcttccccccatctgctgactacccagacctgaggaagcacaacaactgcatggccgagtgcctgaccccagccatctatgccaagctgaggaacaaggtgaccccaaatggctacaccctggaccagtgcatccagacaggagtggacaaccctggccaccccttcatcaagacagtgggcatggtggccggagatgaggagagctatgaggtgtttgctgacctgtttgatcctgtgatcaagctgcggcacaacggctatgacccccgggtgatgaagcacaccacagacctggatgccagcaagatcacccagggccagtttgatgagcactacgtgctgagcagccgggtgaggacaggccgcagcatccggggcctgagcctgcccccagcctgcaccagggctgagcggcgggaggtggagaatgtggccatcacagccctggagggcctgaagggggacctggccggccgctactacaagctgtctgagatgacagagcaggaccagcagaggctgattgatgaccacttcctgtttgacaagcctgtgagccccctgctgacctgtgccggcatggcccgggactggccagatgcccggggcatctggcacaactatgacaagaccttcctgatctggatcaatgaggaggaccacaccagggtcatctccatggagaagggcggcaacatgaagagggtgtttgagcgcttctgccggggcctgaaggaggtggagcggctcatccaggagcggggctgggagttcatgtggaatgaaaggctgggctacatcctgacctgccccagcaacctgggcaccggcctgcgggccggcgtgcacgtgcgcatccccaagctgagcaaggacccccgcttcagcaagatcctggagaacctgcggctgcagaagaggggcaccggcggcgtggacacagctgctgtggctgatgtgtatgacatcagcaacatcgaccgcatcggccgctctgaggtggagctggtgcagatcgtgattgatggagtgaactacctggtggactgtgagaagaagctggagcggggccaggacatcaaggtgcccccacccctgccccagtttgggaagaagtag

SEQ ID NO: 148546 - DNA, 1260 bp, synthetic construct; identical to SEQ ID NO: 148545
  misc_feature 1..1260: note = Description of Artificial Sequence: Synthetic coding sequence
  source 1..1260: mol_type = other DNA

SEQ ID NO: 148547 - DNA, 1260 bp, synthetic construct; identical to SEQ ID NO: 148545
  misc_feature 1..1260: note = Description of Artificial Sequence: Synthetic coding sequence
  source 1..1260: mol_type = other DNA

SEQ ID NO: 148548 - DNA, 513 bp, synthetic construct
  misc_feature 1..513: note = Description of Artificial Sequence: Synthetic coding sequence
  source 1..513: mol_type = other DNA
atggccagcatcttcagcaagctgctgaccggcagaaatgccagcctgctgtttgccaccatgggcacctctgtgctgaccaccggctacctgctgaaccggcagaaggtgtgtgccgaggtgcgggagcagcccaggctcttccccccatctgctgactacccagacctgaggaagcacaacaactgcatggccgagtgcctgaccccagccatctatgccaagctgaggaacaaggtgaccccaaatggctacaccctggaccagtgcatccagacaggagtggacaaccctggccaccccttcatcaagacagtgggcatggtggccggagatgaggagagctatgaggtgtttgctgacctgtttgatcctgtgatcaagctgcggcacaacggctatgacccccgggtgatgaagcacaccacagacctggatgccagcaagatcacccagggccagtttgatgagcactacgtgctgagcagccgggtgaggacaggccgctcctag

SEQ ID NO: 148549 - DNA, 1098 bp, synthetic construct
  misc_feature 1..1098: note = Description of Artificial Sequence: Synthetic coding sequence
  source 1..1098: mol_type = other DNA
atgggcgtgccccggccccagccctgggccctgggcctgctgctcttcctgctgcccggcagcctgggcgctgagagccacctgagcctgctgtaccacctgacagctgtgagcagccctgcccctggcaccccagccttctgggtgtctggctggctgggcccccagcagtacctgagctacaacagcctgcggggggaggccgagccctgtggggcctgggtgtgggagaaccaggtgtcctggtactgggagaaggagaccacagacctgcgcatcaaggagaagctgttcctggaggccttcaaggccctgggcggcaagggcccctacaccctgcagggcctgctgggctgtgagctgggccctgacaacacctctgtgcccacagccaagtttgccctgaatggagaggagttcatgaactttgacctgaagcagggcacctggggcggggactggccagaggccctggccatcagccagcgctggcagcagcaggacaaggccgccaacaaggagctgaccttcctgctcttcagctgcccccaccggctgcgggagcacctggagcggggccggggcaacctggagtggaaggagccccccagcatgaggctgaaggcccggcccagcagccctggcttctctgtgctgacctgcagcgccttctccttctacccacctgagctgcagctgcgcttcctgagaaatggcctggccgccggcaccggccagggcgactttggccccaacagtgatggcagcttccacgccagcagcagcctgactgtgaagtctggagatgagcaccactactgctgcatcgtgcagcacgccggcctggcccagcccctgcgggtggagctggagagccctgccaagagctctgtgctggtggtgggcatcgtgattggagtgctgctgctgacagctgctgctgtgggcggggccctgctgtggaggaggatgaggagcggcctgcctgccccctggatcagcctgcggggagatgacaccggggtgctgctgcccaccccaggagaggcccaggatgctgacctgaaggatgtgaatgtcatcccagccacagcctag

SEQ ID NO: 148550 - DNA, 7329 bp, synthetic construct
  misc_feature 1..7329: note = Description of Artificial Sequence: Synthetic coding sequence
  source 1..7329: mol_type = other DNA
atggccgagaacctgctggatggcccccccaaccccaagagggccaagctgagcagccctggcttcagcgccaatgacagcacagactttggcagcctgtttgacctggagaatgacctgcctgatgagctgatccccaatggaggagagctgggcctgctgaacagcggcaacctggtgcctgatgctgccagcaagcacaagcagctgtctgagctgctgcggggcggcagcggcagcagcatcaaccctggcattggaaatgtgtctgccagcagccctgtgcagcagggcctgggcggccaggcccagggccagcccaacagcgccaacatggccagcctgagcgccatgggcaagagccccctgagccagggcgacagcagcgcccccagcctgcccaagcaggccgccagcaccagcggccccaccccagctgccagccaggccctgaacccccaggcccagaagcaggtgggcctggccaccagcagccctgccaccagccagacaggccctggcatctgcatgaatgccaacttcaaccagacccaccctggcctgctgaacagcaacagcggccacagcctcatcaaccaggccagccagggccaggcccaggtgatgaatggcagcctgggcgccgccggccggggccgcggggccggcatgccctaccccaccccagccatgcagggcgccagcagctctgtgctggccgagaccctgacccaggtgagcccccagatgactggacatgctggcctgaacacagcccaggccggcggcatggccaagatgggcatcaccggcaacaccagccccttcggccagcccttcagccaggccggcggccagcccatgggcgccactggagtgaacccccagctggccagcaagcagagcatggtgaacagcctgcccaccttccccacagacatcaagaacacctctgtgaccaacgtgcccaacatgagccagatgcagacctctgtgggcatcgtgcccacccaggccatcgccaccggccccacagctgaccctgagaagaggaagctgatccagcagcagctggtgctgctgctgcacgcccacaagtgccagaggcgggagcaggccaacggggaggtgcgggcctgcagcctgccccactgcaggaccatgaagaatgtgctgaaccacatgacccactgccaggccggcaaggcctgccaggtggcccactgtgccagcagccggcagatcatcagccactggaagaactgcaccaggcatgactgccctgtgtgcctgcccctgaagaatgccagtgacaagaggaaccagcagaccatcctgggcagccctgccagcggcatccagaacaccatcggctctgtgggcaccggccagcagaatgccaccagcctgagcaaccccaaccccatcgaccccagctccatgcagagggcctatgctgccctgggcctgccctacatgaaccagccccagacccagctgcagccccaggtgcccggccagcagcctgcccagccccagacccaccagcagatgaggaccctgaaccccctgggcaacaaccccatgaacatcccagctgggggcatcaccacagaccagcagccccccaacctgatcagcgagagcgccctgcccaccagcctgggcgccaccaaccccctgatgaatgatggcagcaacagcggcaacatcggcaccctgagcaccatccccacagctgccccacccagcagcactggagtgaggaagggctggcatgaacatgtgacccaggacctgcggagccacctggtgcacaagctggtgcaggccatcttccccaccccagaccctgctgccctgaaggacaggaggatggagaacctggtggcctatgccaagaaggtggagggggacatgtatgaaagtgccaacagcagagatgagtactaccacctgctggccgagaagatctacaagatccagaaggagctggaggagaagagaagaagccggctgcacaagcagggcatcctgggcaaccagcctgccctgcctgcccctggggcccagccccctgtgatcccccaggcccagcctgtgcggcccccaaatggccccctgagcctgcctgtgaacaggatgcaggtgtcccagggcatgaacagcttcaaccccatgagcctgggcaatgtgcagctgccccaggcccccatgggccccagggctgccagccccatgaaccacagcgtgcagatgaacagcatgggctctgtgcccggcatggccatcagccccagcaggatgccccagccccccaacatgatgggcgcccacaccaacaacatgatggcccaggccccagcccagagccagttcctgccccagaaccagttccccagcagcagcggggccatgtctgtgggcatgggccagcccccagcccagacaggagtgtcccagggccaggtgcctggagctgccctgcccaaccccctgaacatgctgggcccccaggccagccagctgccctgcccccctgtgacccagagccccctgcaccccaccccacctccagccagcacagctgctggcatgcccagcctgcagcacaccaccccacctggcatgaccccaccccagcctgctgcccccacccagcccagcacccctgtgagcagcagcggccagacccccacccccaccccaggctctgtgcccagcgccacccagacccagagcacccccaccgtgcaggccgccgcccaggcccaggtgaccccccagccccagacccctgtgcagccccccagcgtggccaccccccagagcagccagcagcagcccacccctgtgcacgcccagcccccaggcacccccctgagccaggccgccgccagcattgacaacagagtgcccacccccagctctgtggccagcgctgagaccaacagccagcagcccggcccagatgtgcctgtgctggagatgaagacagagacccaggccgaggacacagagccagaccccggggagagcaagggggagcccaggtctgagatgatggaggaggacctgcagggcgccagccaggtgaaggaggagacagacattgctgagcagaagtctgagcccatggaggtggatgagaagaagccagaggtgaaggtggaggtgaaggaggaggaggagagcagcagcaatggaacagccagccagagcaccagccccagccagcccaggaagaagatcttcaagccagaggagctgcggcaggccctgatgcccaccctggaggccctgtaccggcaggaccctgagagcctgcccttccggcagcctgtggacccccagctgctgggcatcccagactactttgacatcgtgaagaaccccatggacctgagcaccatcaagaggaagctggacaccggccagtaccaggagccctggcagtatgtggatgatgtgtggctgatgttcaacaatgcctggctgtacaacaggaagaccagccgggtgtacaagttctgcagcaagctggccgaggtgtttgagcaggagattgatcctgtgatgcagagcctgggctactgctgcggcaggaaatatgagttcagcccccagaccctgtgctgctacggcaagcagctgtgcaccatccccagagatgctgcctactacagctaccagaaccgctaccacttctgtgagaagtgcttcacagagatccagggagaaaatgtgaccctgggagatgaccccagccagccccagaccaccatcagcaaggaccagtttgagaagaagaagaatgacaccctggaccctgagccctttgtggactgcaaggaatgtggcaggaagatgcaccagatctgtgtgctgcactatgacatcatctggcccagcggctttgtgtgtgacaactgcctgaagaagacaggccggcccaggaaagaaaacaagttcagcgccaagaggctgcagaccacccggctgggcaaccacctggaggacagagtgaacaagttcctgcggcggcagaaccaccctgaggccggggaggtgtttgtgcgggtggtggccagcagtgacaagacagtggaggtgaagccaggcatgaagagcagatttgtggacagcggggagatgtctgagagcttcccctaccgcaccaaggccctgtttgcctttgaggagattgatggagtggatgtgtgcttcttcggcatgcacgtgcaggagtatggcagtgactgccccccacccaacaccaggagagtgtacatctcctacctggacagcatccacttcttccggccccgctgcctgaggacagctgtgtaccacgagatcctgattggctacctggagtatgtgaagaagctgggctacgtgacaggccacatctgggcctgccccccatctgaaggagatgactacatcttccactgccaccccccagaccagaagatccccaagcccaagaggctgcaggagtggtacaagaagatgctggacaaggcctttgctgagcgcatcatccatgactacaaggacatcttcaagcaggccacagaggaccggctgaccagcgccaaggagctgccctactttgaaggagacttctggcccaacgtgctggaggagagcatcaaggagctggagcaggaggaggaggagaggaagaaggaggagagcacagctgccagcgagaccacagagggcagccagggcgacagcaagaatgccaagaagaagaacaacaagaagaccaacaagaacaagagcagcatcagccgggccaacaagaagaagcccagcatgcccaacgtgtccaatgacctgagccagaagctgtatgccaccatggagaagcacaaggaggtgttctttgtgatccacctgcatgctggccctgtgatcaacaccctgccccccatcgtggaccctgaccccctgctgagctgtgacctgatggatggaagagatgccttcctgaccctggcccgggacaagcactgggagttcagcagcctgcggcgcagcaagtggagcaccctgtgcatgctggtggagctgcacacccagggccaggacagatttgtgtacacctgcaatgaatgcaagcaccacgtggagacccgctggcactgcaccgtgtgtgaggactatgacctgtgcatcaactgctacaacaccaagagccacgcccacaagatggtgaagtggggcctgggcctggatgatgagggcagcagccagggcgagccccagagcaagagcccccaggagagccggcggctgagcatccagcgctgcatccagagcctggtgcacgcctgccagtgcagaaatgccaactgcagcctgcccagctgccagaagatgaagagggtggtgcagcacaccaagggctgcaagaggaagaccaatggaggctgccctgtgtgcaagcagctgattgccctgtgctgctaccacgccaagcactgccaggagaacaagtgccctgtgcccttctgcctgaacatcaagcacaagctgcggcagcagcagatccagcaccggctgcagcaggcccagctgatgagaagaaggatggccaccatgaacaccagaaatgtgccccagcagagcctgcccagccccaccagcgcccctcctggcacccccacccagcagcccagcaccccccagaccccccagcccccagcccagccccagcccagccctgtgtccatgagccctgctggcttccccagcgtggcccggacccagccccccaccaccgtgtccacaggcaagcccaccagccaggtgcctgcccctcctcctccagcccagcccccacctgctgctgtggaggccgcccggcagatcgagcgggaggcccagcagcagcagcacctgtacagagtgaacatcaacaacagcatgcctcctggccgcacaggcatgggcaccccaggcagccagatggcccctgtgtccctgaatgtgccccggcccaaccaggtgtctggccctgtgatgcccagcatgcctcctggccagtggcagcaggcccccctgccccagcagcagcccatgcctggcctgcccaggcctgtgatctccatgcaggcccaggccgctgtggccggccccaggatgcccagcgtgcagccccccaggagcatcagccccagcgccctgcaggacctgctgcggaccctgaagagccccagcagcccccagcagcagcagcaggtgctgaacatcctgaagagcaacccccagctgatggccgccttcatcaagcagaggacagccaagtatgtggccaaccagcccggcatgcagccccagcccggcctgcagagccagcccggcatgcagccccagcccggcatgcaccagcagcccagcctgcagaacctgaatgccatgcaggccggcgtgcccaggcctggggtgcccccccagcagcaggccatgggcggcctgaacccccagggccaggccctgaacatcatgaaccctggccacaaccccaacatggcctccatgaacccccagtaccgggagatgctgcggcggcagctgctgcagcagcagcagcagcagcagcagcagcagcagcagcagcagcagcagcagcagggcagcgctggcatggccggcggcatggccggccacggccagttccagcagccccagggccctgggggctaccccccagccatgcagcagcagcagaggatgcagcagcacctgcccctgcagggcagctccatgggccagatggccgcccagatgggccagctgggccagatgggccagcccggcctgggcgctgacagcacccccaacatccagcaggccctgcagcagaggatcctgcagcagcagcagatgaagcagcagatcggcagccctggccagcccaaccccatgagcccccagcagcacatgctgagcggccagccccaggccagccacctgcccggccagcagatcgccaccagcctgagcaaccaggtgcgcagccctgcccctgtgcagagcccccggccccagagccagcccccccacagcagccccagcccccgcatccagccccagcccagcccccaccacgtgagcccccagacaggcagcccccaccctggcctggccgtgaccatggccagcagcattgaccagggccacctgggcaaccctgagcagagcgccatgctgccccagctgaacacccccagccgcagcgccctgagcagcgagctgagcctggtgggggacaccactggagacaccctggagaagtttgtggagggcctgtag

SEQ ID NO: 148551 - DNA, 2934 bp, synthetic construct
  misc_feature 1..2934: note = Description of Artificial Sequence: Synthetic coding sequence
  source 1..2934: mol_type = other DNA
atgcacgtgcaggagtatggcagtgactgccccccacccaacacccggcgggtgtacatctcctacctggacagcatccacttcttccggccccgctgcctgaggacagctgtgtaccacgagatcctgattggctacctggagtatgtgaagaagctgggctacgtgacaggccacatctgggcctgccccccatctgaaggagatgactacatcttccactgccaccccccagaccagaagatccccaagcccaagaggctgcaggagtggtacaagaagatgctggacaaggcctttgctgagcgcatcatccatgactacaaggacatcttcaagcaggccacagaagatcggctgaccagcgccaaggagctgccctactttgaaggagacttctggcccaacgtgctggaggagagcatcaaggagctggagcaggaggaggaggagaggaagaaggaggagagcacagctgccagcgagaccacagaggtgttcttcgtcatccacctgcacgccggccctgtgatcaacaccctgccccccatcgtggaccctgaccccctgctgagctgtgacctgatggatggaagagatgccttcctgaccctggcccgggacaagcactgggagttcagcagcctgcggcgcagcaagtggagcaccctgtgcatgctggtggagctgcacacccagggccaggacagatttgtgtacacctgcaatgaatgcaagcaccacgtggagacccgctggcactgcaccgtgtgtgaagattatgacctgtgcatcaactgctacaacaccaagagccacgcccacaagatggtgaagtggggcctgggcctggatgatgagggcagcagccagggcgagccccagagcaagagcccccaggagagccggcggctgagcatccagcgctgcatccagagcctggtgcacgcctgccagtgcagaaatgccaactgcagcctgcccagctgccagaagatgaagagggtggtgcagcacaccaagggctgcaagaggaagaccaacggcggctgccctgtgtgcaagcagctgattgccctgtgctgctaccacgccaagcactgccaggagaacaagtgccctgtgcccttctgcctgaacatcaagcacaagctgcggcagcagcagatccagcaccggctgcagcaggcccagctgatgagaagaaggatggccaccatgaacaccagaaatgtgccccagcagagcctgcccagccccaccagcgcccctcctggcacccccacccagcagcccagcaccccccagaccccccagcccccagcccagccccagcccagccctgtgtccatgagccctgctggcttccccagcgtggcccggacccagccccccaccaccgtgtccacaggcaagcccaccagccaggtgcctgcccctcctcctccagcccagcccccacctgctgctgtggaggccgcccggcagatcgagcgggaggcccagcagcagcagcacctgtacagagtgaacatcaacaacagcatgcctcctggccgcacaggcatgggcaccccaggcagccagatggcccctgtgtccctgaatgtgccccggcccaaccaggtgtctggccctgtgatgcccagcatgcctcctggccagtggcagcaggcccccctgccccagcagcagcccatgcctggcctgcccaggcctgtgatctccatgcaggcccaggccgctgtggccggccccaggatgcccagcgtgcagcccccaagaagcatcagccccagcgccctgcaggacctgctgcggaccctgaagagccccagcagcccccagcagcagcagcaggtgctgaacatcctgaagagcaacccccagctgatggccgccttcatcaagcagaggacagccaagtatgtggccaaccagcccggcatgcagccccagcccggcctgcagagccagcccggcatgcagccccagcccggcatgcaccagcagcccagcctgcagaacctgaatgccatgcaggccggcgtgcccaggcctggggtgcccccccagcagcaggccatgggcggcctgaacccccagggccaggccctgaacatcatgaaccctggccacaaccccaacatggcctccatgaacccccagtaccgggagatgctgcggcggcagctgctgcagcagcagcagcagcagcagcagcagcagcagcagcagcagcagcagcagcagggcagcgctggcatggccggcggcatggccggccacggccagttccagcagccccagggccctgggggctaccccccagccatgcagcagcagcagaggatgcagcagcacctgcccctgcagggcagctccatgggccagatggccgcccagatgggccagctgggccagatgggccagcccggcctgggcgctgacagcacccccaacatccagcaggccctgcagcagaggatcctgcagcagcagcagatgaagcagcagatcggcagccctggccagcccaaccccatgagcccccagcagcacatgctgagcggccagccccaggccagccacctgcccggccagcagatcgccaccagcctgagcaaccaggtgcgcagccctgcccctgtgcagagcccccggccccagagccagcccccccacagcagccccagcccccgcatccagccccagcccagcccccaccacgtgagcccccagacaggcagcccccaccctggcctggccgtgaccatggccagcagcattgaccagggccacctgggcaaccctgagcagagcgccatgctgccccagctgaacacccccagccgcagcgccctgagcagcgagctgagcctggtgggggacaccaccggggacaccctggagaagtttgtggagggcctgtag

SEQ ID NO: 148552 - DNA, 7215 bp, synthetic construct
  misc_feature 1..7215: note = Description of Artificial Sequence: Synthetic coding sequence
  source 1..7215: mol_type = other DNA
atggccgagaacctgctggatggcccccccaaccccaagagggccaagctgagcagccctggcttcagcgccaatgacagcacagactttggcagcctgtttgacctggagaatgacctgcctgatgagctgatccccaatggaggagagctgggcctgctgaacagcggcaacctggtgcctgatgctgccagcaagcacaagcagctgtctgagctgctgcggggcggcagcggcagcagcatcaaccctggcattggaaatgtgtctgccagcagccctgtgcagcagggcctgggcggccaggcccagggccagcccaacagcgccaacatggccagcctgagcgccatgggcaagagccccctgagccagggcgacagcagcgcccccagcctgcccaagcaggccgccagcaccagcggccccaccccagctgccagccaggccctgaacccccaggcccagaagcaggtgggcctggccaccagcagccctgccaccagccagacaggccctggcatctgcatgaatgccaacttcaaccagacccaccctggcctgctgaacagcaacagcggccacagcctcatcaaccaggccagccagggccaggcccaggtgatgaatggcagcctgggcgccgccggccggggccgcggggccggcatgccctaccccaccccagccatgcagggcgccagcagctctgtgctggccgagaccctgacccaggtgagcccccagatgactggacatgctggcctgaacacagcccaggccggcggcatggccaagatgggcatcaccggcaacaccagccccttcggccagcccttcagccaggccggcggccagcccatgggcgccactggagtgaacccccagctggccagcaagcagagcatggtgaacagcctgcccaccttccccacagacatcaagaacacctctgtgaccaacgtgcccaacatgagccagatgcagacctctgtgggcatcgtgcccacccaggccatcgccaccggccccacagctgaccctgagaagaggaagctgatccagcagcagctggtgctgctgctgcacgcccacaagtgccagaggcgggagcaggccaacggggaggtgcgggcctgcagcctgccccactgcaggaccatgaagaatgtgctgaaccacatgacccactgccaggccggcaaggcctgccaggccatcctgggcagccctgccagcggcatccagaacaccatcggctctgtgggcaccggccagcagaatgccaccagcctgagcaaccccaaccccatcgaccccagctccatgcagagggcctatgctgccctgggcctgccctacatgaaccagccccagacccagctgcagccccaggtgcccggccagcagcctgcccagccccagacccaccagcagatgaggaccctgaaccccctgggcaacaaccccatgaacatcccagctgggggcatcaccacagaccagcagccccccaacctgatcagcgagagcgccctgcccaccagcctgggcgccaccaaccccctgatgaatgatggcagcaacagcggcaacatcggcaccctgagcaccatccccacagctgccccacccagcagcactggagtgaggaagggctggcatgaacatgtgacccaggacctgcggagccacctggtgcacaagctggtgcaggccatcttccccaccccagaccctgctgccctgaaggacaggaggatggagaacctggtggcctatgccaagaaggtggagggggacatgtatgaaagtgccaacagcagagatgagtactaccacctgctggccgagaagatctacaagatccagaaggagctggaggagaagagaagaagccggctgcacaagcagggcatcctgggcaaccagcctgccctgcctgcccctggggcccagccccctgtgatcccccaggcccagcctgtgcggcccccaaatggccccctgagcctgcctgtgaacaggatgcaggtgtcccagggcatgaacagcttcaaccccatgagcctgggcaatgtgcagctgccccaggcccccatgggccccagggctgccagccccatgaaccacagcgtgcagatgaacagcatgggctctgtgcccggcatggccatcagccccagcaggatgccccagccccccaacatgatgggcgcccacaccaacaacatgatggcccaggccccagcccagagccagttcctgccccagaaccagttccccagcagcagcggggccatgtctgtgggcatgggccagcccccagcccagacaggagtgtcccagggccaggtgcctggagctgccctgcccaaccccctgaacatgctgggcccccaggccagccagctgccctgcccccctgtgacccagagccccctgcaccccaccccacctccagccagcacagctgctggcatgcccagcctgcagcacaccaccccacctggcatgaccccaccccagcctgctgcccccacccagcccagcacccctgtgagcagcagcggccagacccccacccccaccccaggctctgtgcccagcgccacccagacccagagcacccccaccgtgcaggccgccgcccaggcccaggtgaccccccagccccagacccctgtgcagccccccagcgtggccaccccccagagcagccagcagcagcccacccctgtgcacgcccagcccccaggcacccccctgagccaggccgccgccagcattgacaacagagtgcccacccccagctctgtggccagcgctgagaccaacagccagcagcccggcccagatgtgcctgtgctggagatgaagacagagacccaggccgaggacacagagccagaccccggggagagcaagggggagcccaggtctgagatgatggaggaggacctgcagggcgccagccaggtgaaggaggagacagacattgctgagcagaagtctgagcccatggaggtggatgagaagaagccagaggtgaaggtggaggtgaaggaggaggaggagagcagcagcaatggaacagccagccagagcaccagccccagccagcccaggaagaagatcttcaagccagaggagctgcggcaggccctgatgcccaccctggaggccctgtaccggcaggaccctgagagcctgcccttccggcagcctgtggacccccagctgctgggcatcccagactactttgacatcgtgaagaaccccatggacctgagcaccatcaagaggaagctggacaccggccagtaccaggagccctggcagtatgtggatgatgtgtggctgatgttcaacaatgcctggctgtacaacaggaagaccagccgggtgtacaagttctgcagcaagctggccgaggtgtttgagcaggagattgatcctgtgatgcagagcctgggctactgctgcggcaggaaatatgagttcagcccccagaccctgtgctgctacggcaagcagctgtgcaccatccccagagatgctgcctactacagctaccagaaccgctaccacttctgtgagaagtgcttcacagagatccagggagaaaatgtgaccctgggagatgaccccagccagccccagaccaccatcagcaaggaccagtttgagaagaagaagaatgacaccctggaccctgagccctttgtggactgcaaggaatgtggcaggaagatgcaccagatctgtgtgctgcactatgacatcatctggcccagcggctttgtgtgtgacaactgcctgaagaagacaggccggcccaggaaagaaaacaagttcagcgccaagaggctgcagaccacccggctgggcaaccacctggaggacagagtgaacaagttcctgcggcggcagaaccaccctgaggccggggaggtgtttgtgcgggtggtggccagcagtgacaagacagtggaggtgaagccaggcatgaagagcagatttgtggacagcggggagatgtctgagagcttcccctaccgcaccaaggccctgtttgcctttgaggagattgatggagtggatgtgtgcttcttcggcatgcacgtgcaggagtatggcagtgactgccccccacccaacaccaggagagtgtacatctcctacctggacagcatccacttcttccggccccgctgcctgaggacagctgtgtaccacgagatcctgattggctacctggagtatgtgaagaagctgggctacgtgacaggccacatctgggcctgccccccatctgaaggagatgactacatcttccactgccaccccccagaccagaagatccccaagcccaagaggctgcaggagtggtacaagaagatgctggacaaggcctttgctgagcgcatcatccatgactacaaggacatcttcaagcaggccacagaggaccggctgaccagcgccaaggagctgccctactttgaaggagacttctggcccaacgtgctggaggagagcatcaaggagctggagcaggaggaggaggagaggaagaaggaggagagcacagctgccagcgagaccacagagggcagccagggcgacagcaagaatgccaagaagaagaacaacaagaagaccaacaagaacaagagcagcatcagccgggccaacaagaagaagcccagcatgcccaacgtgtccaatgacctgagccagaagctgtatgccaccatggagaagcacaaggaggtgttctttgtgatccacctgcatgctggccctgtgatcaacaccctgccccccatcgtggaccctgaccccctgctgagctgtgacctgatggatggaagagatgccttcctgaccctggcccgggacaagcactgggagttcagcagcctgcggcgcagcaagtggagcaccctgtgcatgctggtggagctgcacacccagggccaggacagatttgtgtacacctgcaatgaatgcaagcaccacgtggagacccgctggcactgcaccgtgtgtgaggactatgacctgtgcatcaactgctacaacaccaagagccacgcccacaagatggtgaagtggggcctgggcctggatgatgagggcagcagccagggcgagccccagagcaagagcccccaggagagccggcggctgagcatccagcgctgcatccagagcctggtgcacgcctgccagtgcagaaatgccaactgcagcctgcccagctgccagaagatgaagagggtggtgcagcacaccaagggctgcaagaggaagaccaatggaggctgccctgtgtgcaagcagctgattgccctgtgctgctaccacgccaagcactgccaggagaacaagtgccctgtgcccttctgcctgaacatcaagcacaagctgcggcagcagcagatccagcaccggctgcagcaggcccagctgatgagaagaaggatggccaccatgaacaccagaaatgtgccccagcagagcctgcccagccccaccagcgcccctcctggcacccccacccagcagcccagcaccccccagaccccccagcccccagcccagccccagcccagccctgtgtccatgagccctgctggcttccccagcgtggcccggacccagccccccaccaccgtgtccacaggcaagcccaccagccaggtgcctgcccctcctcctccagcccagcccccacctgctgctgtggaggccgcccggcagatcgagcgggaggcccagcagcagcagcacctgtacagagtgaacatcaacaacagcatgcctcctggccgcacaggcatgggcaccccaggcagccagatggcccctgtgtccctgaatgtgccccggcccaaccaggtgtctggccctgtgatgcccagcatgcctcctggccagtggcagcaggcccccctgccccagcagcagcccatgcctggcctgcccaggcctgtgatctccatgcaggcccaggccgctgtggccggccccaggatgcccagcgtgcagccccccaggagcatcagccccagcgccctgcaggacctgctgcggaccctgaagagccccagcagcccccagcagcagcagcaggtgctgaacatcctgaagagcaacccccagctgatggccgccttcatcaagcagaggacagccaagtatgtggccaaccagcccggcatgcagccccagcccggcctgcagagccagcccggcatgcagccccagcccggcatgcaccagcagcccagcctgcagaacctgaatgccatgcaggccggcgtgcccaggcctggggtgcccccccagcagcaggccatgggcggcctgaacccccagggccaggccctgaacatcatgaaccctggccacaaccccaacatggcctccatgaacccccagtaccgggagatgctgcggcggcagctgctgcagcagcagcagcagcagcagcagcagcagcagcagcagcagcagcagcagcagggcagcgctggcatggccggcggcatggccggccacggccagttccagcagccccagggccctgggggctaccccccagccatgcagcagcagcagaggatgcagcagcacctgcccctgcagggcagctccatgggccagatggccgcccagatgggccagctgggccagatgggccagcccggcctgggcgctgacagcacccccaacatccagcaggccctgcagcagaggatcctgcagcagcagcagatgaagcagcagatcggcagccctggccagcccaaccccatgagcccccagcagcacatgctgagcggccagccccaggccagccacctgcccggccagcagatcgccaccagcctgagcaaccaggtgcgcagccctgcccctgtgcagagcccccggccccagagccagcccccccacagcagccccagcccccgcatccagccccagcccagcccccaccacgtgagcccccagacaggcagcccccaccctggcctggccgtgaccatggccagcagcattgaccagggccacctgggcaaccctgagcagagcgccatgctgccccagctgaacacccccagccgcagcgccctgagcagcgagctgagcctggtgggggacaccactggagacaccctggagaagtttgtggagggcctgtag

SEQ ID NO: 148553 - DNA, 7419 bp, synthetic construct
  misc_feature 1..7419: note = Description of Artificial Sequence: Synthetic coding sequence
  source 1..7419: mol_type = other DNA
ctgcggggagctgtggccgtggccgagatctggcccccacctcctcctcctggcctgcggccccccagccccagcgccccagcccggcccctggccgcccgggcccggagcagccccagccagcctgctggcccccccacccctgtgcgggccctggccggccctgctgcccgggcccggggctgcttccgggagcaggtgaagatggccgagaacctgctggatggcccccccaaccccaagagggccaagctgagcagccctggcttcagcgccaatgacagcacagactttggcagcctgtttgacctggagaatgacctgcctgatgagctgatccccaatggaggagagctgggcctgctgaacagcggcaacctggtgcctgatgctgccagcaagcacaagcagctgtctgagctgctgcggggcggcagcggcagcagcatcaaccctggcattggaaatgtgtctgccagcagccctgtgcagcagggcctgggcggccaggcccagggccagcccaacagcgccaacatggccagcctgagcgccatgggcaagagccccctgagccagggcgacagcagcgcccccagcctgcccaagcaggccgccagcaccagcggccccaccccagctgccagccaggccctgaacccccaggcccagaagcaggtgggcctggccaccagcagccctgccaccagccagacaggccctggcatctgcatgaatgccaacttcaaccagacccaccctggcctgctgaacagcaacagcggccacagcctcatcaaccaggccagccagggccaggcccaggtgatgaatggcagcctgggcgccgccggccggggccgcggggccggcatgccctaccccaccccagccatgcagggcgccagcagctctgtgctggccgagaccctgacccaggtgagcccccagatgactggacatgctggcctgaacacagcccaggccggcggcatggccaagatgggcatcaccggcaacaccagccccttcggccagcccttcagccaggccggcggccagcccatgggcgccactggagtgaacccccagctggccagcaagcagagcatggtgaacagcctgcccaccttccccacagacatcaagaacacctctgtgaccaacgtgcccaacatgagccagatgcagacctctgtgggcatcgtgcccacccaggccatcgccaccggccccacagctgaccctgagaagaggaagctgatccagcagcagctggtgctgctgctgcacgcccacaagtgccagaggcgggagcaggccaacggggaggtgcgggcctgcagcctgccccactgcaggaccatgaagaatgtgctgaaccacatgacccactgccaggccggcaaggcctgccaggccatcctgggcagccctgccagcggcatccagaacaccatcggctctgtgggcaccggccagcagaatgccaccagcctgagcaaccccaaccccatcgaccccagctccatgcagagggcctatgctgccctgggcctgccctacatgaaccagccccagacccagctgcagccccaggtgcccggccagcagcctgcccagccccagacccaccagcagatgaggaccctgaaccccctgggcaacaaccccatgaacatcccagctgggggcatcaccacagaccagcagccccccaacctgatcagcgagagcgccctgcccaccagcctgggcgccaccaaccccctgatgaatgatggcagcaacagcggcaacatcggcaccctgagcaccatccccacagctgccccacccagcagcactggagtgaggaagggctggcatgaacatgtgacccaggacctgcggagccacctggtgcacaagctggtgcaggccatcttccccaccccagaccctgctgccctgaaggacaggaggatggagaacctggtggcctatgccaagaaggtggagggggacatgtatgaaagtgccaacagcagagatgagtactaccacctgctggccgagaagatctacaagatccagaaggagctggaggagaagagaagaagccggctgcacaagcagggcatcctgggcaaccagcctgccctgcctgcccctggggcccagccccctgtgatcccccaggcccagcctgtgcggcccccaaatggccccctgagcctgcctgtgaacaggatgcaggtgtcccagggcatgaacagcttcaaccccatgagcctgggcaatgtgcagctgccccaggcccccatgggccccagggctgccagccccatgaaccacagcgtgcagatgaacagcatgggctctgtgcccggcatggccatcagccccagcaggatgccccagccccccaacatgatgggcgcccacaccaacaacatgatggcccaggccccagcccagagccagttcctgccccagaaccagttccccagcagcagcggggccatgtctgtgggcatgggccagcccccagcccagacaggagtgtcccagggccaggtgcctggagctgccctgcccaaccccctgaacatgctgggcccccaggccagccagctgccctgcccccctgtgacccagagccccctgcaccccaccccacctccagccagcacagctgctggcatgcccagcctgcagcacaccaccccacctggcatgaccccaccccagcctgctgcccccacccagcccagcacccctgtgagcagcagcggccagacccccacccccaccccaggctctgtgcccagcgccacccagacccagagcacccccaccgtgcaggccgccgcccaggcccaggtgaccccccagccccagacccctgtgcagccccccagcgtggccaccccccagagcagccagcagcagcccacccctgtgcacgcccagcccccaggcacccccctgagccaggccgccgccagcattgacaacagagtgcccacccccagctctgtggccagcgctgagaccaacagccagcagcccggcccagatgtgcctgtgctggagatgaagacagagacccaggccgaggacacagagccagaccccggggagagcaagggggagcccaggtctgagatgatggaggaggacctgcagggcgccagccaggtgaaggaggagacagacattgctgagcagaagtctgagcccatggaggtggatgagaagaagccagaggtgaaggtggaggtgaaggaggaggaggagagcagcagcaatggaacagccagccagagcaccagccccagccagcccaggaagaagatcttcaagccagaggagctgcggcaggccctgatgcccaccctggaggccctgtaccggcaggaccctgagagcctgcccttccggcagcctgtggacccccagctgctgggcatcccagactactttgacatcgtgaagaaccccatggacctgagcaccatcaagaggaagctggacaccggccagtaccaggagccctggcagtatgtggatgatgtgtggctgatgttcaacaatgcctggctgtacaacaggaagaccagccgggtgtacaagttctgcagcaagctggccgaggtgtttgagcaggagattgatcctgtgatgcagagcctgggctactgctgcggcaggaaatatgagttcagcccccagaccctgtgctgctacggcaagcagctgtgcaccatccccagagatgctgcctactacagctaccagaaccgctaccacttctgtgagaagtgcttcacagagatccagggagaaaatgtgaccctgggagatgaccccagccagccccagaccaccatcagcaaggaccagtttgagaagaagaagaatgacaccctggaccctgagccctttgtggactgcaaggaatgtggcaggaagatgcaccagatctgtgtgctgcactatgacatcatctggcccagcggctttgtgtgtgacaactgcctgaagaagacaggccggcccaggaaagaaaacaagttcagcgccaagaggctgcagaccacccggctgggcaaccacctggaggacagagtgaacaagttcctgcggcggcagaaccaccctgaggccggggaggtgtttgtgcgggtggtggccagcagtgacaagacagtggaggtgaagccaggcatgaagagcagatttgtggacagcggggagatgtctgagagcttcccctaccgcaccaaggccctgtttgcctttgaggagattgatggagtggatgtgtgcttcttcggcatgcacgtgcaggagtatggcagtgactgccccccacccaacaccaggagagtgtacatctcctacctggacagcatccacttcttccggccccgctgcctgaggacagctgtgtaccacgagatcctgattggctacctggagtatgtgaagaagctgggctacgtgacaggccacatctgggcctgccccccatctgaaggagatgactacatcttccactgccaccccccagaccagaagatccccaagcccaagaggctgcaggagtggtacaagaagatgctggacaaggcctttgctgagcgcatcatccatgactacaaggacatcttcaagcaggccacagaggaccggctgaccagcgccaaggagctgccctactttgaaggagacttctggcccaacgtgctggaggagagcatcaaggagctggagcaggaggaggaggagaggaagaaggaggagagcacagctgccagcgagaccacagagggcagccagggcgacagcaagaatgccaagaagaagaacaacaagaagaccaacaagaacaagagcagcatcagccgggccaacaagaagaagcccagcatgcccaacgtgtccaatgacctgagccagaagctgtatgccaccatggagaagcacaaggaggtgttctttgtgatccacctgcatgctggccctgtgatcaacaccctgccccccatcgtggaccctgaccccctgctgagctgtgacctgatggatggaagagatgccttcctgaccctggcccgggacaagcactgggagttcagcagcctgcggcgcagcaagtggagcaccctgtgcatgctggtggagctgcacacccagggccaggacagatttgtgtacacctgcaatgaatgcaagcaccacgtggagacccgctggcactgcaccgtgtgtgaggactatgacctgtgcatcaactgctacaacaccaagagccacgcccacaagatggtgaagtggggcctgggcctggatgatgagggcagcagccagggcgagccccagagcaagagcccccaggagagccggcggctgagcatccagcgctgcatccagagcctggtgcacgcctgccagtgcagaaatgccaactgcagcctgcccagctgccagaagatgaagagggtggtgcagcacaccaagggctgcaagaggaagaccaatggaggctgccctgtgtgcaagcagctgattgccctgtgctgctaccacgccaagcactgccaggagaacaagtgccctgtgcccttctgcctgaacatcaagcacaagctgcggcagcagcagatccagcaccggctgcagcaggcccagctgatgagaagaaggatggccaccatgaacaccagaaatgtgccccagcagagcctgcccagccccaccagcgcccctcctggcacccccacccagcagcccagcaccccccagaccccccagcccccagcccagccccagcccagccctgtgtccatgagccctgctggcttccccagcgtggcccggacccagccccccaccaccgtgtccacaggcaagcccaccagccaggtgcctgcccctcctcctccagcccagcccccacctgctgctgtggaggccgcccggcagatcgagcgggaggcccagcagcagcagcacctgtacagagtgaacatcaacaacagcatgcctcctggccgcacaggcatgggcaccccaggcagccagatggcccctgtgtccctgaatgtgccccggcccaaccaggtgtctggccctgtgatgcccagcatgcctcctggccagtggcagcaggcccccctgccccagcagcagcccatgcctggcctgcccaggcctgtgatctccatgcaggcccaggccgctgtggccggccccaggatgcccagcgtgcagccccccaggagcatcagccccagcgccctgcaggacctgctgcggaccctgaagagccccagcagcccccagcagcagcagcaggtgctgaacatcctgaagagcaacccccagctgatggccgccttcatcaagcagaggacagccaagtatgtggccaaccagcccggcatgcagccccagcccggcctgcagagccagcccggcatgcagccccagcccggcatgcaccagcagcccagcctgcagaacctgaatgccatgcaggccggcgtgcccaggcctggggtgcccccccagcagcaggccatgggcggcctgaacccccagggccaggccctgaacatcatgaaccctggccacaaccccaacatggcctccatgaacccccagtaccgggagatgctgcggcggcagctgctgcagcagcagcagcagcagcagcagcagcagcagcagcagcagcagcagcagcagggcagcgctggcatggccggcggcatggccggccacggccagttccagcagccccagggccctgggggctaccccccagccatgcagcagcagcagaggatgcagcagcacctgcccctgcagggcagctccatgggccagatggccgcccagatgggccagctgggccagatgggccagcccggcctgggcgctgacagcacccccaacatccagcaggccctgcagcagaggatcctgcagcagcagcagatgaagcagcagatcggcagccctggccagcccaaccccatgagcccccagcagcacatgctgagcggccagccccaggccagccacctgcccggccagcagatcgccaccagcctgagcaaccaggtgcgcagccctgcccctgtgcagagcccccggccccagagccagcccccccacagcagccccagcccccgcatccagccccagcccagcccccaccacgtgagcccccagacaggcagcccccaccctggcctggccgtgaccatggccagcagcattgaccagggccacctgggcaaccctgagcagagcgccatgctgccccagctgaacacccccagccgcagcgccctgagcagcgagctgagcctggtgggggacaccactggagacaccctggagaagtttgtggagggcctgtag

SEQ ID NO: 148554 - DNA, 1782 bp, synthetic construct
  misc_feature 1..1782: note = Description of Artificial Sequence: Synthetic coding sequence
  source 1..1782: mol_type = other DNA
atggccaccagcaacaaccccaggaagttcagcgagaagatcgccctgcacaaccagaagcaggccgaggagacagctgcctttgaggaggtgatgaaggacctgagcctgacccgggccgcccggctgcagctgcagaagagccagtacctgcagctgggccccagccggggccagtactatggaggcagcctgcccaacgtgaaccagatcggcagcggcaccatggacctgcccttccagacccccttccagagcagcggcctggacaccagcaggaccaccaggcaccacggcctggtggacagagtgtaccgggagcggggccgcctgggcagcccccaccggcggcccctgtctgtggacaagcacggccggcaggccgacagctgcccctacggcaccatgtacctgagccccccagctgacacctcctggaggaggaccaacagcgacagcgccctgcaccagagcaccatgacccccacccagcctgagagcttcagcagcggcagccaggatgtgcaccagaagagggtgctgctgctgactgtgcccggcatggaggagaccaccagcgaggccgacaagaacctgagcaagcaggcctgggacaccaagaagacaggcagccggcccaagagctgtgaggtgcccggcatcaacatcttccccagcgctgaccaggagaacaccacagccctgatcccagccacccacaacacaggaggcagcctgcctgacctgaccaacatccacttccccagccccctgcccacccccctggaccctgaggagcccaccttccctgccctgagcagcagcagcagcacaggcaacctggccgccaacctgacccacctgggcatcggcggggccggccagggcatgagcaccccaggcagcagcccccagcacaggcctgctggggtgagccccctgagcctgagcacagaggcccggcggcagcaggccagccccaccctgagccccctgagccccatcacccaggccgtggccatggatgccctgagcctggagcagcagctgccctatgccttcttcacccaggccggcagccagcagcccccaccccagccccagcccccacctcctcctcctccagccagccagcagcccccacctcctcctccaccccaggcccctgtgcggctgcccccaggcggccccctgctgcccagcgccagcctgacccggggcccccagcccccacccctggccgtgacagtgcccagcagcctgccccagagccccccagaaaatcctggccagcccagcatgggcatcgacatcgccagcgccccagccctgcagcagtaccgcaccagcgctggcagccctgccaaccagagccccaccagccctgtgagcaaccagggcttcagccctggcagcagcccccagctggagcagttcaacatgatggagaatgccatcagcagcagcagcctgtacagccctggcagcaccctgaactacagccaggccgccatgatgggcctgaccggcagccacggcagcctgcctgacagccagcagctgggctacgccagccacagcggcatccccaacatcatcctgactgtgactggagagagcccccccagcctgagcaaggagctgaccagccaccggggccacctgcctgatggcccccctgtgtctggccatgctggcaccctgcccctgagcaggccagatggagccagccctgcccggggccggccctgcagcgtgccccggcagaggcccagcctgtag

SEQ ID NO: 148555 - DNA, 1905 bp, synthetic construct
  misc_feature 1..1905: note = Description of Artificial Sequence: Synthetic coding sequence
  source 1..1905: mol_type = other DNA
atggccaccagcaacaaccccaggaagttcagcgagaagatcgccctgcacaaccagaagcaggccgaggagacagctgcctttgaggaggtgatgaaggacctgagcctgacccgggccgcccggctgcagctgcagaagagccagtacctgcagctgggccccagccggggccagtactatggaggcagcctgcccaacgtgaaccagatcggcagcggcaccatggacctgcccttccagacccccttccagagcagcggcctggacaccagcaggaccaccaggcaccacggcctggtggacagagtgtaccgggagcggggccgcctgggcagcccccaccggcggcccctgtctgtggacaagcacggccggcaggccgacagctgcccctacggcaccatgtacctgagccccccagctgacacctcctggaggaggaccaacagcgacagcgccctgcaccagagcaccatgacccccacccagcctgagagcttcagcagcggcagccaggatgtgcaccagaagagggtgctgctgctgactgtgcccggcatggaggagaccaccagcgaggccgacaagaacctgagcaagcaggcctgggacaccaagaagacaggcagccggcccaagagctgtgaggtgcccggcatcaacatcttccccagcgctgaccaggagaacaccacagccctgatcccagccacccacaacacaggaggcagcctgcctgacctgaccaacatccacttccccagccccctgcccacccccctggaccctgaggagcccaccttccctgccctgagcagcagcagcagcacaggcaacctggccgccaacctgacccacctgggcatcggcggggccggccagggcatgagcaccccaggcagcagcccccagcacaggcctgctggggtgagccccctgagcctgagcacagaggcccggcggcagcaggccagccccaccctgagccccctgagccccatcacccaggccgtggccatggatgccctgagcctggagcagcagctgccctatgccttcttcacccaggccggcagccagcagcccccaccccagccccagcccccacctcctcctcctccagccagccagcagcccccacctcctcctccaccccaggcccctgtgcggctgcccccaggcggccccctgctgcccagcgccagcctgacccggggcccccagcccccacccctggccgtgacagtgcccagcagcctgccccagagccccccagaaaatcctggccagcccagcatgggcatcgacatcgccagcgccccagccctgcagcagtaccgcaccagcgctggcagccctgccaaccagagccccaccagccctgtgagcaaccagggcttcagccctggcagcagcccccagcacaccagcaccctgggctctgtgtttggagatgcctactatgagcagcagatggccgcccggcaggccaatgccctgagccaccagctggagcagttcaacatgatggagaatgccatcagcagcagcagcctgtacagccctggcagcaccctgaactacagccaggccgccatgatgggcctgaccggcagccacggcagcctgcctgacagccagcagctgggctacgccagccacagcggcatccccaacatcatcctgactgtgactggagagagcccccccagcctgagcaaggagctgaccagcagcctggccggcgtgggagatgtgtcctttgacagcgacagccagttccccctggatgagctgaagattgaccccctgaccctggatggcctgcacatgctgaatgaccctgacatggtgctggccgaccctgccacagaggacaccttcaggatggaccggctgtag

SEQ ID NO: 148556 - DNA, 1953 bp, synthetic construct
  misc_feature 1..1953: note = Description of Artificial Sequence: Synthetic coding sequence
  source 1..1953: mol_type = other DNA
atggccaccagcaacaaccccaggaagttcagcgagaagatcgccctgcacaaccagaagcaggccgaggagacagctgcctttgaggaggtgatgaaggacctgagcctgacccgggccgcccggctgcagctgcagaagagccagtacctgcagctgggccccagccggggccagtactatggaggcagcctgcccaacgtgaaccagatcggcagcggcaccatggacctgcccttccagcccagcggcttcctgggggaggccctggccgccgcccctgtgtccctgacccccttccagagcagcggcctggacaccagcaggaccaccaggcaccacggcctggtggacagagtgtaccgggagcggggccgcctgggcagcccccaccggcggcccctgtctgtggacaagcacggccggcaggccgacagctgcccctacggcaccatgtacctgagccccccagctgacacctcctggaggaggaccaacagcgacagcgccctgcaccagagcaccatgacccccacccagcctgagagcttcagcagcggcagccaggatgtgcaccagaagagggtgctgctgctgactgtgcccggcatggaggagaccaccagcgaggccgacaagaacctgagcaagcaggcctgggacaccaagaagacaggcagccggcccaagagctgtgaggtgcccggcatcaacatcttccccagcgctgaccaggagaacaccacagccctgatcccagccacccacaacacaggaggcagcctgcctgacctgaccaacatccacttccccagccccctgcccacccccctggaccctgaggagcccaccttccctgccctgagcagcagcagcagcacaggcaacctggccgccaacctgacccacctgggcatcggcggggccggccagggcatgagcaccccaggcagcagcccccagcacaggcctgctggggtgagccccctgagcctgagcacagaggcccggcggcagcaggccagccccaccctgagccccctgagccccatcacccaggccgtggccatggatgccctgagcctggagcagcagctgccctatgccttcttcacccaggccggcagccagcagcccccaccccagccccagcccccacctcctcctcctccagccagccagcagcccccacctcctcctccaccccaggcccctgtgcggctgcccccaggcggccccctgctgcccagcgccagcctgacccggggcccccagcccccacccctggccgtgacagtgcccagcagcctgccccagagccccccagaaaatcctggccagcccagcatgggcatcgacatcgccagcgccccagccctgcagcagtaccgcaccagcgctggcagccctgccaaccagagccccaccagccctgtgagcaaccagggcttcagccctggcagcagcccccagcacaccagcaccctgggctctgtgtttggagatgcctactatgagcagcagatggccgcccggcaggccaatgccctgagccaccagctggagcagttcaacatgatggagaatgccatcagcagcagcagcctgtacagccctggcagcaccctgaactacagccaggccgccatgatgggcctgaccggcagccacggcagcctgcctgacagccagcagctgggctacgccagccacagcggcatccccaacatcatcctgactgtgactggagagagcccccccagcctgagcaaggagctgaccagcagcctggccggcgtgggagatgtgtcctttgacagcgacagccagttccccctggatgagctgaagattgaccccctgaccctggatggcctgcacatgctgaatgaccctgacatggtgctggccgaccctgccacagaggacaccttcaggatggaccggctgtag

SEQ ID NO: 148557 - DNA, 2082 bp, synthetic construct
  misc_feature 1..2082: note = Description of Artificial Sequence: Synthetic coding sequence
  source 1..2082: mol_type = other DNA
atggccaccagcggggccaatggacctggcagcgccacagccagcgccagcaaccccaggaagttcagcgagaagatcgccctgcagaagcagaggcaggccgaggagacagctgcctttgaggaggtgatgatggacatcggcagcacccggctgcaggcccagaagctgcggctggcctacaccaggagcagccactatggaggcagcctgcccaacgtgaaccagatcggcagcggcctggccgagttccagagccccctgcacagccccctggacagcagccgcagcaccaggcaccacggcctggtggagcgggtgcagagggaccccaggaggatggtgagccccctgcggcgctacaccaggcacatcgacagcagcccctacagccctgcctacctgagccccccacctgagagctcctggaggaggaccatggcctggggcaacttccctgctgagaagggccagctgttccggctgcccagcgccctgaacagaaccagcagtgacagcgccctgcacacctctgtgatgaaccccagcccccaggacacctacccaggccccaccccacccagcatcctgcccagccggcggggcggcatcctggatggagagatggaccccaaggtgcctgccatcgaggagaacctgctggatgacaagcacctgctgaagccctgggatgccaagaagctgagcagcagcagcagccggcccaggagctgtgaggtgcccggcatcaacatcttccccagcccagaccagcctgccaacgtgcctgtgctgcccccagccatgaacacaggaggcagcctgcctgacctgaccaacctgcacttccccccacccctgcccacccccctggaccctgaggagacagcctaccccagcctgagcggcggcaacagcaccagcaacctgacccacaccatgacccacctgggcatcagccggggcatgggcctgggccctggctatgatgcccctggcctgcacagccccctgagccaccccagcctgcagagcagcctgagcaaccccaacctgcaggccagcctgagcagcccccagccccagctgcagggcagccacagccaccccagcctgcctgccagcagcctggcccggcacgtgctgcccaccaccagcctgggccaccccagcctgagcgccccagccctgagcagcagcagcagcagcagcagcaccagcagccctgtgctgggcgcccccagctacccagccagcacccctggggccagcccccaccaccggcgggtgcccctgagccccctgagcctgctggccggccctgcagatgcccggcgcagccagcagcagctgcccaagcagttcagccccaccatgagccccaccctgagcagcatcacccagggcgtgcccctggacaccagcaagctgagcacagaccagaggctgcccccctacccctacagcagccccagcctggtgctgcccacccagccccacacccccaagagcctgcagcagcccggcctgcccagccagagctgcagcgtgcagagcagcggcggccagcccccaggccggcagagccactacggcaccccctacccacctggccccagcggccacggccagcagagctaccaccggcccatgtctgacttcaacctgggcaacctggagcagttctccatggagagccccagcgccagcctggtgctggaccccccaggcttcagcgagggccctggcttcctgggcggggagggccccatgggcggcccccaggacccccacaccttcaaccaccagaacctgacccactgcagcagacatggcagcggccccaacatcatcctgaccggggacagcagccctggcttcagcaaggagattgctgctgccctggccggcgtgcccggctttgaggtgtctgctgctggcctggagctgggcctgggcctggaggatgagctgaggatggagcccctgggcctggagggcctgaacatgctgagtgacccctgtgccctgctgcctgaccctgctgtggaggagagcttcagaagtgaccggctgcagtag

SEQ ID NO: 148558 - DNA, 1860 bp, synthetic construct
  misc_feature 1..1860: note = Description of Artificial Sequence: Synthetic coding sequence
  source 1..1860: mol_type = other DNA
atggccgccagccctggcagcggcagcgccaaccccaggaagttcagcgagaagatcgccctgcacacccagaggcaggccgaggagacccgggcctttgagcagctgatgacagacctgaccctgagccgggtgcagttccagaagctgcagcagctgcggctgacccagtaccatggaggcagcctgcccaacgtgtcccagctgcggagcagcgccagcgagttccagcccagcttccaccaggccgacaacgtgcggggcaccaggcaccacggcctggtggagcggcccagcaggaaccgcttccaccccctgcaccggcgcagcggggacaagccaggccggcagtttgatggcagcgcctttggagccaactacagcagccagcccctggatgagagctggccccggcagcagcccccctggaaggatgagaagcaccctggcttccggctgaccagcgccctgaacagaaccaacagcgacagcgccctgcacaccagcgccctgagcaccaagccccaggacccctatggaggcggcggccagagcgcctggccagccccctacatgggcttctgtgatggagagaacaacggccacggggaggtggccagcttccctggccccctgaaggaggagaacctgctgaatgtgcccaagcccctgcccaagcagctgtgggagaccaaggagatccagagcctgagcggccggcccaggagctgtgatgtgggcggcggcaatgccttcccccacaacggccagaacctgggcctgagccccttcctgggcaccctgaacacaggaggcagcctgcctgacctgaccaacctgcactacagcacccccctgcctgccagcctggacaccacagaccaccacttcggctccatgtctgtgggcaacagcgtgaacaacatcccagctgccatgacccacctgggcatccgcagcagcagcggcctgcagagcagccgcagcaaccccagcatccaggccaccctgaacaagacagtgctgagcagcagcctgaacaaccacccccagacctctgtgcccaatgccagcgccctgcaccccagcctgcggctcttcagcctgagcaaccccagcctgagcaccaccaacctgagcggccccagcagaagacggcagccccctgtgagccccctgaccctgagccctggccctgaggcccaccagggcttcagccggcagctgagcagcaccagccccctggccccctaccccaccagccagatggtgtccagtgacaggagccagctgtccttcctgcccacagaggcccaggcccaggtgagccccccaccaccctacccagccccccaggagctgacccagcccctgctgcagcagccccgggcccctgaggccccagcccagcagccccaggccgccagcagcctgccccagagcgacttccagctgctgcctgcccagggcagcagcctgaccaacttcttcccagatgtgggctttgaccagcagagcatgaggcctggccctgccttcccccagcaggtgcccctggtgcagcagggcagccgggagctgcaggacagcttccacctgcggcccagcccctacagcaactgtggcagcctgcccaacaccatcctgcctgaggacagcagcaccagcctcttcaaggacctgaacagcgccctggccggcctgcctgaggtgtccctgaatgtggacacccccttccccctggaggaggagctgcagatcgagcccctgagcctggatggcctgaacatgctgagtgacagctccatgggcctgctggaccccagcgtggaggagaccttccgggctgaccggctgtag

SEQ ID NO: 148559 - DNA, 1857 bp, synthetic construct
  misc_feature 1..1857: note = Description of Artificial Sequence: Synthetic coding sequence
  source 1..1857: mol_type = other DNA
atggccgccagccctggcagcggcagcgccaaccccaggaagttcagcgagaagatcgccctgcacacccagaggcaggccgaggagacccgggcctttgagcagctgatgacagacctgaccctgagccgggtgcagttccagaagctgcagcagctgcggctgacccagtaccatggaggcagcctgcccaacgtgtcccagctgcggagcagcgccagcgagttccagcccagcttccaccaggccgacaacgtgcggggcaccaggcaccacggcctggtggagcggcccagcaggaaccgcttccaccccctgcaccggcgcagcggggacaagccaggccggcagtttgatggcagcgcctttggagccaactacagcagccagcccctggatgagagctggccccggcagcagcccccctggaaggatgagaagcaccctggcttccggctgaccagcgccctgaacagaaccaacagcgacagcgccctgcacaccagcgccctgagcaccaagccccaggacccctatggaggcggcggccagagcgcctggccagccccctacatgggcttctgtgatggagagaacaacggccacggggaggtggccagcttccctggccccctgaaggaggagaacctgctgaatgtgcccaagcccctgcccaagcagctgtgggagaccaaggagatccagagcctgagcggccggcccaggagctgtgatgtgggcggcggcaatgccttcccccacaacggccagaacctgggcctgagccccttcctgggcaccctgaacacaggaggcagcctgcctgacctgaccaacctgcactacagcacccccctgcctgccagcctggacaccacagaccaccacttcggctccatgtctgtgggcaacagcgtgaacaacatcccagctgccatgacccacctgggcatccgcagcagcagcggcctgcagagcagccgcagcaaccccagcatccaggccaccctgaacaagacagtgctgagcagcagcctgaacaaccacccccagacctctgtgcccaatgccagcgccctgcaccccagcctgcggctcttcagcctgagcaaccccagcctgagcaccaccaacctgagcggccccagcagaagacggcagccccctgtgagccccctgaccctgagccctggccctgaggcccaccagggcttcagccggcagctgagcagcaccagccccctggccccctaccccaccagccagatggtgtccagtgacaggagccagctgtccttcctgcccacagaggcccaggcccaggtgagccccccaccaccctacccagccccccaggagctgacccagcccctgctgcagcagccccgggcccctgaggccccagcccagcagccccaggccgccagcagcctgccccagagcgacttccagctgctgcctgcccagggcagcagcctgaccaacttcttcccagatgtgggctttgaccagcagagcatgaggcctggccctgccttcccccagcaggtgcccctggtgcagcagggcagccgggagctgcaggacagcttccacctgcggcccagcccctacagcaactgtggcagcctgcccaacaccatcctgcctgacagcagcaccagcctcttcaaggacctgaacagcgccctggccggcctgcctgaggtgtccctgaatgtggacacccccttccccctggaggaggagctgcagatcgagcccctgagcctggatggcctgaacatgctgagtgacagctccatgggcctgctggaccccagcgtggaggagaccttccgggctgaccggctgtag

SEQ ID NO: 148560 - DNA, 1749 bp, synthetic construct
  misc_feature 1..1749: note = Description of Artificial Sequence: Synthetic coding sequence
  source 1..1749: mol_type = other DNA
atgacagacctgaccctgagccgggtgcagttccagaagctgcagcagctgcggctgacccagtaccatggaggcagcctgcccaacgtgtcccagctgcggagcagcgccagcgagttccagcccagcttccaccaggccgacaacgtgcggggcaccaggcaccacggcctggtggagcggcccagcaggaaccgcttccaccccctgcaccggcgcagcggggacaagccaggccggcagtttgatggcagcgcctttggagccaactacagcagccagcccctggatgagagctggccccggcagcagcccccctggaaggatgagaagcaccctggcttccggctgaccagcgccctgaacagaaccaacagcgacagcgccctgcacaccagcgccctgagcaccaagccccaggacccctatggaggcggcggccagagcgcctggccagccccctacatgggcttctgtgatggagagaacaacggccacggggaggtggccagcttccctggccccctgaaggaggagaacctgctgaatgtgcccaagcccctgcccaagcagctgtgggagaccaaggagatccagagcctgagcggccggcccaggagctgtgatgtgggcggcggcaatgccttcccccacaacggccagaacctgggcctgagccccttcctgggcaccctgaacacaggaggcagcctgcctgacctgaccaacctgcactacagcacccccctgcctgccagcctggacaccacagaccaccacttcggctccatgtctgtgggcaacagcgtgaacaacatcccagctgccatgacccacctgggcatccgcagcagcagcggcctgcagagcagccgcagcaaccccagcatccaggccaccctgaacaagacagtgctgagcagcagcctgaacaaccacccccagacctctgtgcccaatgccagcgccctgcaccccagcctgcggctcttcagcctgagcaaccccagcctgagcaccaccaacctgagcggccccagcagaagacggcagccccctgtgagccccctgaccctgagccctggccctgaggcccaccagggcttcagccggcagctgagcagcaccagccccctggccccctaccccaccagccagatggtgtccagtgacaggagccagctgtccttcctgcccacagaggcccaggcccaggtgagccccccaccaccctacccagccccccaggagctgacccagcccctgctgcagcagccccgggcccctgaggccccagcccagcagccccaggccgccagcagcctgccccagagcgacttccagctgctgcctgcccagggcagcagcctgaccaacttcttcccagatgtgggctttgaccagcagagcatgaggcctggccctgccttcccccagcaggtgcccctggtgcagcagggcagccgggagctgcaggacagcttccacctgcggcccagcccctacagcaactgtggcagcctgcccaacaccatcctgcctgacagcagcaccagcctcttcaaggacctgaacagcgccctggccggcctgcctgaggtgtccctgaatgtggacacccccttccccctggaggaggagctgcagatcgagcccctgagcctggatggcctgaacatgctgagtgacagctccatgggcctgctggaccccagcgtggaggagaccttccgggctgaccggctgtag

SEQ ID NO: 148561 - DNA, 672 bp, synthetic construct
  misc_feature 1..672: note = Description of Artificial Sequence: Synthetic coding sequence
  source 1..672: mol_type = other DNA
atgacctggaggcaccacgtgcggctgctcttcaccgtgtccctggccctgcagatcatcaacctgggcaacagctaccagcgggagaagcacaacggcggccgggaggaggtgaccaaggtggccacccagaagcaccggcagagccccctgaactggaccagcagccactttggagaggtgacaggcagcgctgagggctggggccctgaggagcccctgccctacagccgggccttcggggagggcgccagcgcccggccccgctgctgcagaaatggaggcacctgtgtgctgggcagcttctgtgtgtgcccagcccacttcaccggccgctactgtgaacatgaccagaggagaagtgaatgtggggccctggagcacggggcctggaccctgcgggcctgccacctgtgccgctgcatctttggagccctgcactgcctgcccctgcagaccccagacagatgtgaccccaaggacttcctggccagccacgcccacggccccagcgctgggggcgcccccagcctgctgctgctgctgccctgtgccctgctgcaccggctgctgcggccagatgccccagcccaccccaggagcctggtgcccagcgtgctgcagcgggagcggcggccctgtggccggcccggcctgggccaccggctgtag

SEQ ID NO: 148562 - DNA, 2511 bp, synthetic construct
  misc_feature 1..2511: note = Description of Artificial Sequence: Synthetic coding sequence
  source 1..2511: mol_type = other DNA
atgacagccaccgtggagaacctgaccttccagaaggacaccctgggcaatgctgtggacaagaacagaagacatggcagcacagagcccctggtgctggcctggagcagccagttccggcggctgacctggggctgtgccctggatgccctgcacaggagcccctgtgtggccgccagccagcacggcgtgacccacctgatccgcagcagcaggaccccccacagcacccgctgcaggaaggaggatgcccagcccggccaccacggcaatggagctgcctctgtgacagcccaggcccggggccagaggtctgtgctgcaggtgcccctgcctgtgcccaggagctgcctcttcagcgagagctttgtggtgtctgtgagcagccagagccgcttcctggcctctgtgcccggcaccggggtgcagaggagcacagctgctgacatggccgccagcacagctgctgggaagcagaggatccccaaggtggccaaggtgaagaacaaggccccagctgaggtgcagatcacagctgagcagctgctgcgggaggccaaggagcgggagctggagctgctgcccccaccaccccagcagaagatcacagatgaggaggagctgaatgactacaagctgaggaagaggaagacctttgaggacaacatcaggaagaacagaactgtcatcagcaactggatcaagtatgcccagtgggaggagagcctgaaggagatccagagggcccggagcatctatgagcgggccctggatgtggactacagaaacatcaccctgtggctgaagtatgcagagatggagatgaagaaccggcaggtgaaccacgccaggaacatctgggaccgggccatcaccaccctgccccgggtgaaccagttctggtacaagtacacctacatggaggagatgctgggcaatgtggccggggcccggcaggtgtttgagcgctggatggagtggcagcctgaggagcaggcctggcacagctacatcaactttgagctgcgctacaaggaggtggaccgggcccggaccatctatgaaagatttgtgctggtgcacccagatgtgaagaactggatcaagtatgccaggtttgaggagaagcacgcctactttgcccacgccaggaaggtgtatgaaagagctgtggagttctttggagatgagcacatggatgagcacctgtatgtggcctttgccaagtttgaggagaaccagaaggagtttgagcgggtgcgggtcatctacaagtatgccctggaccgcatcagcaagcaggatgcccaggagctgttcaagaactacaccatctttgagaagaagtttggagacagaagaggaattgaggacatcatcgtgtccaagaggcgcttccagtatgaggaggaggtgaaggccaacccccacaactatgatgcctggtttgactacctgcggctggtggagagtgatgctgaggccgaggccgtgcgggaggtgtatgaaagagccatcgccaacgtgccccccatccaggagaagaggcactggaagcgctacatctacctgtggatcaactatgccctgtatgaggagctggaggccaaggaccctgagaggacccggcaggtgtaccaggccagcctggagctgatcccccacaagaagttcacctttgccaagatgtggatcctgtatgcccagtttgagatccggcagaagaacctgagcctggcccggcgggccctgggcaccagcatcggcaagtgccccaagaacaagctgttcaaggtgtacatcgagctggagctgcagctgcgggagtttgaccgctgcaggaagctgtatgagaagttcctggagtttggacctgagaactgcacctcctggatcaagtttgctgagctggagaccatcctgggggacatcgaccgggcccgggccatctatgagctggccatcagccagccccggctggacatgcctgaggtgctgtggaagagctacatcgactttgaaattgagcaggaggagacagagaggaccaggaacctgtaccgccgcctgctgcagaggacccagcacgtgaaggtgtggatcagctttgcccagtttgagctgagcagcggcaaggagggcagcctgaccaagtgccggcagatctatgaggaggccaacaagaccatgaggaactgtgaggagaaggaggagcggctgatgctgctggagagctggaggagctttgaggaggagtttggaacagccagtgacaaggagcgggtggacaagctgatgcctgagaaggtgaagaagaggaggaaggtgcagacagatgatggcagtgatgctggctgggaggagtactttgactacatcttcccagaagatgctgccaaccagcccaacctgaagctgctggccatggccaagctgtggaagaagcagcagcaggagaaggaggatgctgagcaccacccagatgaagatgtggatgagagcgagagctag

SEQ ID NO: 148563 - DNA, 2547 bp, synthetic construct
  misc_feature 1..2547: note = Description of Artificial Sequence: Synthetic coding sequence
  source 1..2547: mol_type = other DNA
atgacagccaccgtggagaacctgaccttccagaaggacaccctgggcaatgctgtggacaagaacaccagccggctggagctgcggagctacagcctggccggcagacatggcagcacagagcccctggtgctggcctggagcagccagttccggcggctgacctggggctgtgccctggatgccctgcacaggagcccctgtgtggccgccagccagcacggcgtgacccacctgatccgcagcagcaggaccccccacagcacccgctgcaggaaggaggatgcccagcccggccaccacggcaatggagctgcctctgtgacagcccaggcccggggccagaggtctgtgctgcaggtgcccctgcctgtgcccaggagctgcctcttcagcgagagctttgtggtgtctgtgagcagccagagccgcttcctggcctctgtgcccggcaccggggtgcagaggagcacagctgctgacatggccgccagcacagctgctgggaagcagaggatccccaaggtggccaaggtgaagaacaaggccccagctgaggtgcagatcacagctgagcagctgctgcgggaggccaaggagcgggagctggagctgctgcccccaccaccccagcagaagatcacagatgaggaggagctgaatgactacaagctgaggaagaggaagacctttgaggacaacatcaggaagaacagaactgtcatcagcaactggatcaagtatgcccagtgggaggagagcctgaaggagatccagagggcccggagcatctatgagcgggccctggatgtggactacagaaacatcaccctgtggctgaagtatgcagagatggagatgaagaaccggcaggtgaaccacgccaggaacatctgggaccgggccatcaccaccctgccccgggtgaaccagttctggtacaagtacacctacatggaggagatgctgggcaatgtggccggggcccggcaggtgtttgagcgctggatggagtggcagcctgaggagcaggcctggcacagctacatcaactttgagctgcgctacaaggaggtggaccgggcccggaccatctatgaaagatttgtgctggtgcacccagatgtgaagaactggatcaagtatgccaggtttgaggagaagcacgcctactttgcccacgccaggaaggtgtatgaaagagctgtggagttctttggagatgagcacatggatgagcacctgtatgtggcctttgccaagtttgaggagaaccagaaggagtttgagcgggtgcgggtcatctacaagtatgccctggaccgcatcagcaagcaggatgcccaggagctgttcaagaactacaccatctttgagaagaagtttggagacagaagaggaattgaggacatcatcgtgtccaagaggcgcttccagtatgaggaggaggtgaaggccaacccccacaactatgatgcctggtttgactacctgcggctggtggagagtgatgctgaggccgaggccgtgcgggaggtgtatgaaagagccatcgccaacgtgccccccatccaggagaagaggcactggaagcgctacatctacctgtggatcaactatgccctgtatgaggagctggaggccaaggaccctgagaggacccggcaggtgtaccaggccagcctggagctgatcccccacaagaagttcacctttgccaagatgtggatcctgtatgcccagtttgagatccggcagaagaacctgagcctggcccggcgggccctgggcaccagcatcggcaagtgccccaagaacaagctgttcaaggtgtacatcgagctggagctgcagctgcgggagtttgaccgctgcaggaagctgtatgagaagttcctggagtttggacctgagaactgcacctcctggatcaagtttgctgagctggagaccatcctgggggacatcgaccgggcccgggccatctatgagctggccatcagccagccccggctggacatgcctgaggtgctgtggaagagctacatcgactttgaaattgagcaggaggagacagagaggaccaggaacctgtaccgccgcctgctgcagaggacccagcacgtgaaggtgtggatcagctttgcccagtttgagctgagcagcggcaaggagggcagcctgaccaagtgccggcagatctatgaggaggccaacaagaccatgaggaactgtgaggagaaggaggagcggctgatgctgctggagagctggaggagctttgaggaggagtttggaacagccagtgacaaggagcgggtggacaagctgatgcctgagaaggtgaagaagaggaggaaggtgcagacagatgatggcagtgatgctggctgggaggagtactttgactacatcttcccagaagatgctgccaaccagcccaacctgaagctgctggccatggccaagctgtggaagaagcagcagcaggagaaggaggatgctgagcaccacccagatgaagatgtggatgagagcgagagctag

SEQ ID NO: 148564 - DNA, 7026 bp, synthetic construct
  misc_feature 1..7026: note = Description of Artificial Sequence: Synthetic coding sequence
  source 1..7026: mol_type = other DNA
atgaagaacatctactgcctgatccccaagctggtgaactttgccaccctgggctgcctgtggatctctgtggtgcagtgcaccgtgctgaacagctgcctgaagagctgtgtgaccaacctgggccagcagctggacctgggcaccccccacaacctgtctgagccctgcatccagggctgccacttctggaacagcgtggaccagaagaactgtgccctgaagtgcaatgacacctacgccaccgtgtgtgagcgggagagctgtgaggtgggctgcagcagcgctgagggcgcctatgaggaggaggtgctggagaatgctgacctgcccacagccccctttgccagcagcatcggcagccacaacatgaccctgcgctggaagagcgccaacttcagcggcgtgaagtacatcatccagtggaagtatgcccagctgctgggctcctggacctacaccaagacagtgtcccggcccagctatgtggtgaagcccctgcaccccttcacagagtacatcttccgggtggtgtggatcttcaccgcccagctgcagctgtacagcccccccagccccagctaccgcacccacccccacggcgtgcctgagacagcccccctcatccggaacatcgagagcagcagcccagacacagtggaggtgtcctgggaccccccccagtttcctgggggccccatcctgggctacaacctgcggctcatcagcaagaaccagaagctggatgctggcacccagaggaccagcttccagttctacagcaccctgcccaacaccatctaccgcttcagcattgctgctgtgaatgaggtgggggagggccctgaggccgagagcagcatcaccaccagcagcagcgctgtgcagcaggaggagcagtggctgttcctgagcaggaagaccagcctgaggaagaggagcctgaagcacctggtggatgaggcccactgcctgcggctggatgccatctaccacaacatcaccggcatctctgtggatgtgcaccagcagatcgtgtacttcagcgagggcaccctcatctgggccaagaaggccgccaacatgtctgatgtgtctgacctgcgcatcttctaccggggcagcggcctcatcagcagcatcagcattgactggctgtaccagaggatgtacttcatcatggatgagctggtgtgtgtgtgtgacctggagaactgcagcaacatcgaggagatcaccccacccagcatcagcgccccccagaagatcgtggccgacagctacaacggctacgtgttctacctgctgagagatggcatctacagagctgacctgcctgtgcccagcggccgctgtgccgaggccgtgcgcatcgtggagagctgcaccctgaaggactttgccatcaagccccaggccaagaggatcatctacttcaatgacacagcccaggtgttcatgagcaccttcctggatggcagcgccagccacctgatcctgccccgcatcccctttgctgatgtgaagagctttgcctgtgagaacaatgacttcctggtgacagatggcaaggtgatcttccagcaggatgccctgtccttcaatgagttcatcgtgggctgtgacctgagccacatcgaggagtttggatttggaaacctggtgatcttcggcagcagcagccagctgcaccccctgcccggccggccccaggagctgtctgtgctgtttggcagccaccaggccctggtgcagtggaagcccccagccctggccatcggggccagccccagcgcctggcagaactggacctatgaggtgaaggtgtccacccaggaccccccagaggtgacccacatcttcctgaacatcagcggcaccatgctgaatgtgcctgagctgcagagcgccatgaagtacaaggtgtctgtgcgggccagcagccccaagaggcctggcccctggagcgagcccagcgtgggcaccaccctggtgcctgccagcgagccccccttcatcatggctgtgaaggaggatggcctgtggagcaagcccctgaacagctttggacctggagagttcctgagcagtgacattggaaatgtgtctgacatggactggtacaacaacagcctgtactacagcgacaccaagggagatgtgtttgtgtggctgctgaatggaacagacatcagcgagaactaccacctgcccagcattgctggagctggggccctggcctttgagtggctgggccacttcctgtactgggccggcaagacctacgtgatccagaggcagagcgtgctgaccggccacacagacatcgtgacccacgtgaagctgctggtgaatgacatggtggtggacagcgtgggcggctacctgtactggaccaccctgtacagcgtggagagcacccggctgaatggagagagcagcctggtgctgcagacccagccctggttcagcggcaagaaggtgattgccctgaccctggacctgagtgatggcctgctgtactggctggtgcaggacagccagtgcatccacctgtacacagctgtgctgcggggccagagcactggagacaccaccatcacagaatttgctgcctggagcaccagcgagatcagccagaatgccctgatgtactacagcggccgcctcttctggatcaatggcttccgcatcatcaccacccaggagatcggccagaagacctctgtgtctgtgctggagcccgcccgcttcaaccagttcaccatcatccagaccagcctgaagcccctgcccggcaacttctccttcacccccaaggtgatcccagattctgtgcaggagagcagcttcagaattgagggcaatgccagcagcttccagatcctgtggaatggacctcctgctgtggactggggcgtggtgttctacagcgtggagttcagcgcccacagcaagttcctggccagcgagcagcacagcctgcccgtcttcaccgtggagggcctggagccctatgccctcttcaacctgtctgtgaccccctacacctactggggcaagggccccaagaccagcctgagcctgcgggcccctgagaccgtgcccagcgcccctgagaacccccgcatcttcatcctgcccagcggcaagtgctgcaacaagaatgaggtggtggtggagttccgctggaacaagcccaagcatgaaaatggagtgctgaccaagtttgagatcttctacaacatcagcaaccagagcatcaccaacaagacctgtgaggactggattgctgtgaatgtgacccccagcgtgatgtccttccagctggagggcatgagcccccgctgcttcatcgccttccaggtgcgggccttcaccagcaaaggacctggcccctatgcagatgtggtgaagagcaccaccagcgagatcaaccccttcccccacctgatcaccctgctgggcaacaagatcgtgttcctggacatggaccagaaccaggtggtgtggaccttctctgctgagagggtcatctctgctgtgtgctacacagctgacaatgagatgggctactatgcagagggggacagcctcttcctgctgcacctgcacaacagaagcagcagcgagctgttccaggacagcctggtgtttgacatcaccgtcatcaccatcgactggatcagccgccacctgtactttgccctgaaggagagccagaatggcatgcaggtgtttgatgtggacctggagcacaaggtgaagtacccccgggaggtgaagatccacaacagaaacagcaccatcatctccttctctgtgtaccccctgctgagccggctgtactggacagaggtgagcaactttggctaccagatgttctactacagcatcatcagccacaccctgcaccgcatcctgcagcccacagccaccaaccagcagaacaagaggaaccagtgcagctgcaatgtgacagaatttgagctgagcggggccatggccatcgacaccagcaacctggagaagcccctcatctactttgccaaggcccaggagatctgggccatggacctggagggctgccagtgctggagggtcatcaccgtgcctgccatgctgggcaagaccctggtgtccctgactgtggatggagacctgatctactggatcatcacagccaaggacagcacccagatctaccaggccaagaagggaaatggagccatcgtgtcccaggtgaaggccctgcggagccgccacatcctggcctacagctctgtgatgcagcccttcccagacaaggccttcctgagcctggccagtgacacagtggagcccaccatcctgaatgccaccaacaccagcctgaccatccggctgcccctggccaagaccaacctgacctggtacggcatcaccagccccacccccacctacctggtgtactatgcagaggtgaatgacaggaagaacagcagtgacctgaagtaccgcatcctggagttccaggacagcatcgccctgattgaggacctgcagcccttcagcacctacatgatccagattgctgtgaagaactactacagcgaccccctggagcacctgcccccaggcaaggagatctggggcaagaccaagaatggagtgcctgaggccgtgcagctgatcaacaccaccgtgcggagtgacaccagcctcatcatctcctggagggagagccacaagcccaacggccccaaggagagcgtgcgctaccagctggccatcagccacctggccctgatccctgagacccccctgcggcagagcgagttccccaacggccgcctgaccctgctggtgacccggctgagcggcggcaacatctacgtgctgaaggtgctggcctgccacagcgaggagatgtggtgcacagagagccaccctgtgacagtggagatgttcaacaccccagagaagccctacagcctggtgcctgagaacaccagcctgcagttcaactggaaggcccccctgaatgtgaacctgatccgcttctgggtggagctgcagaagtggaagtacaatgagttctaccacgtgaagaccagctgcagccagggccctgcctacgtgtgcaacatcaccaacctgcagccctacaccagctacaacgtgcgggtggtggtggtgtacaagacaggagagaacagcaccagcctgcctgagagcttcaagaccaaggccggcgtgcccaacaagccaggcatccccaagctgctggagggcagcaagaacagcatccagtgggagaaggcagaagataatggctgccgcatcacctactacatcctggagatcaggaagagcaccagcaacaacctgcagaaccagaacctgcgctggaagatgaccttcaacggcagctgcagctctgtgtgcacctggaagagcaagaacctgaagggcatcttccagttccgggtggtggccgccaacaacctgggctttggagagtacagcggcatcagcgagaacatcatcctggtgggagatgacttctggatccctgagaccagcttcatcctgaccatcatcgtgggcatcttcctggtggtgaccatccccctgacctttgtgtggcaccggcggctgaagaaccagaagagcgccaaggagggcgtgacagtgctgatcaatgaagacaaggagctggccgagctgcggggcctggccgccggcgtgggcctggccaatgcctgctacgccatccacaccctgcccacccaggaggagattgagaacctgcctgccttcccccgggagaagctgaccctgcggctgctgctgggcagcggggccttcggggaggtgtatgagggcacagctgtggacatcctgggcgtgggcagcggggagatcaaggtggccgtgaagaccctgaagaagggcagcacagaccaggagaagattgagttcctgaaggaggcccacctgatgagcaagttcaaccaccccaacatcctgaagcagctgggcgtgtgcctgctgaatgagccccagtacatcatcctggagctgatggagggcggggacctgctgacctacctgaggaaggccaggatggccaccttctacggccccctgctgaccctggtggacctggtggacctgtgtgtggacatcagcaagggctgtgtgtacctggagaggatgcacttcatccaccgggacctggccgccaggaactgcctggtgtctgtgaaggactacaccagccccagaattgtgaagatcggggactttggcctggcccgggacatctacaagaatgactactacaggaagagaggagagggcctgctgcctgtgcgctggatggcccctgagagcctgatggatggcatcttcaccacccagagtgatgtgtggagctttggcatcctgatctgggagatcctgaccctgggccaccagccctacccagcccacagcaacctggatgtgctgaactacgtgcagacaggaggccgcctggagccccccaggaactgcccagatgacctgtggaacctgatgacccagtgctgggcccaggagccagaccagaggcccaccttccaccgcatccaggaccagctgcagctgttcaggaacttcttcctgaacagcatctacaagagcagagatgaggccaacaacagcggggtcatcaatgaaagctttgaaggagaagatggagatgtgatctgcctgaacagtgatgacatcatgcctgtggccctgatggagaccaagaaccgggagggcctgaactacatggtgctggccacagaatgtggccagggcgaggagaagtctgagggccccctgggcagccaggagagcgagagctgtggcctgaggaaggaggagaaggagccccatgctgacaaggacttctgccaggagaagcaggtggcctactgccccagcggcaagccagagggcctgaactatgcctgcctgacccacagcggctatggagatggcagtgactag

SEQ ID NO: 148565 - DNA, 7044 bp, synthetic construct
  misc_feature 1..7044: note = Description of Artificial Sequence: Synthetic coding sequence
  source 1..7044: mol_type = other DNA
atgaagaacatctactgcctgatccccaagctggtgaactttgccaccctgggctgcctgtggatctctgtggtgcagtgcaccgtgctgaacagctgcctgaagagctgtgtgaccaacctgggccagcagctggacctgggcaccccccacaacctgtctgagccctgcatccagggctgccacttctggaacagcgtggaccagaagaactgtgccctgaagtgccgggagagctgtgaggtgggctgcagcagcgctgagggcgcctatgaggaggaggtgctggagaatgctgacctgcccacagccccctttgccagcagcatcggcagccacaacatgaccctgcgctggaagagcgccaacttctctggagtgaagtacatcatccagtggaagtatgcccagctgctgggctcctggacctacaccaagacagtgtcccggcccagctatgtggtgaagcccctgcaccccttcacagagtacatcttccgggtggtgtggatcttcaccgcccagctgcagctgtacagcccccccagccccagctaccgcacccacccccatggagtgcctgagacagcccccctcatcagaaatattgagagcagcagcccagacacagtggaggtgtcctgggaccccccccagtttcctgggggccccatcctgggctacaacctgcggctcatcagcaagaaccagaagctggatgctggcacccagaggaccagcttccagttctacagcaccctgcccaacaccatctaccgcttcagcattgctgctgtgaatgaggtgggggagggccctgaggccgagagcagcatcaccaccagcagcagcgctgtgcagcaggaggagcagtggctgttcctgagcaggaagaccagcctgaggaagaggagcctgaagcacctggtggatgaggcccactgcctgcggctggatgccatctaccacaacatcaccggcatctctgtggatgtgcaccagcagatcgtgtacttcagcgagggcaccctcatctgggccaagaaggccgccaacatgtctgatgtgtctgacctgcgcatcttctaccggggcagcggcctcatcagcagcatcagcattgactggctgtaccagaggatgtacttcatcatggatgagctggtgtgtgtgtgtgacctggagaactgcagcaacatcgaggagatcaccccacccagcatcagcgccccccagaagatcgtggccgacagctacaacggctacgtgttctacctgctgagagatggcatctacagagctgacctgcctgtgcccagcggccgctgtgccgaggccgtgagaattgtggagagctgcaccctgaaggactttgccatcaagccccaggccaagaggatcatctacttcaatgacacagcccaggtgttcatgagcaccttcctggatggcagcgccagccacctgatcctgccccgcatcccctttgctgatgtgaagagctttgcctgtgaaaataatgacttcctggtgacagatggcaaggtgatcttccagcaggatgccctgtccttcaatgagttcatcgtgggctgtgacctgagccacatcgaggagtttggcttcggcaacctggtgatcttcggcagcagcagccagctgcaccccctgcccggccggccccaggagctgtctgtgctgtttggcagccaccaggccctggtgcagtggaagcccccagccctggccatcggggccaacgtcatcctgatcagtgacatcatcgagctgtttgagctgggccccagcgcctggcagaactggacctatgaggtgaaggtgtccacccaggaccccccagaggtgacccacatcttcctgaacatcagcggcaccatgctgaatgtgcctgagctgcagagcgccatgaagtacaaggtgtctgtgcgggccagcagccccaagaggcctggcccctggagcgagcccagcgtgggcaccaccctggtgcctgccagcgagccccccttcatcatggctgtgaaggaggatggcctgtggagcaagcccctgaacagctttggacctggagagttcctgagcagtgacattggaaatgtgtctgacatggactggtacaacaacagcctgtactacagcgacaccaagggagatgtgtttgtgtggctgctgaatggaacagacatcagcgagaactaccacctgcccagcattgctggggccggggccctggcctttgagtggctgggccacttcctgtactgggccggcaagacctacgtgatccagaggcagagcgtgctgaccggccacacagacatcgtgacccacgtgaagctgctggtgaatgacatggtggtggacagcgtgggcggctacctgtactggaccaccctgtacagcgtggagagcacccggctgaatggagagagcagcctggtgctgcagacccagccctggttcagcggcaagaaggtgattgccctgaccctggacctgagtgatggcctgctgtactggctggtgcaggacagccagtgcatccacctgtacacagctgtgctgcggggccagagcactggagacaccaccatcacagaatttgctgcctggagcaccagcgagatcagccagaatgccctgatgtactacagcggccgcctcttctggatcaatggcttccgcatcatcaccacccaggagatcggccagaagacctctgtgtctgtgctggagcccgcccgcttcaaccagttcaccatcatccagaccagcctgaagcccctgcccggcaacttctccttcacccccaaggtgatcccagacagcgtgcaggagagcagcttccgcatcgagggcaatgccagcagcttccagatcctgtggaatggccccccagctgtggactggggcgtggtgttctacagcgtggagttcagcgcccacagcaagttcctggccagcgagcagcacagcctgcctgtgttcaccgtggagggcctggagccctatgccctcttcaacctgtctgtgaccccctacacctactggggcaagggccccaagaccagcctgagcctgcgggcccctgagaccgtgcccagcgcccctgagaacccccgcatcttcatcctgcccagcggcaagtgctgcaacaagaatgaggtggtggtggagttccgctggaacaagcccaagcatgaaaatggagtgctgaccaagtttgagatcttctacaacatcagcaaccagagcatcaccaacaagacctgtgaggactggattgctgtgaatgtgaccccatctgtgatgtccttccagctggagggcatgagcccccgctgcttcatcgccttccaggtgcgggccttcaccagcaagggccctggcccctatgcagatgtggtgaagagcaccaccagcgagatcaaccccttcccccacctgatcaccctgctgggcaacaagatcgtgttcctggacatggaccagaaccaggtggtgtggaccttctctgctgagagggtcatctctgctgtgtgctacacagctgacaatgagatgggctactatgcagagggggacagcctcttcctgctgcacctgcacaacagaagcagcagcgagctgttccaggacagcctggtgtttgacatcaccgtcatcaccatcgactggatcagccgccacctgtactttgccctgaaggagagccagaatggcatgcaggtgtttgatgtggacctggagcacaaggtgaagtacccccgggaggtgaagatccacaacagaaacagcaccatcatctccttctctgtgtaccccctgctgagccggctgtactggacagaggtgagcaactttggctaccagatgttctactacagcatcatcagccacaccctgcaccgcatcctgcagcccacagccaccaaccagcagaacaagaggaaccagtgcagctgcaatgtgacagaatttgagctgagcggggccatggccatcgacaccagcaacctggagaagcccctcatctactttgccaaggcccaggagatctgggccatggacctggagggctgccagtgctggagggtcatcaccgtgcctgccatgctggccggcaagaccctggtgtccctgactgtggatggagacctgatctactggatcatcacagccaaggacagcacccagatctaccaggccaagaagggaaatggagccatcgtgtcccaggtgaaggccctgcggagccgccacatcctggcctacagctctgtgatgcagcccttcccagacaaggccttcctgagcctggccagtgacacagtggagcccaccatcctgaatgccaccaacaccagcctgaccatccggctgcccctggccaagaccaacctgacctggtacggcatcaccagccccacccccacctacctggtgtactatgcagaggtgaatgacaggaagaacagcagtgacctgaagtaccgcatcctggagttccaggacagcatcgccctgattgaggacctgcagcccttcagcacctacatgatccagattgctgtgaagaactactacagcgaccccctggagcacctgcccccaggcaaggagatctggggcaagaccaagaatggagtgcctgaggccgtgcagctgatcaacaccaccgtgcggagtgacaccagcctcatcatctcctggagggagagccacaagcccaacggccccaaggagagcgtgcgctaccagctggccatcagccacctggccctgatccctgagacccccctgcggcagagcgagttccccaacggccgcctgaccctgctggtgacccggctgagcggcggcaacatctacgtgctgaaggtgctggcctgccacagcgaggagatgtggtgcacagagagccaccctgtgacagtggagatgttcaacaccccagagaagccctacagcctggtgcctgagaacaccagcctgcagttcaactggaaggcccccctgaatgtgaacctgatccgcttctgggtggagctgcagaagtggaagtacaatgagttctaccacgtgaagaccagctgcagccagggccctgcctacgtgtgcaacatcaccaacctgcagccctacaccagctacaacgtgcgggtggtggtggtgtacaagacaggagagaacagcaccagcctgcctgagagcttcaagaccaaggccggcgtgcccaacaagccaggcatccccaagctgctggagggcagcaagaacagcatccagtgggagaaggcagaagataatggctgccgcatcacctactacatcctggagatcaggaagagcaccagcaacaacctgcagaaccagaacctgcgctggaagatgaccttcaacggcagctgcagctctgtgtgcacctggaagagcaagaacctgaagggcatcttccagttccgggtggtggccgccaacaacctgggctttggagagtacagcggcatcagcgagaacatcatcctggtgggagatgacttctggatccctgagaccagcttcatcctgaccatcatcgtgggcatcttcctggtggtgaccatccccctgacctttgtgtggcaccggcggctgaagaaccagaagagcgccaaggagggcgtgacagtgctgatcaatgaagacaaggagctggccgagctgcggggcctggccgccggcgtgggcctggccaatgcctgctacgccatccacaccctgcccacccaggaggagattgagaacctgcctgccttcccccgggagaagctgaccctgcggctgctgctgggcagcggggccttcggggaggtgtatgagggcacagctgtggacatcctgggcgtgggcagcggggagatcaaggtggccgtgaagaccctgaagaagggcagcacagaccaggagaagattgagttcctgaaggaggcccacctgatgagcaagttcaaccaccccaacatcctgaagcagctgggcgtgtgcctgctgaatgagccccagtacatcatcctggagctgatggagggcggggacctgctgacctacctgaggaaggccaggatggccaccttctacggccccctgctgaccctggtggacctggtggacctgtgtgtggacatcagcaagggctgtgtgtacctggagaggatgcacttcatccaccgggacctggccgccaggaactgcctggtgtctgtgaaggactacaccagccccagaattgtgaagatcggggactttggcctggcccgggacatctacaagaatgactactacaggaagagaggagagggcctgctgcctgtgcgctggatggcccctgagagcctgatggatggcatcttcaccacccagagtgatgtgtggagctttggcatcctgatctgggagatcctgaccctgggccaccagccctacccagcccacagcaacctggatgtgctgaactacgtgcagacaggaggccgcctggagccccccaggaactgcccagatgacctgtggaacctgatgacccagtgctgggcccaggagccagaccagaggcccaccttccaccgcatccaggaccagctgcagctgttcaggaacttcttcctgaacagcatctacaagagcagagatgaggccaacaacagcggggtcatcaatgaaagctttgaaggagaagatggagatgtgatctgcctgaacagtgatgacatcatgcctgtggccctgatggagaccaagaaccgggagggcctgaactacatggtgctggccacagaatgtggccagggcgaggagaagtctgagggccccctgggcagccaggagagcgagagctgtggcctgaggaaggaggagaaggagccccatgctgacaaggacttctgccaggagaagcaggtggcctactgccccagcggcaagccagagggcctgaactatgcctgcctgacccacagcggctatggagatggcagtgactag

SEQ ID NO: 148566 - DNA, 294 bp, synthetic construct
  misc_feature 1..294: note = Description of Artificial Sequence: Synthetic coding sequence
  source 1..294: mol_type = other DNA
tggaagtacaatgagttctaccacgtgaagaccagctgcagccagggccctgcctacgtgtgcaacatcaccaacctgcagccctacaccagctacaacgtgcgggtggtggtggtgtacaagacaggagagaacagcaccagcctgcctgagagcttcaagaccaaggccggcgtgcccaacaagccaggcatccccaagctgctggagggcagcaagaacagcatccagtgggagaaggccgaggacaatggctgccgcatcacctactacatcctggagatccgggactag

SEQ ID NO: 148567 - DNA, 2025 bp, synthetic construct
  misc_feature 1..2025: note = Description of Artificial Sequence: Synthetic coding sequence
  source 1..2025: mol_type = other DNA
atgaccagcaatggagtggccctgctgaacttctacaacatgcccagcacccccagctttgtgggctgcctgcaggacatcaagattgactggaaccacatcaccctggagaacatcagcagcggcagcagcctgaatgtgaaggccggctgtgtgaggaaggactggtgtgagagccagccctgccagagccggggccgctgcatcaacctgtggctgagctaccagtgtgactgccaccggccctatgagggccccaactgcctgcgggagtatgtggccggccgcttcggccaggatgacagcacaggctacgtgatcttcaccctggatgagagctatggagacaccatcagcctgtccatgtttgtgaggaccctgcagcccagcggcctgctgctggccctggagaacagcacctaccagtacatccgggtgtggctggagcggggccgcctggccatgctgacccccaacagccccaagctggtggtgaagtttgtgctgaatgatggaaatgtgcacctgatcagcctgaagatcaagccctacaagattgagctgtaccagagcagccagaacctgggcttcatcagcgccagcacctggaagattgaaaaaggagatgtgatctacatcggcggcctgcctgacaagcaggagacagagctgaatggaggcttcttcaagggctgcatccaggatgtgcggctgaacaaccagaacctggagttcttccccaaccccaccaacaatgccagcctgaaccctgtgctggtgaatgtgacccagggctgtgccggggacaacagctgcaagagcaacccctgccacaatggaggagtgtgccacagccgctgggatgacttcagctgcagctgcccagccctgaccagcggcaaggcctgtgaggaggtgcagtggtgtggcttcagcccctgcccccacggggcccagtgccagcctgtgctgcagggctttgagtgcatcgccaatgctgtgttcaacggccagagcggccagatcctcttccgcagcaatggaaacatcacccgggagctgaccaacatcaccttcggcttccgcaccagagatgccaacgtcatcatcctgcatgctgagaaggagcctgagttcctgaacatcagcatccaggacagccgcctcttcttccagctgcagagcggcaacagcttctacatgctgagcctgaccagcctgcagagcgtgaatgatggcacctggcatgaggtgaccctgtccatgacagaccccctgagccagaccagccgctggcagatggaggtggacaatgagaccccatttgtgaccagcaccatcgccaccggcagcctgaacttcctgaaggacaacacagacatctacgtgggggaccgggccatcgacaacatcaagggcctgcagggctgcctgagcaccattgaaattggaggcatctacctgagctactttgaaaatgtgcacggcttcatcaacaagccccaggaggagcagttcctgaagatcagcaccaacagcgtggtgacaggctgcctgcagctgaatgtgtgcaacagcaacccctgcctgcatggaggcaactgtgaggacatctacagcagctaccactgcagctgccccctgggctggagcggcaagcactgtgagctgaacattgatgagtgcttcagcaacccctgcatccacggcaactgcagcgacagagtggccgcctaccactgcacctgtgagcccggctacacaggagtgaactgtgaggtggacatcgacaactgccagagccaccagtgtgccaacggggccacctgcatcagccacaccaacggctacagctgcctgtgcttcggcaacttcaccgggaagttctgccggcagagccggctgcccagcacagtgtgtggaaatgagaagaccaacctgacctgctacaatggaggcaactgcacagagttccagacagagctgaagtgcatgtgccggcccggcttcaccggggagtggtag

SEQ ID NO: 148568 - DNA, 4221 bp, synthetic construct
  misc_feature 1..4221: note = Description of Artificial Sequence: Synthetic coding sequence
  source 1..4221: mol_type = other DNA
atggccctgaagaacatcaactacctgctgatcttctacctgtccttcagcctgctgatctacatcaagaacagcttctgcaacaagaacaacacccgctgcctgagcaacagctgccagaacaacagcacctgcaaggacttcagcaaggacaatgactgcagctgcagcgacacagccaacaacctggacaaggactgtgacaacatgaaggacccctgcttcagcaacccctgccagggcagcgccacctgtgtgaacaccccaggagagaggagcttcctgtgcaagtgccccccaggctacagcggcaccatctgtgagaccaccatcggcagctgtgggaagaacagctgccagcacggcggcatctgccaccaggaccccatctaccctgtgtgcatctgcccagctggctacgccggccgcttctgtgaaattgaccatgatgaatgtgccagcagcccctgccagaatggagctgtgtgccaggacggcattgatggctacagctgcttctgtgtgcccggctaccagggccgccactgtgacctggaggtggatgaatgtgccagtgacccctgcaagaatgaggccacctgcctgaatgaaattggccgctacacctgcatctgcccccacaactacagcggcgtgaactgtgagctggagattgatgagtgctggagccagccctgcctgaatggagccacctgccaggatgccctgggcgcctacttctgtgactgtgcccctggcttcctgggggaccactgtgagctgaacacagatgaatgtgccagccagccctgcctgcatggaggcctgtgtgtggatggagaaaatcgctacagctgcaactgcaccggcagcggcttcaccggcacccactgtgagaccctgatgcccctgtgctggagcaagccctgccacaacaatgccacctgtgaagattctgtggacaactacacctgccactgctggccaggctacaccggggcccagtgtgaaattgacctgaatgaatgcaacagcaacccctgccagagcaatggagaatgtgtggagctgagcagcgagaagcagtatggccgcatcaccggcctgcccagcagcttctcctaccacgaggccagcggctacgtgtgcatctgccagcccggcttcaccggcatccactgtgaggaggatgtgaatgaatgtagcagcaacccctgccagaatggaggcacctgtgagaacctgcccggcaactacacctgccactgcccctttgacaacctgagcaggaccttctatggaggccgggactgcagcgacatcctgctgggctgcacccaccagcagtgcctgaacaacggcacctgcatcccccacttccaggacggccagcacggcttcagctgcctgtgccccagcggctacacaggcagcctgtgtgagatcgccaccaccctgagctttgaaggagatggcttcctgtgggtgaagagcggctctgtgaccaccaagggctctgtgtgcaacatcgccctgcgcttccagacagtgcagcccatggccctgctgctcttccgcagcaacagagatgtgtttgtgaagctggagctgctgagcggctacatccacctgagcatccaggtgaacaaccagagcaaggtgctgctcttcatcagccacaacaccagtgatggagagtggcactttgtggaggtgatctttgctgaggccgtgaccctgaccctgattgatgacagctgcaaggagaagtgcatcgccaaggcccccacccccctggagagtgaccagagcatctgtgccttccagaacagcttcctgggcggcctgcctgtgggcatgaccagcaatggagtggccctgctgaacttctacaacatgcccagcacccccagctttgtgggctgcctgcaggacatcaagattgactggaaccacatcaccctggagaacatcagcagcggcagcagcctgaatgtgaaggccggctgtgtgaggaaggactggtgtgagagccagccctgccagagccggggccgctgcatcaacctgtggctgagctaccagtgtgactgccaccggccctatgagggccccaactgcctgcgggagtatgtggccggccgcttcggccaggatgacagcacaggctacgtgatcttcaccctggatgagagctatggagacaccatcagcctgtccatgtttgtgaggaccctgcagcccagcggcctgctgctggccctggagaacagcacctaccagtacatccgggtgtggctggagcggggccgcctggccatgctgacccccaacagccccaagctggtggtgaagtttgtgctgaatgatggaaatgtgcacctgatcagcctgaagatcaagccctacaagattgagctgtaccagagcagccagaacctgggcttcatcagcgccagcacctggaagattgagaagggagatgtgatctacatcggcggcctgcctgacaagcaggagacagagctgaatggaggcttcttcaagggctgcatccaggatgtgcggctgaacaaccagaacctggagttcttccccaaccccaccaacaatgccagcctgaaccctgtgctggtgaatgtgacccagggctgtgccggggacaacagctgcaagagcaacccctgccacaacggcggcgtgtgccacagccgctgggatgacttcagctgcagctgcccagccctgaccagcggcaaggcctgtgaggaggtgcagtggtgtggcttcagcccctgcccccatggagcccagtgccagcctgtgctgcagggctttgaatgtattgccaatgctgtgttcaacggccagagcggccagatcctcttccgcagcaatggaaacatcacccgggagctgaccaacatcaccttcggcttccgcaccagagatgccaacgtcatcatcctgcacgccgagaaggagcctgagttcctgaacatcagcatccaggacagccgcctcttcttccagctgcagagcggcaacagcttctacatgctgagcctgaccagcctgcagagcgtgaatgatggcacctggcatgaggtgaccctgtccatgacagaccccctgagccagaccagccgctggcagatggaggtggacaatgagaccccatttgtgaccagcaccatcgccaccggcagcctgaacttcctgaaggacaacacagacatctacgtgggggaccgggccatcgacaacatcaagggcctgcagggctgcctgagcaccatcgagatcggcggcatctacctgagctactttgaaaatgtgcacggcttcatcaacaagccccaggaggagcagttcctgaagatcagcaccaacagcgtggtgacaggctgcctgcagctgaatgtgtgcaacagcaacccctgcctgcacggcggcaactgtgaggacatctacagcagctaccactgcagctgccccctgggctggagcggcaagcactgtgagctgaacattgatgagtgcttcagcaacccctgcatccacggcaactgcagcgacagagtggccgcctaccactgcacctgtgagcccggctacacaggagtgaactgtgaggtggacatcgacaactgccagagccaccagtgtgccaatggagccacctgcatcagccacaccaacggctacagctgcctgtgctttggaaacttcaccgggaagttctgccggcagagccggctgcccagcacagtgtgtggaaatgagaagaccaacctgacctgctacaacggcggcaactgcacagagttccagacagagctgaagtgcatgtgcaggcctggcttcaccggggagtggtgtgagaaggacattgatgaatgtgccagtgacccctgtgtgaatggaggcctgtgccaggacctgctgaacaagttccagtgcctgtgtgatgtggcctttgctggggagcgctgtgaggtggacctggctgatgacctgatcagtgacatcttcaccaccatcggctctgtgacagtggccctgctgctgatcctgctgctggccatcgtggcctctgtggtgaccagcaacaagagggccacccagggcacctacagccccagccggcaggagaaggagggcagccgggtggagatgtggaacctgatgcctcctccagccatggagcggctcatctag

SEQ ID NO: 148569 - DNA, 2826 bp, synthetic construct
  misc_feature 1..2826: note = Description of Artificial Sequence: Synthetic coding sequence
  source 1..2826: mol_type = other DNA
atgatccggaacagcctgtgccagcccagccgctgcctggatggctacctgttcttcaacaggaagatgtttggagcccggacccacggcttccacatcctgatggccatgctgattggcatccactgtgaagaagatgtgaatgaatgtagcagcaacccctgccagaatggaggcacctgtgagaacctgcccggcaactacacctgccactgcccctttgacaacctgagcaggaccttctacggcggccgggactgcagcgacatcctgctgggctgcacccaccagcagtgcctgaacaacggcacctgcatcccccacttccaggacggccagcacggcttcagctgcctgtgccccagcggctacacaggcagcctgtgtgaaattgccaccaccctgagctttgaaggagatggcttcctgtgggtgaagagcggctctgtgaccaccaagggctctgtgtgcaacatcgccctgcgcttccagacagtgcagcccatggccctgctgctcttccgcagcaacagagatgtgtttgtgaagctggagctgctgagcggctacatccacctgagcatccaggtgaacaaccagagcaaggtgctgctcttcatcagccacaacaccagtgatggagagtggcactttgtggaggtgatctttgctgaggccgtgaccctgaccctgattgatgacagctgcaaggagaagtgcatcgccaaggcccccacccccctggagagtgaccagagcatctgtgccttccagaacagcttcctgggcggcctgcctgtgggcatgaccagcaatggagtggccctgctgaacttctacaacatgcccagcacccccagctttgtgggctgcctgcaggacatcaagattgactggaaccacatcaccctggagaacatcagcagcggcagcagcctgaatgtgaaggccggctgtgtgaggaaggactggtgtgagagccagccctgccagagccggggccgctgcatcaacctgtggctgagctaccagtgtgactgccaccggccctatgagggccccaactgcctgcgggagtatgtggccggccgcttcggccaggatgacagcacaggctacgtgatcttcaccctggatgagagctatggagacaccatcagcctgtccatgtttgtgaggaccctgcagcccagcggcctgctgctggccctggagaacagcacctaccagtacatccgggtgtggctggagcggggccgcctggccatgctgacccccaacagccccaagctggtggtgaagtttgtgctgaatgatggaaatgtgcacctgatcagcctgaagatcaagccctacaagattgagctgtaccagagcagccagaacctgggcttcatcagcgccagcacctggaagattgaaaaaggagatgtgatctacatcggcggcctgcctgacaagcaggagacagagctgaatggaggcttcttcaagggctgcatccaggatgtgcggctgaacaaccagaacctggagttcttccccaaccccaccaacaatgccagcctgaaccctgtgctggtgaatgtgacccagggctgtgccggggacaacagctgcaagagcaacccctgccacaatggaggagtgtgccacagccgctgggatgacttcagctgcagctgcccagccctgaccagcggcaaggcctgtgaggaggtgcagtggtgtggcttcagcccctgcccccacggggcccagtgccagcctgtgctgcagggctttgagtgcatcgccaatgctgtgttcaacggccagagcggccagatcctcttccgcagcaatggaaacatcacccgggagctgaccaacatcaccttcggcttccgcaccagagatgccaacgtcatcatcctgcatgctgagaaggagcctgagttcctgaacatcagcatccaggacagccgcctcttcttccagctgcagagcggcaacagcttctacatgctgagcctgaccagcctgcagagcgtgaatgatggcacctggcatgaggtgaccctgtccatgacagaccccctgagccagaccagccgctggcagatggaggtggacaatgagaccccatttgtgaccagcaccatcgccaccggcagcctgaacttcctgaaggacaacacagacatctacgtgggggaccgggccatcgacaacatcaagggcctgcagggctgcctgagcaccattgaaattggaggcatctacctgagctactttgaaaatgtgcacggcttcatcaacaagccccaggaggagcagttcctgaagatcagcaccaacagcgtggtgacaggctgcctgcagctgaatgtgtgcaacagcaacccctgcctgcatggaggcaactgtgaggacatctacagcagctaccactgcagctgccccctgggctggagcggcaagcactgtgagctgaacattgatgagtgcttcagcaacccctgcatccacggcaactgcagcgacagagtggccgcctaccactgcacctgtgagcccggctacacaggagtgaactgtgaggtggacatcgacaactgccagagccaccagtgtgccaacggggccacctgcatcagccacaccaacggctacagctgcctgtgcttcggcaacttcaccgggaagttctgccggcagagccggctgcccagcacagtgtgtggaaatgagaagaccaacctgacctgctacaatggaggcaactgcacagagttccagacagagctgaagtgcatgtgccggcccggcttcaccggggagtag

SEQ ID NO: 148570 - DNA, 129 bp, synthetic construct
  misc_feature 1..129: note = Description of Artificial Sequence: Synthetic coding sequence
  source 1..129: mol_type = other DNA
gagaaggacattgatgaatgtgccagtgacccctgtgtgaatggaggcctgtgccaggacctgctgaacaagttccagtgcctgtgtgatgtggcctttgctggggagcgctgtgaggtggactactag

SEQ ID NO: 148571 - DNA, 4149 bp, synthetic construct
  misc_feature 1..4149: note = Description of Artificial Sequence: Synthetic coding sequence
  source 1..4149: mol_type = other DNA
atgaaggacccctgcttcagcaacccctgccagggcagcgccacctgtgtgaacaccccaggagagaggagcttcctgtgcaagtgccccccaggctacagcggcaccatctgtgagaccaccatcggcagctgtgggaagaacagctgccagcacggcggcatctgccaccaggaccccatctaccctgtgtgcatctgcccagctggctacgccggccgcttctgtgaaattgaccatgatgaatgtgccagcagcccctgccagaatggagctgtgtgccaggacggcattgatggctacagctgcttctgtgtgcccggctaccagggccgccactgtgacctggaggtggatgaatgtgccagtgacccctgcaagaatgaggccacctgcctgaatgagatcggccgctacacctgcatctgcccccacaactacagcggcgtgaactgtgagctggagattgatgagtgctggagccagccctgcctgaatggagccacctgccaggatgccctgggcgcctacttctgtgactgtgcccctggcttcctgggggaccactgtgagctgaacacagatgaatgtgccagccagccctgcctgcacggcggcctgtgtgtggatggagagaaccgctacagctgcaactgcaccggcagcggcttcaccggcacccactgtgagaccctgatgcccctgtgctggagcaagccctgccacaacaatgccacctgtgaggacagcgtggacaactacacctgccactgctggccaggctacacaggagcccagtgtgaaattgacctgaatgaatgcaacagcaacccctgccagagcaatggagaatgtgtggagctgagcagcgagaagcagtatggccgcatcaccggcctgcccagcagcttctcctaccacgaggccagcggctacgtgtgcatctgccagcccggcttcaccggcatccactgtgaagaagatgtgaatgaatgtagcagcaacccctgccagaatggaggcacctgtgagaacctgcccggcaactacacctgccactgcccctttgacaacctgagcaggaccttctacggcggccgggactgcagcgacatcctgctgggctgcacccaccagcagtgcctgaacaacggcacctgcatcccccacttccaggacggccagcacggcttcagctgcctgtgccccagcggctacacaggcagcctgtgtgaaattgccaccaccctgagctttgaaggagatggcttcctgtgggtgaagagcggctctgtgaccaccaagggctctgtgtgcaacatcgccctgcgcttccagacagtgcagcccatggccctgctgctcttccgcagcaacagagatgtgtttgtgaagctggagctgctgagcggctacatccacctgagcatccaggtgaacaaccagagcaaggtgctgctcttcatcagccacaacaccagtgatggagagtggcactttgtggaggtgatctttgctgaggccgtgaccctgaccctgattgatgacagctgcaaggagaagtgcatcgccaaggcccccacccccctggagagtgaccagagcatctgtgccttccagaacagcttcctgggcggcctgcctgtgggcatgaccagcaatggagtggccctgctgaacttctacaacatgcccagcacccccagctttgtgggctgcctgcaggacatcaagattgactggaaccacatcaccctggagaacatcagcagcggcagcagcctgaatgtgaaggccggctgtgtgaggaaggactggtgtgagagccagccctgccagagccggggccgctgcatcaacctgtggctgagctaccagtgtgactgccaccggccctatgagggccccaactgcctgcgggagtatgtggccggccgcttcggccaggatgacagcacaggctacgtgatcttcaccctggatgagagctatggagacaccatcagcctgtccatgtttgtgaggaccctgcagcccagcggcctgctgctggccctggagaacagcacctaccagtacatccgggtgtggctggagcggggccgcctggccatgctgacccccaacagccccaagctggtggtgaagtttgtgctgaatgatggaaatgtgcacctgatcagcctgaagatcaagccctacaagattgagctgtaccagagcagccagaacctgggcttcatcagcgccagcacctggaagattgaaaaaggagatgtgatctacatcggcggcctgcctgacaagcaggagacagagctgaatggaggcttcttcaagggctgcatccaggatgtgcggctgaacaaccagaacctggagttcttccccaaccccaccaacaatgccagcctgaaccctgtgctggtgaatgtgacccagggctgtgccggggacaacagctgcaagaggcagaccaacgtgggccgggccctgacagagctgggcagccggggccccaagtaccaggtgtccctcttccgcttctgtgtgggctcctgggccaccggcaacaccttcttcctgagcagcatcaagccaggcagcaacccctgccacaacggcggcgtgtgccacagccgctgggatgacttcagctgcagctgcccagccctgaccagcggcaaggcctgtgaggaggtgcagtggtgtggcttcagcccctgcccccatggagcccagtgccagcctgtgctgcagggctttgaatgtattgccaatgctgtgttcaacggccagagcggccagatcctcttccgcagcaatggaaacatcacccgggagctgaccaacatcaccttcggcttccgcaccagagatgccaacgtcatcatcctgcacgccgagaaggagcctgagttcctgaacatcagcatccaggacagccgcctcttcttccagctgcagagcggcaacagcttctacatgctgagcctgaccagcctgcagagcgtgaatgatggcacctggcatgaggtgaccctgtccatgacagaccccctgagccagaccagccgctggcagatggaggtggacaatgagaccccatttgtgaccagcaccatcgccaccggcagcctgaacttcctgaaggacaacacagacatctacgtgggggaccgggccatcgacaacatcaagggcctgcagggctgcctgagcaccatcgagatcggcggcatctacctgagctactttgaaaatgtgcacggcttcatcaacaagccccaggaggagcagttcctgaagatcagcaccaacagcgtggtgacaggctgcctgcagctgaatgtgtgcaacagcaacccctgcctgcacggcggcaactgtgaggacatctacagcagctaccactgcagctgccccctgggctggagcggcaagcactgtgagctgaacattgatgagtgcttcagcaacccctgcatccacggcaactgcagcgacagagtggccgcctaccactgcacctgtgagcccggctacacaggagtgaactgtgaggtggacatcgacaactgccagagccaccagtgtgccaatggagccacctgcatcagccacaccaacggctacagctgcctgtgctttggaaacttcaccgggaagttctgccggcagagccggctgcccagcacagtgtgtggaaatgagaagaccaacctgacctgctacaacggcggcaactgcacagagttccagacagagctgaagtgcatgtgcaggcctggcttcaccggggagtggtgtgagaaggacattgatgaatgtgccagtgacccctgtgtgaatggaggcctgtgccaggacctgctgaacaagttccagtgcctgtgtgatgtggcctttgctggggagcgctgtgaggtggacctggctgatgacctgatcagtgacatcttcaccaccatcggctctgtgacagtggccctgctgctgatcctgctgctggccatcgtggcctctgtggtgaccagcaacaagagggccacccagggcacctacagccccagccggcaggagaaggagggcagccgggtggagatgtggaacctgatgcctcctccagccatggagcggctcatctag

SEQ ID NO: 148572 - DNA, 2613 bp, synthetic construct
  misc_feature 1..2613: note = Description of Artificial Sequence: Synthetic coding sequence
  source 1..2613: mol_type = other DNA
atggccctgaagaacatcaactacctgctgatcttctacctgtccttcagcctgctgatctacatcaagaacagcttctgcaacaagaacaacacccgctgcctgagcaacagctgccagaacaacagcacctgcaaggacttcagcaaggacaatgactgcagctgcagcgacacagccaacaacctggacaaggactgtgacaacatgaaggacccctgcttcagcaacccctgccagggcagcgccacctgtgtgaacaccccaggagagaggagcttcctgtgcaagtgccccccaggctacagcggcaccatctgtgagaccaccatcggcagctgtgggaagaacagctgccagcacggcggcatctgccaccaggaccccatctaccctgtgtgcatctgcccagctggctacgccggccgcttctgtgaaattgaccatgatgaatgtgccagcagcccctgccagaatggagctgtgtgccaggacggcattgatggctacagctgcttctgtgtgcccggctaccagggccgccactgtgacctggaggtggatgaatgtgccagtgacccctgcaagaatgaggccacctgcctgaatgaaattggccgctacacctgcatctgcccccacaactacagcggcgtgaactgtgagctggagattgatgagtgctggagccagccctgcctgaatggagccacctgccaggatgccctgggcgcctacttctgtgactgtgcccctggcttcctgggggaccactgtgagctgaacacagatgaatgtgccagccagccctgcctgcatggaggcctgtgtgtggatggagaaaatcgctacagctgcaactgcaccggcagcggcttcaccggcacccactgtgagaccctgatgcccctgtgctggagcaagccctgccacaacaatgccacctgtgaagattctgtggacaactacacctgccactgctggccaggctacaccggggcccagtgtgaaattgacctgaatgaatgcaacagcaacccctgccagagcaatggagaatgtgtggagctgagcagcgagaagcagtatggccgcatcaccggcctgcccagcagcttctcctaccacgaggccagcggctacgtgtgcatctgccagcccggcttcaccggcatccactgtgaggaggatgtgaatgaatgtagcagcaacccctgccagaatggaggcacctgtgagaacctgcccggcaactacacctgccactgcccctttgacaacctgagcaggaccttctatggaggccgggactgcagcgacatcctgctgggctgcacccaccagcagtgcctgaacaacggcacctgcatcccccacttccaggacggccagcacggcttcagctgcctgtgccccagcggctacacaggcagcctgtgtgagatcgccaccaccctgagctttgaaggagatggcttcctgtgggtgaagagcggctctgtgaccaccaagggctctgtgtgcaacatcgccctgcgcttccagacagtgcagcccatggccctgctgctcttccgcagcaacagagatgtgtttgtgaagctggagctgctgagcggctacatccacctgagcatccaggtgaacaaccagagcaaggtgctgctcttcatcagccacaacaccagtgatggagagtggcactttgtggaggtgatctttgctgaggccgtgaccctgaccctgattgatgacagctgcaaggagaagtgcatcgccaaggcccccacccccctggagagtgaccagagcatctgtgccttccagaacagcttcctgggcggcctgcctgtgggcatgaccagcaatggagtggccctgctgaacttctacaacatgcccagcacccccagctttgtgggctgcctgcaggacatcaagattgactggaaccacatcaccctggagaacatcagcagcggcagcagcctgaatgtgaaggccggctgtgtgaggaaggactggtgtgagagccagccctgccagagccggggccgctgcatcaacctgtggctgagctaccagtgtgactgccaccggccctatgagggccccaactgcctgcggggcaagttctgccggcagagccggctgcccagcacagtgtgtggaaatgagaagaccaacctgacctgctacaacggcggcaactgcacagagttccagacagagctgaagtgcatgtgcaggcctggcttcaccggggagtggtgtgagaaggacattgatgaatgtgccagtgacccctgtgtgaatggaggcctgtgccaggacctgctgaacaagttccagtgcctgtgtgatgtggcctttgctggggagcgctgtgaggtggacctggctgatgacctgatcagtgacatcttcaccaccatcggctctgtgacagtggccctgctgctgatcctgctgctggccatcgtggcctctgtggtgaccagcaacaagagggccacccagggcacctacagccccagccggcaggagaaggagggcagccgggtggagatgtggaacctgatgcctcctccagccatggagcggctcatctag

SEQ ID NO: 148573 - DNA, 882 bp, synthetic construct
  misc_feature 1..882: note = Description of Artificial Sequence: Synthetic coding sequence
  source 1..882: mol_type = other DNA
atgcccctgtgctggagcaagccctgccacaacaatgccacctgtgaggacagcgtggacaactacacctgccactgctggccaggctacacaggagcccagtgtgaaattgacctgaatgaatgcaacagcaacccctgccagagcaatggagaatgtgtggagctgagcagcgagaagcagtatggccgcatcaccggcctgcccagcagcttctcctaccacgaggccagcggctacgtgtgcatctgccagcccggcttcaccggcatccactgtgaagaagatgtgaatgaatgtagcagcaacccctgccagaatggaggcacctgtgagaacctgcccggcaactacacctgccactgcccctttgacaacctgagcaggaccttctacggcggccgggactgcagcgacatcctgctgggctgcacccaccagcagtgcctgaacaacggcacctgcatcccccacttccaggacggccagcacggcttcagctgcctgtgccccagcggctacacaggcagcctgtgtgaaattgccaccaccctgagctttgaaggagatggcttcctgtgggtgaagagcggctctgtgaccaccaagggctctgtgtgcaacatcgccctgcgcttccagacagtgcagcccatggccctgctgctcttccgcagcaacagagatgtgtttgtgaagctggagctgctgagcggctacatccacctgagcatccaggtgaacaaccagagcaaggtgctgctcttcatcagccacaacaccagtgatggagagtggcactttgtggaggccgtgtccaagaccctgaagctgattggcatcaccctgccctggaggaccagccggctggcccaccactag

SEQ ID NO: 148574 - DNA, 2664 bp, synthetic construct
  misc_feature 1..2664: note = Description of Artificial Sequence: Synthetic coding sequence
  source 1..2664: mol_type = other DNA
atggccctgctgctcttccgcagcaacagagatgtgtttgtgaagctggagctgctgagcggctacatccacctgagcatccaggtgaacaaccagagcaaggtgctgctcttcatcagccacaacaccagtgatggagagtggcactttgtggaggtgatctttgctgaggccgtgaccctgaccctgattgatgacagctgcaaggagaagtgcatcgccaaggcccccacccccctggagagtgaccagagcatctgtgccttccagaacagcttcctgggcggcctgcctgtgggcatgaccagcaatggagtggccctgctgaacttctacaacatgcccagcacccccagctttgtgggctgcctgcaggacatcaagattgactggaaccacatcaccctggagaacatcagcagcggcagcagcctgaatgtgaaggccggctgtgtgaggaaggactggtgtgagagccagccctgccagagccggggccgctgcatcaacctgtggctgagctaccagtgtgactgccaccggccctatgagggccccaactgcctgcgggagtatgtggccggccgcttcggccaggatgacagcacaggctacgtgatcttcaccctggatgagagctatggagacaccatcagcctgtccatgtttgtgaggaccctgcagcccagcggcctgctgctggccctggagaacagcacctaccagtacatccgggtgtggctggagcggggccgcctggccatgctgacccccaacagccccaagctggtggtgaagtttgtgctgaatgatggaaatgtgcacctgatcagcctgaagatcaagccctacaagattgagctgtaccagagcagccagaacctgggcttcatcagcgccagcacctggaagattgaaaaaggagatgtgatctacatcggcggcctgcctgacaagcaggagacagagctgaatggaggcttcttcaagggctgcatccaggatgtgcggctgaacaaccagaacctggagttcttccccaaccccaccaacaatgccagcctgaaccctgtgctggtgaatgtgacccagggctgtgccggggacaacagctgcaagagcaacccctgccacaatggaggagtgtgccacagccgctgggatgacttcagctgcagctgcccagccctgaccagcggcaaggcctgtgaggaggtgcagtggtgtggcttcagcccctgcccccacggggcccagtgccagcctgtgctgcagggctttgagtgcatcgccaatgctgtgttcaacggccagagcggccagatcctcttccgcagcaatggaaacatcacccgggagctgaccaacatcaccttcggcttccgcaccagagatgccaacgtcatcatcctgcatgctgagaaggagcctgagttcctgaacatcagcatccaggacagccgcctcttcttccagctgcagagcggcaacagcttctacatgctgagcctgaccagcctgcagagcgtgaatgatggcacctggcatgaggtgaccctgtccatgacagaccccctgagccagaccagccgctggcagatggaggtggacaatgagaccccatttgtgaccagcaccatcgccaccggcagcctgaacttcctgaaggacaacacagacatctacgtgggggaccgggccatcgacaacatcaagggcctgcagggctgcctgagcaccattgaaattggaggcatctacctgagctactttgaaaatgtgcacggcttcatcaacaagccccaggaggagcagttcctgaagatcagcaccaacagcgtggtgacaggctgcctgcagctgaatgtgtgcaacagcaacccctgcctgcatggaggcaactgtgaggacatctacagcagctaccactgcagctgccccctgggctggagcggcaagcactgtgagctgaacattgatgagtgcttcagcaacccctgcatccacggcaactgcagcgacagagtggccgcctaccactgcacctgtgagcccggctacacaggagtgaactgtgaggtggacatcgacaactgccagagccaccagtgtgccaacggggccacctgcatcagccacaccaacggctacagctgcctgtgcttcggcaacttcaccgggaagttctgccggcagagccggctgcccagcacagtgtgtggaaatgagaagaccaacctgacctgctacaatggaggcaactgcacagagttccagacagagctgaagtgcatgtgccggcccggcttcaccggggagtggtgtgagaaggacattgatgaatgtgccagtgacccctgtgtgaatggaggcctgtgccaggacctgctgaacaagttccagtgcctgtgtgatgtggcctttgctggggagcgctgtgaggtggacctggctgatgacctgatcagtgacatcttcaccaccatcggctctgtgacagtggccctgctgctgatcctgctgctggccatcgtggcctctgtggtgaccagcaacaagagggccacccagggcacctacagccccagccggcaggagaaggagggcagccgggtggagatgtggaacctgatgcctcctccagccatggagcggctcatctag

SEQ ID NO: 148575 - DNA, 3885 bp, synthetic construct
  misc_feature 1..3885: note = Description of Artificial Sequence: Synthetic coding sequence
  source 1..3885: mol_type = other DNA
atggccctgaagaacatcaactacctgctgatcttctacctgtccttcagcctgctgatctacatcaagaacagcttctgcaacaagaacaacacccgctgcctgagcaacagctgccagaacaacagcacctgcaaggacttcagcaaggacaatgactgcagctgcagcgacacagccaacaacctggacaaggactgtgacaacatgaaggacccctgcttcagcaacccctgccagggcagcgccacctgtgtgaacaccccaggagagaggagcttcctgtgcaagtgccccccaggctacagcggcaccatctgtgagaccaccatcggcagctgtgggaagaacagctgccagcacggcggcatctgccaccaggaccccatctaccctgtgtgcatctgcccagctggctacgccggccgcttctgtgaaattgaccatgatgaatgtgccagcagcccctgccagaatggagctgtgtgccaggacggcattgatggctacagctgcttctgtgtgcccggctaccagggccgccactgtgacctggaggtggatgaatgtgccagtgacccctgcaagaatgaggccacctgcctgaatgaaattggccgctacacctgcatctgcccccacaactacagcggctacaccggggcccagtgtgaaattgacctgaatgaatgcaacagcaacccctgccagagcaatggagaatgtgtggagctgagcagcgagaagcagtatggccgcatcaccggcctgcccagcagcttctcctaccacgaggccagcggctacgtgtgcatctgccagcccggcttcaccggcatccactgtgaggaggatgtgaatgaatgtagcagcaacccctgccagaatggaggcacctgtgagaacctgcccggcaactacacctgccactgcccctttgacaacctgagcaggaccttctatggaggccgggactgcagcgacatcctgctgggctgcacccaccagcagtgcctgaacaacggcacctgcatcccccacttccaggacggccagcacggcttcagctgcctgtgccccagcggctacacaggcagcctgtgtgagatcgccaccaccctgagctttgaaggagatggcttcctgtgggtgaagagcggctctgtgaccaccaagggctctgtgtgcaacatcgccctgcgcttccagacagtgcagcccatggccctgctgctcttccgcagcaacagagatgtgtttgtgaagctggagctgctgagcggctacatccacctgagcatccaggtgaacaaccagagcaaggtgctgctcttcatcagccacaacaccagtgatggagagtggcactttgtggaggtgatctttgctgaggccgtgaccctgaccctgattgatgacagctgcaaggagaagtgcatcgccaaggcccccacccccctggagagtgaccagagcatctgtgccttccagaacagcttcctgggcggcctgcctgtgggcatgaccagcaatggagtggccctgctgaacttctacaacatgcccagcacccccagctttgtgggctgcctgcaggacatcaagattgactggaaccacatcaccctggagaacatcagcagcggcagcagcctgaatgtgaaggccggctgtgtgaggaaggactggtgtgagagccagccctgccagagccggggccgctgcatcaacctgtggctgagctaccagtgtgactgccaccggccctatgagggccccaactgcctgcgggagtatgtggccggccgcttcggccaggatgacagcacaggctacgtgatcttcaccctggatgagagctatggagacaccatcagcctgtccatgtttgtgaggaccctgcagcccagcggcctgctgctggccctggagaacagcacctaccagtacatccgggtgtggctggagcggggccgcctggccatgctgacccccaacagccccaagctggtggtgaagtttgtgctgaatgatggaaatgtgcacctgatcagcctgaagatcaagccctacaagattgagctgtaccagagcagccagaacctgggcttcatcagcgccagcacctggaagattgagaagggagatgtgatctacatcggcggcctgcctgacaagcaggagacagagctgaatggaggcttcttcaagggctgcatccaggatgtgcggctgaacaaccagaacctggagttcttccccaaccccaccaacaatgccagcctgaaccctgtgctggtgaatgtgacccagggctgtgccggggacaacagctgcaagagcaacccctgccacaacggcggcgtgtgccacagccgctgggatgacttcagctgcagctgcccagccctgaccagcggcaaggcctgtgaggaggtgcagtggtgtggcttcagcccctgcccccatggagcccagtgccagcctgtgctgcagggctttgaatgtattgccaatgctgtgttcaacggccagagcggccagatcctcttccgcagcaatggaaacatcacccgggagctgaccaacatcaccttcggcttccgcaccagagatgccaacgtcatcatcctgcacgccgagaaggagcctgagttcctgaacatcagcatccaggacagccgcctcttcttccagctgcagagcggcaacagcttctacatgctgagcctgaccagcctgcagagcgtgaatgatggcacctggcatgaggtgaccctgtccatgacagaccccctgagccagaccagccgctggcagatggaggtggacaatgagaccccatttgtgaccagcaccatcgccaccggcagcctgaacttcctgaaggacaacacagacatctacgtgggggaccgggccatcgacaacatcaagggcctgcagggctgcctgagcaccatcgagatcggcggcatctacctgagctactttgaaaatgtgcacggcttcatcaacaagccccaggaggagcagttcctgaagatcagcaccaacagcgtggtgacaggctgcctgcagctgaatgtgtgcaacagcaacccctgcctgcacggcggcaactgtgaggacatctacagcagctaccactgcagctgccccctgggctggagcggcaagcactgtgagctgaacattgatgagtgcttcagcaacccctgcatccacggcaactgcagcgacagagtggccgcctaccactgcacctgtgagcccggctacacaggagtgaactgtgaggtggacatcgacaactgccagagccaccagtgtgccaatggagccacctgcatcagccacaccaacggctacagctgcctgtgctttggaaacttcaccgggaagttctgccggcagagccggctgcccagcacagtgtgtggaaatgagaagaccaacctgacctgctacaacggcggcaactgcacagagttccagacagagctgaagtgcatgtgcaggcctggcttcaccggggagtggtgtgagaaggacattgatgaatgtgccagtgacccctgtgtgaatggaggcctgtgccaggacctgctgaacaagttccagtgcctgtgtgatgtggcctttgctggggagcgctgtgaggtggacctggctgatgacctgatcagtgacatcttcaccaccatcggctctgtgacagtggccctgctgctgatcctgctgctggccatcgtggcctctgtggtgaccagcaacaagagggccacccagggcacctacagccccagccggcaggagaaggagggcagccgggtggagatgtggaacctgatgcctcctccagccatggagcggctcatctag

SEQ ID NO: 148576 - DNA, 3531 bp, synthetic construct
  misc_feature 1..3531: note = Description of Artificial Sequence: Synthetic coding sequence
  source 1..3531: mol_type = other DNA
atggccctggcccggcccggcaccccagacccccaggccctggcctctgtgctgctgctgctgctgtgggccccagccctgagcctgctggccggcaccgtgcccagcgagccccccagcgcctgtgccagtgacccctgtgcccctggaacagagtgccaggccacagagagcggcggctacacctgtggccccatggagccccggggctgtgccacccagccctgccaccacggggccctgtgtgtgccccagggccctgaccccaccggcttccgctgctactgtgtgcccggcttccagggcccccgctgtgagctggacattgatgaatgtgccagccggccctgccaccacggggccacctgcaggaacctggccgacagatatgagtgccactgccccctgggctacgccggcgtgacctgtgagatggaggtggatgaatgtgccagcgccccctgcctgcatggaggcagctgcctggatggagtgggcagcttccgctgtgtgtgtgcccctggctacggcggcacccgctgccagctggacctggatgagtgccagagccagccctgtgcccatggaggcacctgccacgacctggtgaatggcttccgctgtgactgtgccggcaccggctatgagggcacccactgtgagcgggaggtgctggagtgtgccagcgccccctgtgagcacaatgccagctgcctggagggcctgggcagcttccgctgcctgtgctggccaggctacagcggggagctgtgtgaggtggatgaagatgaatgtgccagcagcccctgccagcacggcggccgctgcctgcagaggagtgaccctgccctgtatggaggagtgcaggccgccttccctggggccttctccttcagacatgctgctggcttcctgtgccactgccccccaggctttgagggcgctgactgtggggtggaggtggatgaatgtgccagccggccctgcctgaatggaggccactgccaggacctgcccaacggcttccagtgccactgcccagatggctacgccggccccacctgtgaagaagatgtggatgaatgtctgagtgacccctgcctgcatggaggcacctgcagcgacacagtggccggctacatctgccgctgcccagagacctggggcggccgggactgcagcgtgcagctgaccggctgccagggccacacctgccccctggccgccacctgcatccccatctttgaaagtggagtgcacagctatgtgtgccactgccccccaggcacccacggccccttctgtggccagaacaccaccttctctgtgatggccggcagccccatccaggcctctgtgcctgctgggggccccctgggcctggccctgcgcttccgcaccaccctgcctgctggcaccctggccaccagaaatgacaccaaggagagcctggagctggccctggtggccgccaccctgcaggccaccctgtggagctacagcaccaccgtgctggtgctgcggctgcctgacctggccctgaatgatggccactggcaccaggtggaggtggtgctgcacctggccaccctggagctgcggctgtggcatgagggctgcccagcccggctgtgtgtggccagcggccctgtggccctggccagcacagccagcgccacccccctgcctgctggcatcagcagcgcccagctgggagatgccacctttgctggctgcctgcaggatgtgcgggtggatggccacctgctgctgcctgaggacctgggagaaaatgtgctgctgggctgtgaaagaagagagcagtgccggcccctgccctgtgtgcacggcggcagctgtgtggacctgtggacccacttccgctgtgactgtgcccggccccaccggggccccacctgtgctgatgagatcccagctgccaccttcggcctgggcggggcccccagcagcgccagcttcctgctgcaggagctgcccggccccaacctgactgtgtccttcctgctgcggacccgggagagcgctggcctgctgctgcagtttgccaatgacagcgctgctggcctgactgtgttcctgtctgagggccgcatccgggcagaggtgcccggcagccctgctgtggtgctgcccggccgctgggatgatggcctgcggcacctggtgatgctgagctttggaccagaccagctgcaggacctgggccagcacgtgcacgtgggcggccgcctgctggccgctgacagccagccctggggcggccccttccggggctgcctgcaggacctgcggctggatggctgccacctgcccttcttccccctgcccctggacaacagcagccagcccagcgagctgggcggccggcagagctggaacctgacagctggctgtgtgtctgaggacatgtgcagcccagacccctgcttcaacggcggcacctgcctggtgacctggaatgacttccactgcacctgcccagccaacttcaccggccccacctgtgcccagcagctgtggtgccccggccagccctgcctgcccccagccacctgtgaggaggtgcctgatggctttgtgtgtgtggccgaggccaccttccgggagggccccccagctgccttcagcggccacaatgccagcagcggccgcctgctgggcggcctgagcctggccttccgcacccgggacagcgaggcctggctgctgcgggctgctgctggggccctggagggcgtgtggctggccgtgagaaatggcagcctggccggcggcgtgcggggcggccacggcctgcccggggctgtgctgcccatccctggcccccgggtggctgatggagcctggcaccgggtgcggctggccatggagaggcctgctgccaccaccagccgctggctgctgtggctggatggagctgccacccctgtggccctgcggggcctggccagtgacctgggcttcctgcagggccctggagctgtgcgcatcctgctggccgagaacttcaccggctgcctgggccgggtggccctgggcggcctgcccctgcccctggcccggcccaggcctggagctgcccctggggcccgggagcactttgcctcctggccaggcaccccagcccccatcctgggctgccgcggggcccctgtgtgtgcccccagcccctgcctgcatgatggagcctgccgggacctgtttgatgcctttgcctgtgcctgtggccctggctgggagggcccccgctgtgaggcccacgtggacccctgccacagcgccccctgtgcccggggccgctgccacacccacccagatggccgctttgaatgtcgctgccccccaggctttggaggcccccgctgccgctgggatggctgggccggcggctgggccgccaatgccccctggggctacggcggcgctgagaagagcgcccggtctgtggatgagagcctgcccttccctggcccccacgtgctgatctgtgacatgagaagaacagtgtag

SEQ ID NO: 148577 - DNA, 2862 bp, synthetic construct
  misc_feature 1..2862: note = Description of Artificial Sequence: Synthetic coding sequence
  source 1..2862: mol_type = other DNA
atggccatggagcccggggccctgtggaccttcctgggccacctgtggctgctggccggccccacctgtgaagaagatgtggatgaatgtctgagtgacccctgcctgcatggaggcacctgcagcgacacagtggccggctacatctgccgctgcccagagacctggggcggccgggactgcagcgtgcagctgaccggctgccagggccacacctgccccctggccgccacctgcatccccatctttgaaagtggagtgcacagctatgtgtgccactgccccccaggcacccacggccccttctgtggccagaacaccaccttctctgtgatggccggcagccccatccaggcctctgtgcctgctgggggccccctgggcctggccctgcgcttccgcaccaccctgcctgctggcaccctggccaccagaaatgacaccaaggagagcctggagctggccctggtggccgccaccctgcaggccaccctgtggagctacagcaccaccgtgctggtgctgcggctgcctgacctggccctgaatgatggccactggcaccaggtggaggtggtgctgcacctggccaccctggagctgcggctgtggcatgagggctgcccagcccggctgtgtgtggccagcggccctgtggccctggccagcacagccagcgccacccccctgcctgctggcatcagcagcgcccagctgggagatgccacctttgctggctgcctgcaggatgtgcgggtggatggccacctgctgctgcctgaggacctgggagaaaatgtgctgctgggctgtgaaagaagagagcagtgccggcccctgccctgtgtgcacggcggcagctgtgtggacctgtggacccacttccgctgtgactgtgcccggccccaccggggccccacctgtgctgatgagatcccagctgccaccttcggcctgggcggggcccccagcagcgccagcttcctgctgcaggagctgcccggccccaacctgactgtgtccttcctgctgcggacccgggagagcgctggcctgctgctgcagtttgccaatgacagcgctgctggcctgactgtgttcctgtctgagggccgcatccgggcagaggtgcccggcagccctgctgtggtgctgcccggccgctgggatgatggcctgcggcacctggtgatgctgagctttggaccagaccagctgcaggacctgggccagcacgtgcacgtgggcggccgcctgctggccgctgacagccagccctggggcggccccttccggggctgcctgcaggacctgcggctggatggctgccacctgcccttcttccccctgcccctggacaacagcagccagcccagcgagctgggcggccggcagagctggaacctgacagctggctgtgtgtctgaggacatgtgcagcccagacccctgcttcaacggcggcacctgcctggtgacctggaatgacttccactgcacctgcccagccaacttcaccggccccacctgtgcccagcagctgtggtgccccggccagccctgcctgcccccagccacctgtgaggaggtgcctgatggctttgtgtgtgtggccgaggccaccttccgggagggccccccagctgccttcagcggccacaatgccagcagcggccgcctgctgggcggcctgagcctggccttccgcacccgggacagcgaggcctggctgctgcgggctgctgctggggccctggagggcgtgtggctggccgtgagaaatggcagcctggccggcggcgtgcggggcggccacggcctgcccggggctgtgctgcccatccctggcccccgggtggctgatggagcctggcaccgggtgcggctggccatggagaggcctgctgccaccaccagccgctggctgctgtggctggatggagctgccacccctgtggccctgcggggcctggccagtgacctgggcttcctgcagggccctggagctgtgcgcatcctgctggccgagaacttcaccggctgcctgggccgggtggccctgggcggcctgcccctgcccctggcccggcccaggcctggagctgcccctggggcccgggagcactttgcctcctggccaggcaccccagcccccatcctgggctgccgcggggcccctgtgtgtgcccccagcccctgcctgcatgatggagcctgccgggacctgtttgatgcctttgcctgtgcctgtggccctggctgggagggcccccgctgtgaggcccacgtggacccctgccacagcgccccctgtgcccggggccgctgccacacccacccagatggccgctttgaatgtcgctgccccccaggctttggaggcccccgctgccgcctgcctgtgcccagcaaagaatgttccctgaatgtgacctgcctggatggcagcccctgtgagggcggcagccctgctgccaactgcagctgcctggagggcctggccggccagcgctgccaggtgcccaccctgccctgtgaggccaacccctgcctgaatggaggcacctgcagagctgctggaggagtgtctgagtgcatctgcaatgcccgcttcagcggccagttctgtgaggtggccaagggcctgcccctgcccctgcccttccccctgctggaggtggccgtgcctgctgcctgtgcctgcctgctgctgctgctgctgggcctgctgagcggcatcctggccgccaggaagaggcggcagagcgagggcacctacagccccagccagcaggaggtggccggggcccggctggagatggacagcgtgctgaaggtgcccccagaggagcggctcatctag

SEQ ID NO: 148578 - DNA, 3858 bp, synthetic construct
  misc_feature 1..3858: note = Description of Artificial Sequence: Synthetic coding sequence
  source 1..3858: mol_type = other DNA
atggccctggcccggcccggcaccccagacccccaggccctggcctctgtgctgctgctgctgctgtgggccccagccctgagcctgctggccggcaccgtgcccagcgagccccccagcgcctgtgccagtgacccctgtgcccctggaacagagtgccaggccacagagagcggcggctacacctgtggccccatggagccccggggctgtgccacccagccctgccaccacggggccctgtgtgtgccccagggccctgaccccaccggcttccgctgctactgtgtgcccggcttccagggcccccgctgtgagctggacattgatgaatgtgccagccggccctgccaccacggggccacctgcaggaacctggccgacagatatgagtgccactgccccctgggctacgccggcgtgacctgtgagatggaggtggatgaatgtgccagcgccccctgcctgcatggaggcagctgcctggatggagtgggcagcttccgctgtgtgtgtgcccctggctacggcggcacccgctgccagctggacctggatgagtgccagagccagccctgtgcccatggaggcacctgccacgacctggtgaatggcttccgctgtgactgtgccggcaccggctatgagggcacccactgtgagcgggaggtgctggagtgtgccagcgccccctgtgagcacaatgccagctgcctggagggcctgggcagcttccgctgcctgtgctggccaggctacagcggggagctgtgtgaggtggatgaagatgaatgtgccagcagcccctgccagcacggcggccgctgcctgcagaggagtgaccctgccctgtatggaggagtgcaggccgccttccctggggccttctccttcagacatgctgctggcttcctgtgccactgccccccaggctttgagggcgctgactgtggggtggaggtggatgaatgtgccagccggccctgcctgaatggaggccactgccaggacctgcccaacggcttccagtgccactgcccagatggctacgccggccccacctgtgaagaagatgtggatgaatgtctgagtgacccctgcctgcatggaggcacctgcagcgacacagtggccggctacatctgccgctgcccagagacctggggcggccgggactgcagcgtgcagctgaccggctgccagggccacacctgccccctggccgccacctgcatccccatctttgaaagtggagtgcacagctatgtgtgccactgccccccaggcacccacggccccttctgtggccagaacaccaccttctctgtgatggccggcagccccatccaggcctctgtgcctgctgggggccccctgggcctggccctgcgcttccgcaccaccctgcctgctggcaccctggccaccagaaatgacaccaaggagagcctggagctggccctggtggccgccaccctgcaggccaccctgtggagctacagcaccaccgtgctggtgctgcggctgcctgacctggccctgaatgatggccactggcaccaggtggaggtggtgctgcacctggccaccctggagctgcggctgtggcatgagggctgcccagcccggctgtgtgtggccagcggccctgtggccctggccagcacagccagcgccacccccctgcctgctggcatcagcagcgcccagctgggagatgccacctttgctggctgcctgcaggatgtgcgggtggatggccacctgctgctgcctgaggacctgggagaaaatgtgctgctgggctgtgaaagaagagagcagtgccggcccctgccctgtgtgcacggcggcagctgtgtggacctgtggacccacttccgctgtgactgtgcccggccccaccggggccccacctgtgctgatgagatcccagctgccaccttcggcctgggcggggcccccagcagcgccagcttcctgctgcaggagctgcccggccccaacctgactgtgtccttcctgctgcggacccgggagagcgctggcctgctgctgcagtttgccaatgacagcgctgctggcctgactgtgttcctgtctgagggccgcatccgggcagaggtgcccggcagccctgctgtggtgctgcccggccgctgggatgatggcctgcggcacctggtgatgctgagctttggaccagaccagctgcaggacctgggccagcacgtgcacgtgggcggccgcctgctggccgctgacagccagccctggggcggccccttccggggctgcctgcaggacctgcggctggatggctgccacctgcccttcttccccctgcccctggacaacagcagccagcccagcgagctgggcggccggcagagctggaacctgacagctggctgtgtgtctgaggacatgtgcagcccagacccctgcttcaacggcggcacctgcctggtgacctggaatgacttccactgcacctgcccagccaacttcaccggccccacctgtgcccagcagctgtggtgccccggccagccctgcctgcccccagccacctgtgaggaggtgcctgatggctttgtgtgtgtggccgaggccaccttccgggagggccccccagctgccttcagcggccacaatgccagcagcggccgcctgctgggcggcctgagcctggccttccgcacccgggacagcgaggcctggctgctgcgggctgctgctggggccctggagggcgtgtggctggccgtgagaaatggcagcctggccggcggcgtgcggggcggccacggcctgcccggggctgtgctgcccatccctggcccccgggtggctgatggagcctggcaccgggtgcggctggccatggagaggcctgctgccaccaccagccgctggctgctgtggctggatggagctgccacccctgtggccctgcggggcctggccagtgacctgggcttcctgcagggccctggagctgtgcgcatcctgctggccgagaacttcaccggctgcctgggccgggtggccctgggcggcctgcccctgcccctggcccggcccaggcctggagctgcccctggggcccgggagcactttgcctcctggccaggcaccccagcccccatcctgggctgccgcggggcccctgtgtgtgcccccagcccctgcctgcatgatggagcctgccgggacctgtttgatgcctttgcctgtgcctgtggccctggctgggagggcccccgctgtgaggcccacgtggacccctgccacagcgccccctgtgcccggggccgctgccacacccacccagatggccgctttgaatgtcgctgccccccaggctttggaggcccccgctgccgcctgcctgtgcccagcaaagaatgttccctgaatgtgacctgcctggatggcagcccctgtgagggcggcagccctgctgccaactgcagctgcctggagggcctggccggccagcgctgccaggtgcccaccctgccctgtgaggccaacccctgcctgaatggaggcacctgcagagctgctggaggagtgtctgagtgcatctgcaatgcccgcttcagcggccagttctgtgaggtggccaagggcctgcccctgcccctgcccttccccctgctggaggtggccgtgcctgctgcctgtgcctgcctgctgctgctgctgctgggcctgctgagcggcatcctggccgccaggaagaggcggcagagcgagggcacctacagccccagccagcaggaggtggccggggcccggctggagatggacagcgtgctgaaggtgcccccagaggagcggctcatctag

SEQ ID NO: 148579 - DNA, 363 bp, synthetic construct
  misc_feature 1..363: note = Description of Artificial Sequence: Synthetic coding sequence
  source 1..363: mol_type = other DNA
atggccaaccctggcctgggcctgctgctggccctgggcctgcccttcctgctggcccgctggggccgggcctggggccagatccagaccaccagcgccaatgaaaacagcacagtgctgcccagcagcaccagcagcagcagtgatggcaacctgcggcctgaggccatcacagccatcatcgtggtgttcagcctgctggccgccctgctgctggccgtgggcctggccctgctggtgaggaagctgcgggagaagaggcagacagagggcacctaccggcccagcagcgaggagcaggtgggcgcccgggtgccccccacccccaacctgaagctgcccccagaggagcggctcatctag

SEQ ID NO: 148580 - DNA, 372 bp, synthetic construct
  misc_feature 1..372: note = Description of Artificial Sequence: Synthetic coding sequence
  source 1..372: mol_type = other DNA
atggccaaccctggcctgggcctgctgctggccctgggcctgcccttcctgctggcccgctggggccgggcctggggccagatccagaccaccagcgccaatgaaaacagcacagtgctgcccagcagcaccagcagcagcagtgatggcaacctgcggcctgaggccatcacagccatcatcgtggtgttcagcctgctggccgccctgctgctggccgtgggcctggccctgctggtgaggaagctgcgggagaagaggcagacagagggcacctaccggcccagcagcgaggagcagttcagccacgccgctgaggcccgggccccccaggacagcaaggagaccgtgcagggctgcctgcccatctag

SEQ ID NO: 148581 - DNA, 363 bp, synthetic construct; identical to SEQ ID NO: 148579
  misc_feature 1..363: note = Description of Artificial Sequence: Synthetic coding sequence
  source 1..363: mol_type = other DNA

SEQ ID NO: 148582 - DNA, 1599 bp, synthetic construct
  misc_feature 1..1599: note = Description of Artificial Sequence: Synthetic coding sequence
  source 1..1599: mol_type = other DNA
atgcctgcccctcctggccgcacccacacctggttcctgctgcagagcctggaggacctggacaccagcctgaggaagctgaacagccggctgtttgtggtgcggggccagcctgcagatgtgttccccaggctcttcaaggagtggggcgtgacccggctgacctttgaatatgacagcgagccctttgggaaggagagagatgctgccatcatgaagatggccaaggaggccggcgtggaggtggtgacagagaacagccacaccctgtatgacctggaccgcatcatcgagctgaatggccagaagccacccctgacctacaagcgcttccaggccatcatcagcaggatggagctgcccaagaagcctgtgggcctggtgaccagccagcagatggagagctgcagagctgagatccaggagaaccatgatgagacctacggcgtgcccagcctggaggagctgggcttccccacagagggcctgggccctgctgtgtggcagggcggggagacagaggccctggcccggctggacaagcacctggagaggaaggcctgggtggccaactatgaaagacccaggatgaatgccaacagcctgctggccagccccaccggcctgagcccctacctgcgcttcggctgcctgagctgccgcctcttctactaccgcctgtgggacctgtacaagaaggtgaagaggaacagcaccccacccctgagcctgtttggccagctgctgtggagggagttcttctacacagctgccaccaacaaccccaggtttgacaggatggagggcaaccccatctgcatccagatcccctgggacaggaaccctgaggccctggccaagtgggccgagggcaagacaggcttcccctggattgatgccatcatgacccagctgcggcaggagggctggatccaccacctggcccggcatgctgtggcctgcttcctgaccaggggggacctgtgggtgtcctgggagagcggcgtgcgggtgtttgatgagctgctgctggatgctgacttctctgtgaatgccggctcctggatgtggctgagctgcagcgccttcttccagcagttcttccactgctactgccctgtgggcttcggccgcaggacagaccccagcggggactacatccgccgctacctgcccaagctgaaggccttccccagccgctacatctatgagccctggaatgcccctgagagcatccagaaggccgccaagtgcatcatcggcgtggactacccccggcccatcgtgaaccacgccgagaccagccggctgaacattgaaagaatgaagcagatctaccagcagctgagccgctaccggggcctgtgcctgctggcctctgtgcccagctgtgtggaggacctgagccaccctgtggccgagcccagcagcagccaggccggctccatgagcagcgctggcccccggcccctgcccagcggccctgccagccccaagaggaagctggaggccgctgaggagcccccaggagaggagctgagcaagagggcccgggtggccgagctgcccaccccagagctgcccagcaaggatgcctag

SEQ ID NO: 148583 - DNA, 1845 bp, synthetic construct
  misc_feature 1..1845: note = Description of Artificial Sequence: Synthetic coding sequence
  source 1..1845: mol_type = other DNA
atgggcggcgtgcacgtggcctaccggggcggggccggcgtggccggggctgtgtggacagtgatggccgccaccgtggccacagctgctgctgtggccccagccccagcccctggaacagacagcgccagctctgtgcactggttcaggaagggcctgcggctgcatgacaacccagccctgctggccgctgtgcggggggcccgctgtgtgcgctgtgtgtacatcctggacccctggtttgctgccagcagctctgtgggcatcaaccgctggaggttcctgctgcagagcctggaggacctggacaccagcctgaggaagctgaacagccggctgtttgtggtgcggggccagcctgcagatgtgttccccaggctcttcaaggagtggggcgtgacccggctgacctttgaatatgacagcgagccctttgggaaggagagagatgctgccatcatgaagatggccaaggaggccggcgtggaggtggtgacagagaacagccacaccctgtatgacctggaccgcatcatcgagctgaatggccagaagccacccctgacctacaagcgcttccaggccatcatcagcaggatggagctgcccaagaagcctgtgggcctggtgaccagccagcagatggagagctgcagagctgagatccaggagaaccatgatgagacctacggcgtgcccagcctggaggagctgggcttccccacagagggcctgggccctgctgtgtggcagggcggggagacagaggccctggcccggctggacaagcacctggagaggaaggcctgggtggccaactatgaaagacccaggatgaatgccaacagcctgctggccagccccaccggcctgagcccctacctgcgcttcggctgcctgagctgccgcctcttctactaccgcctgtgggacctgtacaagaaggtgaagaggaacagcaccccacccctgagcctgtttggccagctgctgtggagggagttcttctacacagctgccaccaacaaccccaggtttgacaggatggagggcaaccccatctgcatccagatcccctgggacaggaaccctgaggccctggccaagtgggccgagggcaagacaggcttcccctggattgatgccatcatgacccagctgcggcaggagggctggatccaccacctggcccggcatgctgtggcctgcttcctgaccaggggggacctgtgggtgtcctgggagagcggcgtgcgggtgtttgatgagctgctgctggatgctgacttctctgtgaatgccggctcctggatgtggctgagctgcagcgccttcttccagcagttcttccactgctactgccctgtgggcttcggccgcaggacagaccccagcggggactacatccgccgctacctgcccaagctgaaggccttccccagccgctacatctatgagccctggaatgcccctgagagcatccagaaggccgccaagtgcatcatcggcgtggactacccccggcccatcgtgaaccacgccgagaccagccggctgaacattgaaagaatgaagcagatctaccagcagctgagccgctaccggggcctgtgcctgctggcctctgtgcccagctgtgtggaggacctgagccaccctgtggccgagcccagcagcagccaggccggctccatgagcagcgctggcccccggcccctgcccagcggccctgccagccccaagaggaagctggaggccgctgaggagcccccaggagaggagctgagcaagagggcccgggtggccgagctgcccaccccagagctgcccagcaaggatgcctag

SEQ ID NO: 148584 - DNA, 522 bp, synthetic construct
  misc_feature 1..522: note = Description of Artificial Sequence: Synthetic coding sequence
  source 1..522: mol_type = other DNA
atggatgtgaccatccagcacccctggttcaagaggaccctgggccccttctaccccagccggctgtttgaccagttctttggagagggcctgtttgaatatgacctgctgcccttcctgagcagcaccatcagcccctactaccggcagagcctcttcagaacagtgctggacagcggcatcagcgaggtgcggagtgaccgggacaagtttgtgatcttcctggatgtgaagcacttctccccagaggacctgactgtgaaggtgcaggatgactttgtggagatccacggcaagcacaatgaaaggcaggatgaccacggctacatcagccgggagttccaccggcgctaccgcctgcccagcaatgtggaccagagcgccctgagctgcagcctgtctgcagatggcatgctgaccttctgtggccccaagatccagacaggcctggatgccacccatgctgagcgggccatccctgtgtcccgggaggagaagcccaccagcgcccccagcagctag

SEQ ID NO: 148585 - DNA, 570 bp, synthetic construct
  misc_feature 1..570: note = Description of Artificial Sequence: Synthetic coding sequence
  source 1..570: mol_type = other DNA
atggccctggtgcggggcggctggctgtggaggcagagcagcatcctgcggcgctggaagaggaactggtttgccctgtggctggatggcaccctgggctactaccatgatgaaacagcccaggatgaggaggacagagtgctgatccacttcaacgtgcgggacatcaagattggaccagaatgtcatgatgtgcagcccccagagggccgcagcagagatggcctgctgactgtgaacctgcgggagggcggccgcctgcacctgtgtgccgagaccaaggatgatgccctggcctggaagacagccctgctggaggccaacagcacccctgtgcgggtgtacagcccctaccaggactactatgaggtggtgcccccaaatgcccacgaggccacctacgtgcgcagctactacggccccccctatgccggccctggggtgacccacgtgattgtgcgggaggacccctgctacagcgctggggcccccctggccatgggcatgctggccggggccgccactggagctgccctgggcagcctgatgtggagcccctgctggttctag

SEQ ID NO: 148586 - DNA, 528 bp, synthetic construct
  misc_feature 1..528: note = Description of Artificial Sequence: Synthetic coding sequence
  source 1..528: mol_type = other DNA
atggacatcgccatccaccacccctggatcagaagacccttcttccccttccacagccccagccggctgtttgaccagttcttcggggagcacctgctggagagtgacctcttccccaccagcaccagcctgagccccttctacctgcggcccccatccttcctgcgggcccccagctggtttgacaccggcctgtctgagatgaggctggagaaggaccgcttctctgtgaacctggatgtgaagcacttcagccctgaggagctgaaggtgaaggtgctgggagatgtgattgaggtgcacggcaagcatgaggagcggcaggatgaacatggcttcatcagccgggagttccacaggaagtaccgcatcccagcagatgtggaccccctgaccatcaccagcagcctgagcagtgatggagtgctgactgtgaatggccccaggaagcaggtgtctggccctgagaggaccatccccatcacccgggaggagaagccagctgtgacagctgcccccaagaagtag

SEQ ID NO: 148587 - DNA, 525 bp, synthetic construct
  misc_feature 1..525: note = Description of Artificial Sequence: Synthetic coding sequence
  source 1..525: mol_type = other DNA
atggacatcgccatccaccacccctggatcagaagacccttcttccccttccacagccccagccggctgtttgaccagttcttcggggagcacctgctggagagtgacctcttccccaccagcaccagcctgagccccttctacctgcggcccccatccttcctgcgggcccccagctggtttgacaccggcctgtctgagatgaggctggagaaggaccgcttctctgtgaacctggatgtgaagcacttcagccctgaggagctgaaggtgaaggtgctgggagatgtgattgaggtgcacggcaagcatgaggagcggcaggatgaacatggcttcatcagccgggagttccacaggaagtaccgcatcccagcagatgtggaccccctgaccatcaccagcagcctgagcagtgatggagtgctgactgtgaatggccccaggaagcaggtgtctggccctgagaggaccatccccatcacccgggaggagaagccagctgtgacagctgcccccaagtag

SEQ ID NO: 148588 - DNA, 528 bp, synthetic construct; identical to SEQ ID NO: 148586
  misc_feature 1..528: note = Description of Artificial Sequence: Synthetic coding sequence
  source 1..528: mol_type = other DNA

SEQ ID NO: 148589 - DNA, 234 bp, synthetic construct
  misc_feature 1..234: note = Description of Artificial Sequence: Synthetic coding sequence
  source 1..234: mol_type = other DNA
atggacatcgccatccaccacccctggatcagaagacccttcttccccttccacagccccagccggctgtttgaccagttcttcggggagcacctgctggagagtgacctcttccccaccagcaccagcctgagccccttctacctgcggcccccatccttcctgcgggcccccagctggtttgacaccggcctgtctgagatgaggctggagaaggaccgcttctctgtgtag

SEQ ID NO: 148590 - DNA, 393 bp, synthetic construct
  misc_feature 1..393: note = Description of Artificial Sequence: Synthetic coding sequence
  source 1..393: mol_type = other DNA
atggacatcgccatccaccacccctggatcagaagacccttcttccccttccacagccccagccggctgtttgaccagttcttcggggagcacctgctggagagtgacctcttccccaccagcaccagcctgagccccttctacctgcggcccccatccttcctgcgggcccccagctggtttgacaccggcctgtctgagatgaggctggagaaggaccgcttctctgtgaacctggatgtgaagcacttcagccctgaggagctgaaggtgaaggtgctgggagatgtgattgaggtgcacggcaagcatgaggagcggcaggatgaacatggcttcatcagccgggagttccacaggaagtaccgcatcccagcagatgtggacccctag

SEQ ID NO: 148591 - DNA, 528 bp, synthetic construct; identical to SEQ ID NO: 148586
  misc_feature 1..528: note = Description of Artificial Sequence: Synthetic coding sequence
  source 1..528: mol_type = other DNA

SEQ ID NO: 148592 - DNA, 528 bp, synthetic construct; identical to SEQ ID NO: 148586
  misc_feature 1..528: note = Description of Artificial Sequence: Synthetic coding sequence
  source 1..528: mol_type = other DNA

SEQ ID NO: 148593 - DNA, 210 bp, synthetic construct
  misc_feature 1..210: note = Description of Artificial Sequence: Synthetic coding sequence
  source 1..210: mol_type = other DNA
atggacatcgccatccaccacccctggatcagaagacccttcttccccttccacagccccagccggctgtttgaccagttcttcggggagcacctgctggagagtgacctcttccccaccagcaccagcctgagccccttctacctgcggcccccatccttcctgcgggcccccagctggtttgacaccggcctgtctgagatgaggtag

SEQ ID NO: 148594 - DNA, 2148 bp, synthetic construct
  misc_feature 1..2148: note = Description of Artificial Sequence: Synthetic coding sequence
  source 1..2148: mol_type = other DNA
atgcacctgctgcctgccctggccggcgtgctggccaccctggtgctggcccagccctgtgagggcacagatcctgccagccctggagctgtggagacctctgtgctgcgggactgcatcgccgaggccaagctgctggtggatgctgcctacaactggacccagaagagcatcaagcagaggctgcggagcggcagcgccagccccatggacctgctgagctacttcaagcagcctgtggccgccaccaggacagtggtgcgggctgctgactacatgcacgtggccctgggcctgctggaggagaagctgcagccccagaggagcggccccttcaacgtgacagatgtgctgacagagccccagctgcggctgctgagccaggccagcggctgtgccctgcgggaccaggccgagcgctgcagcgacaagtaccgcaccatcaccggccgctgcaacaacaagaggcggcccctgctgggcgccagcaaccaggccctggcccgctggctgcctgcagaatatgaagatggcctgagcctgcccttcggctggacccccagcagaagaagaaatggcttcctgctgcccctggtgcgggctgtgagcaaccagatcgtgcgcttccccaatgaaaggctgaccagtgaccggggccgggccctgatgttcatgcagtggggccagttcatcgaccatgacctggacttcagccctgagagccctgcccgggtggccttcaccgctggggtggactgtgagaggacctgtgcccagctgcccccctgcttccccatcaagatccccccaaatgacccccgcatcaagaaccagagggactgcatccccttcttccgcagcgcccccagctgcccccagaacaagaacagagtgaggaaccagatcaatgccctgaccagctttgtggatgcctccatggtgtatggcagcgaggtgtccctgagcctgcggctgaggaacagaaccaactacctgggcctgctggccatcaaccagcgcttccaggacaatggccgggccctgctgccctttgacaacctgcatgatgacccctgcctgctgaccaacagaagtgcccgcatcccctgcttcctggccggggacaccaggagcacagagacccccaagctggccgccatgcacaccctcttcatgagggagcacaaccggctggccacagagctgcggcggctgaacccccgctggaatggagacaagctgtacaatgaggccaggaagatcatgggcgccatggtgcagatcatcacctacagagacttcctgcccctggtgctgggcaaggcccgggcccggaggaccctgggccactaccggggctactgcagcaatgtggacccccgggtggccaacgtgttcaccctggccttccgcttcggccacaccatgctgcagcccttcatgttccggctggacagccagtaccgggccagcgcccccaacagccacgtgcccctgagcagcgccttctttgcctcctggagaattgtgtatgaaggaggcatcgaccccatcctgcggggcctgatggccaccccagccaagctgaaccggcaggatgccatgctggtggatgagctgcgggacaggctcttccggcaggtgagaagaattggcctggacctggccgccctgaacatgcagaggagccgggaccacggcctgcccggctacaatgcctggaggcgcttctgtggcctgagccagcccaggaacctggcccagctgagccgggtgctgaagaaccaggacctggccaggaagttcctgaacctgtatggcaccccagacaacatcgacatctggattggagccatcgccgagcccctgctgcccggggcccgggtgggccccctgctggcctgcctgtttgagaaccagttccggcgggccagagatggagaccgcttctggtggcagaagaggggcgtcttcaccaagaggcagaggaaggccctgagccgcatcagcctgagccgcatcatctgtgacaacacaggcatcaccaccgtgtcccgggacatcttccgggccaacatctacccccggggctttgtgaactgcagccgcatcccccggctgaacctgagcgcctggaggggcacctag

SEQ ID NO: 148595 - DNA, 594 bp, synthetic construct
  misc_feature 1..594: note = Description of Artificial Sequence: Synthetic coding sequence
  source 1..594: mol_type = other DNA
atgagcagcgccccagcccctggccctgccccagccagcctgaccctgtgggatgaggaggacttccagggccgccgctgccgcctgctgagtgactgtgccaacgtgtgtgagcggggcggcctgccccgggtgcgctctgtgaaggtggagaatggagtgtgggtggcctttgagtacccagacttccagggccagcagttcatcctggagaagggggactacccccgctggagcgcctggagcggcagcagcagccacaacagcaaccagctgctgtccttccggcctgtgctgtgtgccaaccacaatgacagccgggtgaccctgtttgaaggagacaacttccagggctgcaagtttgacctggtggatgactaccccagcctgcccagcatgggctgggccagcaaggatgtgggcagcctgaaggtgtcctctggggcctgggtggcctaccagtacccaggctaccggggctaccagtatgtgctggagcgggacagacattctggagagttctgcacctatggagagctgggcacccaggcccacacaggccagctgcagagcatcagaagagtgcagcactag

SEQ ID NO: 148596 - DNA, 594 bp, synthetic construct; identical to SEQ ID NO: 148595
  misc_feature 1..594: note = Description of Artificial Sequence: Synthetic coding sequence
  source 1..594: mol_type = other DNA

SEQ ID NO: 148597 - DNA, 390 bp, synthetic construct
  misc_feature 1..390: note = Description of Artificial Sequence: Synthetic coding sequence
  source 1..390: mol_type = other DNA
atgagcagcgccccagcccctggccctgccccagccagcctgaccctgtgggatgaggaggacttccagggccgccgctgccgcctgctgagtgactgtgccaacgtgtgtgagcggggcggcctgccccgggtgcgctctgtgaaggtggagaatggagtgtgggtggcctttgagtacccagacttccagggccagcagttcatcctggagaagggggactacccccgctggagcgcctggagcggcagcagcagccacaacagcaaccagctgctgtccttccggcctgtgctgtgtgccaaccacaatgacagccgggtgaccctgtttgaaggagacaacttccagggctgcaagtttgacctggtggatgactaccccagctag

SEQ ID NO: 148598 - DNA, 591 bp, synthetic construct
  misc_feature 1..591: note = Description of Artificial Sequence: Synthetic coding sequence
  source 1..591: mol_type = other DNA
atgaccctgcagtgcaccaagtctgctggcccctggaagatggtggtgtgggatgaagatggcttccagggcagaagacatgagttcaccgctgagtgccccagcgtgctggagctgggctttgaaacagtgcgcagcctgaaggtgctgagcggggcctgggtgggctttgaacatgctggcttccagggccagcagtacatcctggagcggggggagtaccccagctgggatgcctggggcggcaacacagcctacccagctgagcggctgaccagcttccggcctgctgcctgtgccaaccaccgggacagccggctgaccatctttgagcaggagaacttcctgggcaagaagggggagctgagtgatgactaccccagcctgcaggccatgggctgggagggcaatgaggtgggcagcttccacgtgcacagcggggcctgggtgtgcagccagtttcctggctaccggggcttccagtatgtgctggagtgtgaccaccacagcggggactacaagcacttccgggagtggggcagccacgcccccaccttccaggtgcagagcatccgccgcatccagcagtag

SEQ ID NO: 148599 - DNA, 1614 bp, synthetic construct
  misc_feature 1..1614: note = Description of Artificial Sequence: Synthetic coding sequence
  source 1..1614: mol_type = other DNA
atggagcgggtgaatgatgccagctgtggccccagcggctgctacacctaccaggtgagccgccacagcacagagatgctgcacaacctgaaccagcagaggaagaatggaggccgcttctgtgatgtgctgctgcgggtgggagatgagagcttccctgcccacagagctgtgctggccgcctgcagcgagtactttgagagcgtcttcagcgcccagctgggagatggaggagctgctgatggcggccctgcagatgtgggcggggccacagctgcccctgggggcggggccggcggcagccgggagctggagatgcacaccatcagcagcaaggtgtttggagacatcctggactttgcctacaccagccgcatcgtggtgcggctggagagcttccctgagctgatgacagctgccaagttcctgctgatgaggtctgtgattgagatctgccaggaggtgatcaagcagagcaatgtgcagatcctggtgcccccagcccgggctgacatcatgctgttccggcccccaggcaccagtgacctgggcttccccctggacatgaccaatggagctgccctggccgccaacagcaatggaattgctggctccatgcagcctgaggaggaggccgcccgggccgccggggccgccatcgccggccaggccagcctgcctgtgctgcccggggtggaccggctgcccatggtggccggccccctgagcccccagctgctgaccagccccttccccagcgtggccagcagcgccccacccctgaccgggaagaggggccggggccggcccaggaaggccaacctgctggacagcatgtttggcagccctgggggcctgcgggaggccggcatcctgccctgtggcctgtgtgggaaggtgttcacagatgccaaccggctgcggcagcacgaggcccagcacggcgtgaccagcctgcagctgggctacatcgacctgcccccaccccggctgggagaaaatggcctgcccatcagcgaggaccctgatggccccaggaagaggagcaggaccaggaagcaggtggcctgtgagatctgtgggaagatcttcagagatgtgtaccacctgaacagacacaagctgagccacagcggggagaagccctacagctgccctgtgtgtggcctgcgcttcaagaggaaggacaggatgagctaccacgtgcgcagccatgatggctctgtgggcaagccctacatctgccagagctgtgggaagggcttcagcaggccagaccacctgaatggccacatcaagcaggtgcacaccagcgagcggccccacaagtgccaggtgtgggtgggcagcagcagcggcctgccccccctggagcccctgcccagcgacctgcccagctgggactttgcccagcctgccctgtggaggagcagccacagcgtgcctgacacagccttcagcctgagcctgaagaagagcttccctgccctggagaacctgggccctgcccacagcagcaacaccctcttctgcccagcccctcctggctacctgcggcagggctggaccaccccagagggcagccgggccttcacccagtggcctgtgggctag

SEQ ID NO: 148600 - DNA, 618 bp, synthetic construct
  misc_feature 1..618: note = Description of Artificial Sequence: Synthetic coding sequence
  source 1..618: mol_type = other DNA
atggccagtgaccaccagacccaggccggcaagccccagagcctgaaccccaagatcatcatctttgagcaggagaacttccagggccacagccatgagctgaatggcccctgccccaacctgaaggagaccggggtggagaaggccggctctgtgctggtgcaggccggcccctgggtgggctatgagcaggccaactgcaagggggagcagtttgtgtttgagaagggggagtacccccgctgggacagctggaccagcagcagaagaacagacagcctgagcagcctgcggcccatcaaggtggacagccaggagcacaagatcatcctgtatgagaaccccaacttcaccgggaagaagatggagatcattgatgatgatgtgcccagcttccacgcccacggctaccaggagaaggtgtcctctgtgcgggtgcagagcggcacctgggtgggctaccagtacccaggctaccggggcctgcagtacctgctggagaagggggactacaaggacagcagtgactttggagccccccacccccaggtgcagagcgtgcggcgcatccgggacatgcagtggcaccagagaggagccttccaccccagcaactag

SEQ ID NO: 148601 - DNA, 1284 bp, synthetic construct
  misc_feature 1..1284: note = Description of Artificial Sequence: Synthetic coding sequence
  source 1..1284: mol_type = other DNA
atgaggcacctgggcgccttcctgttcctgctgggcgtgctgggcgccctgacagagatgtgtgagatccctgagatggacagccacctggtggagaagctgggccagcacctgctgccctggatggaccggctgagcctggagcacctgaaccccagcatctacgtgggcctgcggctgagcagcctgcaggccggcaccaaggaggacctgtacctgcacagcctgaagctgggctaccagcagtgcctgctgggcagcgccttctctgaagatgatggagactgccagggcaagcccagcatgggccagctggccctgtacctgctggccctgcgggccaactgtgaatttgtgcggggccacaagggggaccggctggtgtcccagctgaagtggttcctggaggatgagaagagggccatcggccatgaccacaagggccacccccacaccagctactaccagtatggcctgggcatcctggccctgtgcctgcaccagaagagggtgcatgacagcgtggtggacaagctgctgtatgctgtggagcccttccaccagggccaccacagcgtggacacagctgccatggccggcctggccttcacctgcctgaagaggagcaacttcaaccctggaagacggcagaggatcaccatggccatcagaacagtgcgggaggagatcctgaaggcccagaccccagagggccactttggaaatgtgtacagcacccccctggccctgcagttcctgatgaccagccccatgagaggagctgagctgggcacagcctgcctgaaggcccgggtggccctgctggccagcctgcaggatggagccttccagaatgccctgatgatcagccagctgctgcctgtgctgaaccacaagacctacatcgacctgatcttcccagactgcctggccccccgggtgatgctggagcctgctgctgagaccatcccccagacccaggagatcatctctgtgaccctgcaggtgctgagcctgctgcccccctaccggcagagcatctctgtgctggccggcagcacagtggaggatgtgctgaagaaggcccacgagctgggcggcttcacctatgagacccaggccagcctgagcggcccctacctgacctctgtgatgggcaaggctgctggggagcgggagttctggcagctgctgcgggaccccaacacccccctgctgcagggcattgctgactaccggcccaaggatggagagaccatcgagctgcggctggtgtcctggtag

SEQ ID NO: 148602 - DNA, 525 bp, synthetic construct
  misc_feature 1..525: note = Description of Artificial Sequence: Synthetic coding sequence
  source 1..525: mol_type = other DNA
atgggcaagatcaccttctatgaggaccgggacttccagggccgctgctacaactgcatcagtgactgccccaacctgcgggtgtacttcagccgctgcaacagcatccgggtggacagcggctgctggatgctgtatgaaagacccaactaccagggccaccagtacttcctgcggcggggcaagtacccagactaccagcactggatgggcctgagtgacagcgtgcagagctgccgcatcatcccccacaccagcagccacaagctgcggctgtatgaaagagatgactaccggggcctgatgtctgagctgacagatgactgtgcctgtgtgcctgagctgttccggctgcctgagatctacagcctgcacgtgctggagggctgctgggtgctgtatgagatgcccaactaccggggccggcagtacctgctgcggcctggggactaccgccgctaccatgactggggcggcgcagatgccaaggtgggcagcctgcggcgggtgacagacctgtactag

SEQ ID NO: 148603 - DNA, 528 bp, synthetic construct
  misc_feature 1..528: note = Description of Artificial Sequence: Synthetic coding sequence
  source 1..528: mol_type = other DNA
atgggcaagatcaccttctatgaggaccgggccttccagggccgctcctatgagtgcaccacagactgccccaacctgcagccctacttcagccgctgcaacagcatccgggtggagagcggctgctggatgatctatgaaagacccaactaccagggccaccagtacttcctgcggcggggggagtacccagactaccagcagtggatgggcctgagtgacagcatccgcagctgctgcctgatccccccccacagcggggcctacaggatgaagatctatgacagagatgagctgcggggccagatgtctgagctgacagatgactgcatctctgtgcaggaccgcttccacctgacagagatccacagcctgaatgtgctggagggctcctggatcctgtatgagatgcccaactaccggggccggcagtacctgctgcggcctggagagtaccgccgcttcctggactggggcgccccaaatgccaaggtgggcagcctgcggcgggtgatggacctgtactag

SEQ ID NO: 148604 - DNA, 525 bp, synthetic construct
  misc_feature 1..525: note = Description of Artificial Sequence: Synthetic coding sequence
  source 1..525: mol_type = other DNA
atgggcaagatcaccttctatgaggaccgggccttccagggccgctcctatgagaccaccacagactgccccaacctgcagccctacttcagccgctgcaacagcatccgggtggagagcggctgctggatgctgtatgaaagacccaactaccagggccagcagtacctgctgcggcggggggagtacccagactaccagcagtggatgggcctgagtgacagcatccgcagctgctgcctgatcccccagacagtgagccaccggctgcggctgtatgagcgggaggaccacaagggcctgatgatggagctgtctgaggactgccccagcatccaggaccgcttccacctgtctgagatccgcagcctgcacgtgctggagggctgctgggtgctgtatgagctgcccaactaccggggccggcagtacctgctgcggccccaggagtaccgccgctgccaggactggggcgccatggatgccaaggccggcagcctgcggcgggtggtggacctgtactag

SEQ ID NO: 148605 - DNA, 525 bp, synthetic construct
  misc_feature 1..525: note = Description of Artificial Sequence: Synthetic coding sequence
  source 1..525: mol_type = other DNA
atgggcaagatcaccctgtatgaggaccggggcttccagggccgccactatgagtgcagcagtgaccaccccaacctgcagccctacctgagccgctgcaacagcgcccgggtggacagcggctgctggatgctgtatgagcagcccaactacagcggcctgcagtacttcctgcggcggggggactatgctgaccaccagcagtggatgggcctgagtgacagcgtgcgcagctgccgcctcatcccccacagcggcagccaccgcatccggctgtatgagcgggaggactaccggggccagatgattgagttcacagaggactgcagctgcctgcaggaccgcttccgcttcaatgagatccacagcctgaatgtgctggagggctcctgggtgctgtatgagctgagcaactaccggggccggcagtacctgctgatgcctggggactaccgccgctaccaggactggggcgccaccaatgcccgggtgggcagcctgcggcgggtgattgacttctcctag

SEQ ID NO: 148606 - DNA, 537 bp, synthetic construct
  misc_feature 1..537: note = Description of Artificial Sequence: Synthetic coding sequence
  source 1..537: mol_type = other DNA
atgagcaagacaggcaccaagatcaccttctatgaggacaagaacttccagggcagaagatatgactgtgactgtgactgtgccgacttccacacctacctgagccgctgcaacagcatcaaggtggagggcggcacctgggccgtgtatgaaagacccaactttgctggctacatgtacatcctgccccagggcgagtacccagagtaccagcgctggatgggcctgaatgaccggctgagcagctgcagagctgtgcacctgcccagcggcggccagtacaagatccagatctttgagaagggggacttcagcggccagatgtatgagaccacagaggactgccccagcatcatggagcagttccacatgagggagatccacagctgcaaggtgctggagggcgtgtggatcttctatgagctgcccaactaccggggccggcagtacctgctggacaagaaggagtacaggaagcccatcgactggggcgccgccagccctgctgtgcagagcttccgccgcatcgtggagtag

SEQ ID NO: 148607 - DNA, 537 bp, synthetic construct; identical to SEQ ID NO: 148606
  misc_feature 1..537: note = Description of Artificial Sequence: Synthetic coding sequence
  source 1..537: mol_type = other DNA

SEQ ID NO: 148608 - DNA, 960 bp, synthetic construct
  misc_feature 1..960: note = Description of Artificial Sequence: Synthetic coding sequence
  source 1..960: mol_type = other DNA
atggccagcagcgctgctggctgtgtggtgattgtgggcagcggcgtgattggccgctcctgggccatgctgtttgccagcggcggcttccaggtgaagctgtatgacatcgagcagcagcagatcagaaatgccctggagaacatcaggaaggagatgaagctgctggagcaggccggcagcctgaagggcagcctgtctgtggaggagcagctgagcctcatcagcggctgccccaacatccaggaggccgtggagggcgccatgcacatccaggagtgtgtgcctgaggacctggagctgaagaagaagatctttgcccagctggacagcatcattgatgacagagtcatcctgagcagcagcaccagctgcctgatgcccagcaagctgtttgctggcctggtgcacgtgaagcagtgcatcgtggcccaccctgtgaaccccccctactacatccccctggtggagctggtgccccaccctgagacagcccccaccaccgtggacaggacccacgccctgatgaagaagattggccagtgccccatgagggtgcagaaggaggtggccggctttgtgctgaaccggctgcagtatgccatcatcagcgaggcctggaggctggtggaggagggcatcgtgagccccagcgacctggacctggtgatgtctgagggcctgggcatgagatatgccttcatcggccccctggagaccatgcacctgaatgctgagggcatgctgagctactgtgaccgctacagcgagggcatcaagcacgtgctgcagaccttcggccccatccctgagttcagccgggccacagctgagaaggtgaaccaggacatgtgcatgaaggtgcctgatgatcctgagcacctggccgcccggcggcagtggagagatgagtgcctgatgaggctggccaagctgaagagccaggtgcagccccagtag

SEQ ID NO: 148609 - DNA, 2346 bp, synthetic construct
  misc_feature 1..2346: note = Description of Artificial Sequence: Synthetic coding sequence
  source 1..2346: mol_type = other DNA
atggccaagacccccagcgaccacctgctgagcaccctggaggagctggtgccctatgactttgagaagttcaagttcaagctgcagaacacctctgtgcagaaggagcacagccgcatccccaggagccagatccagagggcccggcctgtgaagatggccaccctgctggtgacctactatggagaggagtatgctgtgcagctgaccctgcaggtgctgcgggccatcaaccagaggctgctggccgaggagctgcacagagctgccatccaggagtacagcacccaggagaatggaacagatgacagcgctgccagcagcagcctgggggagaacaagcccaggagcctgaagaccccagaccaccctgagggcaatgaaggaaatggcccccggccctatggaggaggagctgccagcctgcgctgcagccagcctgaggccggccggggcctgagcaggaagcccctgagcaagagaagagagaaggccagcgagggcctggatgcccagggcaagcccaggaccaggagccctgccctgcccggcggccgcagccctggcccctgccgggccctggagggcggccaggccgaggtgcggctgcggagaaatgccagcagcgctggccgcctgcagggcctggccggcggggcccctggccagaaggaatgtcggccctttgaggtgtacctgcccagcggcaagatgaggcccaggagcctggaggtgaccatcagcactggagagaaggccccagccaaccctgagatcctgctgaccctggaggagaagacagctgccaacctggacagcgccacagagccccgggcccggcccaccccagatggaggagccagcgctgacctgaaggagggccctggcaaccctgagcacagcgtgacaggccggcccccagacacagctgccagcccccgctgccacgcccaggagggggaccctgtggatggcacctgtgtgcgggacagctgcagcttccctgaggccgtgtctggccacccccaggccagcggcagccgcagccctggctgcccccgctgccaggacagccatgagaggaagagccctggcagcctgagcccccagcccctgccccagtgcaagaggcacctgaagcaggtgcagctgctcttctgtgaggaccatgatgagcccatctgcctgatctgcagcctgagccaggagcaccagggccaccgggtgcggcccatcgaggaggtggccctggagcacaagaagaagatccagaagcagctggagcacctgaagaagctgaggaagagcggggaggagcagaggagctatggagaggagaaggctgtgtccttcctgaagcagacagaggccctgaagcagagggtgcagaggaagctggagcaggtgtactacttcctggagcagcaggagcacttctttgtggccagcctggaggatgtgggccagatggtgggccagatcaggaaggcctatgacaccagggtgtcccaggacatcgccctgctggatgccctgattggagagctggaggccaaggagtgccagagcgagtgggagctgctgcaggacattggagacatcctgcaccgggccaagacagtgcctgtgcctgagaagtggaccaccccccaggagatcaagcagaagatccagctgctgcaccagaagtcagaatttgtggagaagagcaccaagtacttcagcgagaccctgcggtctgagatggagatgttcaacgtgcctgagctgattggagcccaggcccatgctgtgaatgtcatcctggatgctgagacagcctaccccaacctgatcttcagtgatgacctgaagtctgtgcggctgggcaacaagtgggagcggctgcctgatggcccccagagatttgacagctgcatcatcgtgctgggcagccccagcttcctgagcggccgccgctactgggaggtggaggtgggggacaagacagcctggatcctgggcgcctgcaagaccagcatcagcaggaaaggaaacatgaccctgagcccagaaaatggctactgggtggtgatcatgatgaaggaaaatgagtaccaggccagctctgtgccccccacccggctgctgatcaaggagccccccaagagggtgggcatctttgtggactacagagtgggcagcatctccttctacaacgtgacagcccggagccacatctacacctttgccagctgcagcttcagcggccccctgcagcccatcttcagccctggcaccagagatggcggcaagaacacagcccccctgaccatctgccctgtgggcggccagggccctgactag

SEQ ID NO: 148610 - DNA, 945 bp, synthetic construct
  misc_feature 1..945: note = Description of Artificial Sequence: Synthetic coding sequence
  source 1..945: mol_type = other DNA
atgagccgggtgcctgccttcctgtctgctgctgaggtggaggagcacctgcggagcagcagcctgctgatcccccccctggagacagccctggccaacttcagcagcggccctgagggcggcgtgatgcagcctgtgaggacagtggtgcctgtgaccaagcaccggggctacctgggcgtgatgcctgcctacagcgctgctgaagatgccctgaccaccaagctggtgaccttctatgaagatcggggcatcacctctgtggtgcccagccaccaggccaccgtgctgctgtttgagcccagcaatggcaccctgctggccgtgatggatggaaatgtcatcacagccaagaggacagctgctgtgtctgccatcgccaccaagttcctgaagccacccagcagcgaggtgctgtgcatcctgggcgctggggtgcaggcctacagccactatgagatcttcacagagcagttctccttcaaggaggtgcgcatctggaacagaaccaaggaaaatgctgagaagtttgctgacacagtgcagggcgaggtgcgggtgtgcagctctgtgcaggaggccgtggccggggctgatgtgatcatcaccgtgaccctggccacagagcccatcctgtttggagagtgggtgaagccaggggcccacatcaatgctgtgggcgccagcaggccagactggagggagctggatgatgagctgatgaaggaggccgtgctgtatgtggacagccaggaggccgccctgaaggagagcggagatgtgctgctgagcggggctgagatctttgctgagctgggggaggtgatcaagggcgtgaagccagcccactgtgagaagaccaccgtcttcaagagcctgggcatggctgtggaggacacagtggccgccaagctgatctatgacagctggagcagcggcaagtag

SEQ ID NO: 148611 - DNA, 819 bp, synthetic construct
  misc_feature 1..819: note = Description of Artificial Sequence: Synthetic coding sequence
  source 1..819: mol_type = other DNA
atgcagcctgtgaggacagtggtgcctgtgaccaagcaccggggctacctgggcgtgatgcctgcctacagcgctgctgaagatgccctgaccaccaagctggtgaccttctatgaagatcggggcatcacctctgtggtgcccagccaccaggccaccgtgctgctgtttgagcccagcaatggcaccctgctggccgtgatggatggaaatgtcatcacagccaagaggacagctgctgtgtctgccatcgccaccaagttcctgaagccacccagcagcgaggtgctgtgcatcctgggcgctggggtgcaggcctacagccactatgagatcttcacagagcagttctccttcaaggaggtgcgcatctggaacagaaccaaggaaaatgctgagaagtttgctgacacagtgcagggcgaggtgcgggtgtgcagctctgtgcaggaggccgtggccggggctgatgtgatcatcaccgtgaccctggccacagagcccatcctgtttggagagtgggtgaagccaggggcccacatcaatgctgtgggcgccagcaggccagactggagggagctggatgatgagctgatgaaggaggccgtgctgtatgtggacagccaggaggccgccctgaaggagagcggagatgtgctgctgagcggggctgagatctttgctgagctgggggaggtgatcaagggcgtgaagccagcccactgtgagaagaccaccgtcttcaagagcctgggcatggctgtggaggacacagtggccgccaagctgatctatgacagctggagcagcggcaagtag

SEQ ID NO: 148612 - DNA, 945 bp, synthetic construct; identical to SEQ ID NO: 148610
  misc_feature 1..945: note = Description of Artificial Sequence: Synthetic coding sequence
  source 1..945: mol_type = other DNA

SEQ ID NO: 148613 - DNA, 990 bp, synthetic construct
  misc_feature 1..990: note = Description of Artificial Sequence: Synthetic coding sequence
  source 1..990: mol_type = other DNA
atggccaccggccagaagctgatgagagctgtgcgggtgtttgaatttggaggccctgaggtgctgaagctgcggagtgacattgctgtgcccatccccaaggaccaccaggtgctgatcaaggtgcacgcctgtggggtgaaccctgtggagacctacatccgcagcggcacctacagcaggaagcccctgctgccctacaccccaggcagtgatgtggccggcgtgattgaagctgtgggggacaatgccagcgccttcaagaagggggacagagtcttcaccagcagcaccatcagcggcggctacgccgagtatgccctggccgctgaccacacagtgtacaagctgcctgagaagctggacttcaagcagggcgccgccatcggcatcccctacttcaccgcctaccgggccctgatccacagcgcctgtgtgaaggccggggagagcgtgctggtgcatggagccagcggcggcgtgggcctggccgcctgccagatcgcccgggcctacggcctgaagatcctgggcacagctggaacagaggagggccagaagatcgtgctgcagaatggagcccacgaggtgttcaaccaccgggaggtgaactacatcgacaagatcaagaagtatgtgggggagaagggcatcgacatcatcatcgagatgctggccaacgtgaacctgagcaaggacctgagcctgctgagccatggaggccgggtcatcgtggtgggcagccggggcaccatcgagatcaacccccgggacaccatggccaaggagagcagcatcattggagtgaccctcttcagcagcaccaaggaggagttccagcagtatgctgctgccctgcaggccggcatggagatcggctggctgaagcctgtgattggcagccagtaccccctggagaaggtggccgaggcccacgagaacatcatccacggcagcggggccaccgggaagatgatcctgctgctgtag

SEQ ID NO: 148614 - DNA, 732 bp, synthetic construct
  misc_feature 1..732: note = Description of Artificial Sequence: Synthetic coding sequence
  source 1..732: mol_type = other DNA
atggccaccggccagaagctgatgagagctgtgcgggtgtttgaatttggaggccctgaggtgctgaagctgcggagtgacattgctgtgcccatccccaaggaccaccaggtgctgatcaaggtgcacgcctgtggggtgaaccctgtggagacctacatccgcagcggcacctacagcaggaagcccctgctgccctacaccccaggcagtgatgtggccggcgtgattgaagctgtgggggacaatgccagcgccttcaagaagggggacagagtcttcaccagcagcaccatcagcggcggctacgccgagtatgccctggccgctgaccacacagtgtacaagctgcctgagaagctggacttcaagcagggcgccgccatcggcatcccctacttcaccgcctaccgggccctgatccacagcgcctgtgtgaaggccggggagagcgtgctggtgcatggagccagcggcggcgtgggcctggccgcctgccagatcgcccgggcctacggcctgaagatcctgggcacagctggaacagaggagggccagaagatcgtgctgcagaatggagcccacgaggtgttcaaccaccgggaggtgaactacatcgacaagatcaagaagtatgtgggggagaagggcatcgacatcatcatcgagatgctggccaacgtgaacctgagcaaggacctgagcctgctgagccatggaggccgggtgtag

SEQ ID NO: 148615 - DNA, 888 bp, synthetic construct
  misc_feature 1..888: note = Description of Artificial Sequence: Synthetic coding sequence
  source 1..888: mol_type = other DNA
atggccaccggccagaagctgatgagagctgtgcgggtgtttgaatttggaggccctgaggtgctgaagctgcggagtgacattgctgtgcccatccccaaggaccaccaggtgctgatcaaggtgcacgcctgtggggtgaaccctgtggagacctacatccgcagcggcacctacagcaggaagcccctgctgccctacaccccaggcagtgatgtggccggcgtgattgaagctgtgggggacaatgccagcgccttcaagaagggggacagagtcttcaccagcagcaccatcagcggcggctacgccgagtatgccctggccgctgaccacacagtgtacaagctgcctgagaagctggacttcaagcagggcgccgccatcggcatcccctacttcaccgcctaccgggccctgatccacagcgcctgtgtgaaggccggggagagcgtgctggtgcatggagccagcggcggcgtgggcctggccgcctgccagatcgcccgggcctacggcctgaagatcctgggcacagctggaacagaggagggccagaagatcgtgctgcagaatggagcccacgaggtgttcaaccaccgggaggtgaactacatcgacaagatcaaggtggtgggcagccggggcaccatcgagatcaacccccgggacaccatggccaaggagagcagcatcattggagtgaccctcttcagcagcaccaaggaggagttccagcagtatgctgctgccctgcaggccggcatggagatcggctggctgaagcctgtgattggcagccagtaccccctggagaaggtggccgaggcccacgagaacatcatccacggcagcggggccaccgggaagatgatcctgctgctgtag

SEQ ID NO: 148616 - DNA, 579 bp, synthetic construct
  misc_feature 1..579: note = Description of Artificial Sequence: Synthetic coding sequence
  source 1..579: mol_type = other DNA
atgcacctgctgagcagcgcctgtgtgaaggccggggagagcgtgctggtgcacggggccagcggaggagtgggcctggccgcctgccagatcgcccgggcctacggcctgaagatcctgggcacagctggaacagaggagggccagaagatcgtgctgcagaatggagcccacgaggtgttcaaccaccgggaggtgaactacatcgacaagatcaagaagtatgtgggggagaagggcatcgacatcatcatcgagatgctggccaacgtgaacctgagcaaggacctgagcctgctgagccacggcggccgggtgattgtggtgggcagccggggcaccatcgagatcaacccccgggacaccatggccaaggagagcagcatcatcggcgtgaccctcttcagcagcaccaaggaggagttccagcagtatgctgctgccctgcaggccggcatggagatcggctggctgaagcctgtgattggcagccagtaccccctggagaaggtggccgaggcccacgagaacatcatccacggcagcggggccaccgggaagatgatcctgctgctgtag

SEQ ID NO: 148617 - DNA, 990 bp, synthetic construct; identical to SEQ ID NO: 148613
  misc_feature 1..990: note = Description of Artificial Sequence: Synthetic coding sequence
  source 1..990: mol_type = other DNA

SEQ ID NO: 148618 - DNA, 621 bp, synthetic construct
  misc_feature 1..621: note = Description of Artificial Sequence: Synthetic coding sequence
  source 1..621: mol_type = other DNA
atggccaccggccagaagctgatgagagctgtgcgggtgtttgaatttggaggccctgaggtgctgaagctgcggagtgacattgctgtgcccatccccaaggaccaccaggtgctgatcaaggtgcacgcctgtggggtgaaccctgtggagacctacatccgcagcggcacctacagcaggaagcccctgctgccctacaccccaggcagtgatgtggccggcgtgattgaagctgtgggggacaatgccagcgccttcaagaagggggacagagtcttcaccagcagcaccatcagcggcggctacgccgagtatgccctggccgctgaccacacagtgtacaagctgcctgagaagctggacttcaagcagggcgccgccatcggcatcccctacttcaccgcctaccgggccctgatccacagcgcctgtgtgaaggccggggagagcgtgctggtgcatggagccagcggcggcgtgggcctggccgcctgccagatcgcccgggcctacggcctgaagatcctgggcacagctggaacagaggagggccagaagatcgtgctgcagaatggagcccacgaggtgttcaaccaccgggaggtgaactacatctag

SEQ ID NO: 148619 - DNA, 1050 bp, synthetic construct
  misc_feature 1..1050: note = Description of Artificial Sequence: Synthetic coding sequence
  source 1..1050: mol_type = other DNA
atgaagggcctgtacttccagcagagcagcacagatgaggagatcacctttgtgttccaggagaaggaggacctgcctgtgacagaggacaactttgtgaagctgcaggtgaaggcctgtgccctgagccagatcaacaccaagctgctggccgagatgaagatgaagaaggacctcttccctgtgggccgggagattgctggcatcgtgctggatgtgggcagcaaggtgtccttcttccagccagatgatgaggtggtgggcatcctgcccctggacagtgaagatcctggcctgtgtgaggtggtgcgggtgcatgagcactacctggtgcacaagccagagaaggtgacctggacagaggccgccggcagcatcagagatggagtgcgggcctacacagccctgcactacctgagccacctgagccctgggaagtctgtgctgatcatggatggagccagcgccttcggcaccatcgccatccagctggcccaccacagaggagccaaggtgatcagcacagcctgcagcctggaggacaagcagtgcctggagcgcttccggccccccatcgcccgggtgattgatgtgtccaatggcaaggtgcacgtggccgagagctgcctggaggagactggaggcctgggcgtggacatcgtgctggatgctggggtgcggctgtacagcaaggatgatgagcctgctgtgaagctgcagctgctgccccacaagcatgacatcatcaccctgctgggcgtgggcggccactgggtgaccacagaggagaacctgcagctggaccccccagacagccactgcctcttcctgaagggggccaccctggccttcctgaatgatgaggtgtggaacctgagcaatgtgcagcagggcaagtacctgtgcatcctgaaggatgtgatggagaagctgagcactggagtcttccggccccagctggatgagcccatccccctgtatgaggccaaggtgtccatggaggccgtgcagaagaaccagggcaggaagaagcaggtggtgcagttctag

SEQ ID NO: 148620 - DNA, 546 bp, synthetic construct
  misc_feature 1..546: note = Description of Artificial Sequence: Synthetic coding sequence
  source 1..546: mol_type = other DNA
atgaagggcctgtacttccagcagagcagcacagatgaggagatcacctttgtgttccaggagaaggaggacctgcctgtgacagaggacaactttgtgaagctgcaggtgaaggcctgtgccctgagccagatcaacaccaagctgctggccgagatgaagatgaagaaggacctcttccctgtgggccgggagattgctggcatcgtgctggatgtgggcagcaaggtgtccttcttccagccagatgatgaggtggtgggcatcctgcccctggacagtgaagatcctggcctgtgtgaggtggtgcgggtgcatgagcactacctggtgcacaagccagagaaggtgacctggacagaggccgccggcagcatcagagatggagtgcgggcctacacagccctgcactacctgagccacctgagccctgggaagtctgtgctgatcatggatggagccagcgccttcggcaccatcgccatccagctggcccaccacagaggagccaaggtgatcagcacagcctgcagcctggaggactag

SEQ ID NO: 148621 - DNA, 60 bp, synthetic construct
  misc_feature 1..60: note = Description of Artificial Sequence: Synthetic coding sequence
  source 1..60: mol_type = other DNA
atgaagggcctgtacttccagcagagcagcacagatgaggagatcacctttgtgttctag

SEQ ID NO: 148622 - DNA, 597 bp, synthetic construct
  misc_feature 1..597: note = Description of Artificial Sequence: Synthetic coding sequence
  source 1..597: mol_type = other DNA
atgaagggcctgtacttccagcagagcagcacagatgaggagatcacctttgtgttccaggagaaggaggacctgcctgtgacagaggacaactttgtgaagctgcaggtgaaggcctgtgccctgagccagatcaacaccaagctgctggccgagatgaagatgaagaaggacctcttccctgtgggccgggagattgctggcatcgtgctggatgtgggcagcaaggtgtccttcttccagccagatgatgaggtggtgggcatcctgcccctggacagtgaagatcctggcctgtgtgaggtggtgcgggtgcatgagcactacctggtgcacaagccagagaaggtgacctggacagaggccgccggcagcatcagagatggagtgcgggcctacacagccctgcactacctgagccacctgagccctgggaagtctgtgctgatcatggatggagccagcgccttcggcaccatcgccatccagctggcccaccacagaggagccaaggtgatcagcacagcctgcagcctggaggacaagcagtgcctggagcgcttccggccccccatcgagaacagcaccatcgcctag

SEQ ID NO: 148623 - DNA, 2916 bp, synthetic construct
  misc_feature 1..2916: note = Description of Artificial Sequence: Synthetic coding sequence
  source 1..2916: mol_type = other DNA
atggagctgagtgatgccaacctgcagaccctgacagagtacctgaagaagaccctggaccctgaccctgccatccggcggcctgctgagaagttcctggagagcgtggagggcaaccagaactaccccctgctgctgctgaccctgctggagaagagccaggacaacgtcatcaaggtgtgtgcctctgtgaccttcaagaactacatcaagaggaactggagaattgtggaggatgagcccaacaagatctgtgaggccgacagagtggccatcaaggccaacatcgtgcacctgatgctgagcagccctgagcagatccagaagcagctgagtgatgccatcagcatcatcggccgggaggacttcccccagaagtggccagacctgctgacagagatggtgaaccgcttccagagcggggacttccacgtgatcaatggagtgctgaggacagcccacagcctcttcaagcgctacagacatgagttcaagagcaatgagctgtggacagagatcaagctggtgctggatgcctttgccctgcccctgaccaacctcttcaaggccaccatcgagctgtgcagcacccacgccaatgatgccagcgccctgcgcatcctcttcagcagcctcatcctgatcagcaagctgttctacagcctgaacttccaggacctgcctgagttctttgaggacaacatggagacctggatgaacaacttccacaccctgctgaccctggacaacaagctgctgcagacagatgatgaggaggaggccggcctgctggagctgctgaagagccagatctgtgacaatgctgccctgtatgcccagaagtatgatgaggagttccagcgctacctgcccaggtttgtgacagccatctggaacctgctggtgaccaccggccaggaggtgaagtatgacctgctggtgtccaatgccatccagttcctggcctctgtgtgtgagcggccccactacaagaacctgtttgaggaccagaacaccctgaccagcatctgtgagaaggtgattgtgcccaacatggagttccgggctgctgatgaggaggcctttgaggacaacagcgaggagtacatcagaagagacctggagggcagtgacatcgacaccaggagaagagctgcctgtgacctggtgcggggcctgtgcaagttctttgagggccctgtgacaggcatcttcagcggctacgtgaacagcatgctgcaggagtatgccaagaaccccagcgtgaactggaagcacaaggatgctgccatctacctggtgaccagcctggccagcaaggcccagacccagaagcacggcatcacccaggccaatgagctggtgaacctgacagagttctttgtgaaccacatcctgcctgacctgaagagcgccaacgtgaatgagttccctgtgctgaaggcagatggcatcaagtacatcatgatcttcaggaaccaggtgcccaaggagcacctgctggtgtccatccccctgctgatcaaccacctgcaggccgagagcatcgtggtgcacacctacgccgcccacgccctggagcggctcttcaccatgaggggccccaacaatgccaccctcttcaccgctgctgagatcgccccctttgtggagatcctgctgaccaacctcttcaaggccctgaccctgcccggcagcagtgaaaatgagtacatcatgaaggccatcatgaggagcttcagcctgctgcaggaggccatcatcccctacatccccaccctcatcacccagctgacccagaagctgctggccgtgtccaagaaccccagcaagccccacttcaaccactacatgtttgaggccatctgcctgagcatccgcatcacctgcaaggccaacccagctgctgtggtgaactttgaggaggccctcttcctggtgttcacagagatcctgcagaatgatgtgcaggagttcatcccctacgtgttccaggtgatgagcctgctgctggagacccacaagaatgacatccccagcagctacatggccctcttcccccacctgctgcagcctgtgctgtgggagaggacaggcaacatcccagccctggtgcggctgctgcaggccttcctggagcggggcagcaacaccatcgccagcgctgctgctgacaagatccctggcctgctgggcgtcttccagaagctgattgccagcaaggccaatgaccaccagggcttctacctgctgaacagcatcatcgagcacatgcctcctgagagcgtggaccagtacaggaagcagatcttcatcctgctcttccagaggctgcagaacagcaagaccaccaagttcatcaagagcttcctggtgttcatcaacctgtactgcatcaagtatggagccctggccctgcaggagatctttgatggcatccagcccaagatgtttggcatggtgctggagaagatcatcatccctgagatccagaaggtgtctggaaatgtggagaagaagatctgtgctgtgggcatcaccaagctgctgacagagtgcccccccatgatggacacagagtacaccaagctgtggacccccctgctgcagagcctgattggcctgtttgagctgcctgaagatgacaccatcccagatgaggagcacttcattgatattgaggacaccccaggctaccagacagccttcagccagctggcctttgctgggaagaaggagcatgaccctgtgggccagatggtgaacaaccccaagatccacctggcccagagcctgcacaagctgagcacagcctgccccggccgggtgcccagcatggtgtccaccagcctgaatgctgaggccctgcagtacctgcagggctacctgcaggccgcctctgtgaccctgctgtag

SEQ ID NO: 148624 - DNA, 2748 bp, synthetic construct
  misc_feature 1..2748: note = Description of Artificial Sequence: Synthetic coding sequence
  source 1..2748: mol_type = other DNA
atggagctgagtgatgccaacctgcagaccctgacagagtacctgaagaagaccctggaccctgaccctgccatccggcggcctgctgagaagttcctggagagcgtggagggcaaccagaactaccccctgctgctgctgaccctgctggagaagagccaggacaacgtcatcaaggtgtgtgcctctgtgaccttcaagaactacatcaagaggaactggagaattgtggaggatgagcccaacaagatctgtgaggccgacagagtggccatcaaggccaacatcgtgcacctgatgctgagcagccctgagcagatccagaagcagctgagtgatgccatcagcatcatcggccgggaggacttcccccagaagtggccagacctgctgacagagatggtgaaccgcttccagagcggggacttccacgtgatcaatggagtgctgaggacagcccacagcctcttcaagcgctacagacatgagttcaagagcaatgagctgtggacagagatcaagctggtgctggatgcctttgccctgcccctgaccaacctcttcaaggccaccatcgagctgtgcagcacccacgccaatgatgccagcgccctgcgcatcctcttcagcagcctcatcctgatcagcaagctgttctacagcctgaacttccaggacctgcctgagttctttgaggacaacatggagacctggatgaacaacttccacaccctgctgaccctggacaacaagctgctgcagacagacctggtgtccaatgccatccagttcctggcctctgtgtgtgagcggccccactacaagaacctgtttgaggaccagaacaccctgaccagcatctgtgagaaggtgattgtgcccaacatggagttccgggctgctgatgaggaggcctttgaggacaacagcgaggagtacatcagaagagacctggagggcagtgacatcgacaccaggagaagagctgcctgtgacctggtgcggggcctgtgcaagttctttgagggccctgtgacaggcatcttcagcggctacgtgaacagcatgctgcaggagtatgccaagaaccccagcgtgaactggaagcacaaggatgctgccatctacctggtgaccagcctggccagcaaggcccagacccagaagcacggcatcacccaggccaatgagctggtgaacctgacagagttctttgtgaaccacatcctgcctgacctgaagagcgccaacgtgaatgagttccctgtgctgaaggcagatggcatcaagtacatcatgatcttcaggaaccaggtgcccaaggagcacctgctggtgtccatccccctgctgatcaaccacctgcaggccgagagcatcgtggtgcacacctacgccgcccacgccctggagcggctcttcaccatgaggggccccaacaatgccaccctcttcaccgctgctgagatcgccccctttgtggagatcctgctgaccaacctcttcaaggccctgaccctgcccggcagcagtgaaaatgagtacatcatgaaggccatcatgaggagcttcagcctgctgcaggaggccatcatcccctacatccccaccctcatcacccagctgacccagaagctgctggccgtgtccaagaaccccagcaagccccacttcaaccactacatgtttgaggccatctgcctgagcatccgcatcacctgcaaggccaacccagctgctgtggtgaactttgaggaggccctcttcctggtgttcacagagatcctgcagaatgatgtgcaggagttcatcccctacgtgttccaggtgatgagcctgctgctggagacccacaagaatgacatccccagcagctacatggccctcttcccccacctgctgcagcctgtgctgtgggagaggacaggcaacatcccagccctggtgcggctgctgcaggccttcctggagcggggcagcaacaccatcgccagcgctgctgctgacaagatccctggcctgctgggcgtcttccagaagctgattgccagcaaggccaatgaccaccagggcttctacctgctgaacagcatcatcgagcacatgcctcctgagagcgtggaccagtacaggaagcagatcttcatcctgctcttccagaggctgcagaacagcaagaccaccaagttcatcaagagcttcctggtgttcatcaacctgtactgcatcaagtatggagccctggccctgcaggagatctttgatggcatccagcccaagatgtttggcatggtgctggagaagatcatcatccctgagatccagaaggtgtctggaaatgtggagaagaagatctgtgctgtgggcatcaccaagctgctgacagagtgcccccccatgatggacacagagtacaccaagctgtggacccccctgctgcagagcctgattggcctgtttgagctgcctgaagatgacaccatcccagatgaggagcacttcattgatattgaggacaccccaggctaccagacagccttcagccagctggcctttgctgggaagaaggagcatgaccctgtgggccagatggtgaacaaccccaagatccacctggcccagagcctgcacaagctgagcacagcctgccccggccgggtgcccagcatggtgtccaccagcctgaatgctgaggccctgcagtacctgcagggctacctgcaggccgcctctgtgaccctgctgtag

SEQ ID NO: 148625 - DNA, 1710 bp, synthetic construct
  misc_feature 1..1710: note = Description of Artificial Sequence: Synthetic coding sequence
  source 1..1710: mol_type = other DNA
atggagacctggatgaacaacttccacaccctgctgaccctggacaacaagctgctgcagacagatgatgaggaggaggccggcctgctggagctgctgaagagccagatctgtgacaatgctgccctgtatgcccagaagtatgatgaggagttccagcgctacctgcccaggtttgtgacagccatctggaacctgctggtgaccaccggccaggaggtgaagtatgacctgctggtgtccaatgccatccagttcctggcctctgtgtgtgagcggccccactacaagaacctgtttgaggaccagaacaccctgaccagcatctgtgagaagagcatcgtggtgcacacctacgccgcccacgccctggagcggctcttcaccatgaggggccccaacaatgccaccctcttcaccgctgctgagatcgccccctttgtggagatcctgctgaccaacctcttcaaggccctgaccctgcccggcagcagtgaaaatgagtacatcatgaaggccatcatgaggagcttcagcctgctgcaggaggccatcatcccctacatccccaccctcatcacccagctgacccagaagctgctggccgtgtccaagaaccccagcaagccccacttcaaccactacatgtttgaggccatctgcctgagcatccgcatcacctgcaaggccaacccagctgctgtggtgaactttgaggaggccctcttcctggtgttcacagagatcctgcagaatgatgtgcaggagttcatcccctacgtgttccaggtgatgagcctgctgctggagacccacaagaatgacatccccagcagctacatggccctcttcccccacctgctgcagcctgtgctgtgggagaggacaggcaacatcccagccctggtgcggctgctgcaggccttcctggagcggggcagcaacaccatcgccagcgctgctgctgacaagatccctggcctgctgggcgtcttccagaagctgattgccagcaaggccaatgaccaccagggcttctacctgctgaacagcatcatcgagcacatgcctcctgagagcgtggaccagtacaggaagcagatcttcatcctgctcttccagaggctgcagaacagcaagaccaccaagttcatcaagagcttcctggtgttcatcaacctgtactgcatcaagtatggagccctggccctgcaggagatctttgatggcatccagcccaagatgtttggcatggtgctggagaagatcatcatccctgagatccagaaggtgtctggaaatgtggagaagaagatctgtgctgtgggcatcaccaagctgctgacagagtgcccccccatgatggacacagagtacaccaagctgtggacccccctgctgcagagcctgattggcctgtttgagctgcctgaagatgacaccatcccagatgaggagcacttcattgatattgaggacaccccaggctaccagacagccttcagccagctggcctttgctgggaagaaggagcatgaccctgtgggccagatggtgaacaaccccaagatccacctggcccagagcctgcacaagctgagcacagcctgccccggccgggtgcccagcatggtgtccaccagcctgaatgctgaggccctgcagtacctgcagggctacctgcaggccgcctctgtgaccctgctgtag

SEQ ID NO: 148626 - DNA, 2265 bp, synthetic construct
  misc_feature 1..2265: note = Description of Artificial Sequence: Synthetic coding sequence
  source 1..2265: mol_type = other DNA
atgctgagcaacctgaacttccaggacctgcctgagttctttgaggacaacatggagacctggatgaacaacttccacaccctgctgaccctggacaacaagctgctgcagacagatgatgaggaggaggccggcctgctggagctgctgaagagccagatctgtgacaatgctgccctgtatgcccagaagtatgatgaggagttccagcgctacctgcccaggtttgtgacagccatctggaacctgctggtgaccaccggccaggaggtgaagtatgacctgctggtgtccaatgccatccagttcctggcctctgtgtgtgagcggccccactacaagaacctgtttgaggaccagaacaccctgaccagcatctgtgagaaggtgattgtgcccaacatggagttccgggcagcagatgaggaggcctttgaggacaacagcgaggagtacatccggcgggacctggagggcagtgacatcgacacccggcggcgggccgcctgtgacctggtgcggggcctgtgcaagttctttgagggccctgtgacaggcatcttcagcggctacgtgaacagcatgctgcaggagtatgccaagaaccccagcgtgaactggaagcacaaggatgctgccatctacctggtgaccagcctggccagcaaggcccagacccagaagcacggcatcacccaggccaatgagctggtgaacctgacagagttctttgtgaaccacatcctgcctgacctgaagagcgccaacgtgaatgagttccctgtgctgaaggcagatggcatcaagtacatcatgatcttcaggaaccaggtgcccaaggagcacctgctggtgtccatccccctgctgatcaaccacctgcaggccgagagcatcgtggtgcacacctatgctgcccacgccctggagcggctcttcaccatgaggggccccaacaatgccaccctcttcaccgctgctgagatcgccccctttgtggagatcctgctgaccaacctcttcaaggccctgaccctgcccggcagcagtgaaaatgagtacatcatgaaggccatcatgaggagcttcagcctgctgcaggaggccatcatcccctacatccccaccctcatcacccagctgacccagaagctgctggccgtgtccaagaaccccagcaagccccacttcaaccactacatgtttgaggccatctgcctgagcatccgcatcacctgcaaggccaacccagctgctgtggtgaactttgaggaggccctcttcctggtgttcacagagatcctgcagaatgatgtgcaggagttcatcccctacgtgttccaggtgatgagcctgctgctggagacccacaagaatgacatccccagcagctacatggccctcttcccccacctgctgcagcctgtgctgtgggagaggactggaaacatcccagccctggtgcggctgctgcaggccttcctggagcggggcagcaacaccatcgccagcgctgctgctgacaagatccctggcctgctgggcgtcttccagaagctgattgccagcaaggccaatgaccaccagggcttctacctgctgaacagcatcatcgagcacatgcctcctgagagcgtggaccagtacaggaagcagatcttcatcctgctcttccagaggctgcagaacagcaagaccaccaagttcatcaagagcttcctggtgttcatcaacctgtactgcatcaagtacggggccctggccctgcaggagatctttgatggcatccagcccaagatgtttggcatggtgctggagaagatcatcatccctgagatccagaaggtgtctggaaatgtggagaagaagatctgtgctgtgggcatcaccaagctgctgacagaatgtcctcccatgatggacacagagtacaccaagctgtggacccccctgctgcagagcctcatcggcctgtttgagctgcctgaagatgacaccatcccagatgaggagcacttcatcgacatcgaggacaccccaggctaccagacagccttcagccagctggcctttgctgggaagaaggagcatgaccctgtgggccagatggtgaacaaccccaagatccacctggcccagagcctgcacaagctgagcacagcctgccccggccgggtgcccagcatggtgtccaccagcctgaatgctgaggccctgcagtacctgcagggctacctgcaggccgcctctgtgaccctgctgtag

SEQ ID NO: 148627 - DNA, 888 bp, synthetic construct; identical to SEQ ID NO: 143967
  misc_feature 1..888: note = Description of Artificial Sequence: Synthetic coding sequence
  source 1..888: mol_type = other DNA

SEQ ID NO: 148628 - DNA, 1353 bp, synthetic construct
  misc_feature 1..1353: note = Description of Artificial Sequence: Synthetic coding sequence
  source 1..1353: mol_type = other DNA
atgtctgccatccaggccgcctggcccagcggcacagaatgtattgccaagtacaacttccatggaacagctgagcaggacctgcccttctgcaagggagatgtgctgaccatcgtggccgtgaccaaggaccccaactggtacaaggccaagaacaaggtgggccgggagggcatcatcccagccaactacgtgcagaagcgggagggcgtgaaggccggcaccaagctgagcctgatgccctggttccacggcaagatcacccgggagcaggccgagcggctgctgtacccacctgagaccggcctcttcctggtgcgggagagcaccaactacccaggggactacaccctgtgtgtgtcctgtgatggcaaggtggagcactaccgcatcatgtaccacgccagcaagctgagcattgatgaggaggtgtactttgagaacctgatgcagctggtggagcactacaccagtgatgctgatggcctgtgcaccaggctcatcaagcccaaggtgatggagggcaccgtggccgcccaggatgagttctaccgcagcggctgggccctgaacatgaaggagctgaagctgctgcagaccatcggcaaaggagaatttggagatgtgatgctgggggactaccggggcaacaaggtggccgtgaagtgcatcaagaatgatgccacagcccaggccttcctggccgaggcctctgtgatgacccagctgcggcacagcaacctggtgcagctgctgggcgtgattgtggaggagaagggcggcctgtacatcgtgacagagtacatggccaagggcagcctggtggactacctgcggagccggggccgctctgtgctgggcggggactgcctgctgaagttcagcctggatgtgtgtgaggccatggagtacctggagggcaacaactttgtgcaccgggacctggccgccagaaatgtgctggtgtctgaggacaacgtggccaaggtgtctgactttggcctgaccaaggaggccagcagcacccaggacaccgggaagctgcctgtgaagtggacagcccctgaggccctgcgggagaagaagttcagcaccaagagtgatgtgtggagctttggcatcctgctgtgggagatctacagctttggccgggtgccctacccccgcatccccctgaaggatgtggtgccccgggtggagaagggctacaagatggatgccccagatggctgccccccagctgtgtatgaggtgatgaagaactgctggcacctggatgctgccatgaggcccagcttcctgcagctgcgggagcagctggagcacatcaagacccatgagctgcacctgtag

SEQ ID NO: 148629 - DNA, 1353 bp, synthetic construct; identical to SEQ ID NO: 148628
  misc_feature 1..1353: note = Description of Artificial Sequence: Synthetic coding sequence
  source 1..1353: mol_type = other DNA

SEQ ID NO: 148630 - DNA, 1200 bp, synthetic construct
  misc_feature 1..1200: note = Description of Artificial Sequence: Synthetic coding sequence
  source 1..1200: mol_type = other DNA
atgtctgccatccaggccgcctggcccagcggcacagaatgtattgccaagtacaacttccatggaacagctgagcaggacctgcccttctgcaagggagatgtgctgaccatcgtggccgtgaccaaggaccccaactggtacaaggccaagaacaaggtgggccgggagggcatcatcccagccaactacgtgcagaagcgggagggcgtgaaggccggcaccaagctgagcctgatgccctggttccacggcaagctgagcattgatgaggaggtgtactttgagaacctgatgcagctggtggagcactacaccagtgatgctgatggcctgtgcaccaggctcatcaagcccaaggtgatggagggcaccgtggccgcccaggatgagttctacagaagtggctgggccctgaacatgaaggagctgaagctgctgcagaccatcggcaagggggagtttggagatgtgatgctgggggactaccggggcaacaaggtggccgtgaagtgcatcaagaatgatgccacagcccaggccttcctggccgaggcctctgtgatgacccagctgcggcacagcaacctggtgcagctgctgggcgtcatcgtggaggagaagggcggcctgtacatcgtgacagagtacatggccaagggcagcctggtggactacctgcggagccggggccgctctgtgctgggcggggactgcctgctgaagttcagcctggatgtgtgtgaggccatggagtacctggagggcaacaactttgtgcaccgggacctggccgccagaaatgtgctggtgtctgaagataatgtggccaaggtgtctgactttggcctgaccaaggaggccagcagcacccaggacaccgggaagctgcctgtgaagtggacagcccctgaggccctgcgggagaagaagttcagcaccaagagtgatgtgtggagctttggcatcctgctgtgggagatctacagctttggccgggtgccctacccccgcatccccctgaaggatgtggtgccccgggtggagaagggctacaagatggatgccccagatggctgccccccagctgtgtatgaggtgatgaagaactgctggcacctggatgctgccatgaggcccagcttcctgcagctgcgggagcagctggagcacatcaagacccatgagctgcacctgtag

SEQ ID NO: 148631 - DNA, 783 bp, synthetic construct
  misc_feature 1..783: note = Description of Artificial Sequence: Synthetic coding sequence
  source 1..783: mol_type = other DNA
atggtggccgccccctgggccacccaggagcaggaggagggccggggcatccagcccggggacagaggagaccagaagtctgctgccagccagaagcccaggagccggggcatcctgcacagcctcttctgctgcgtgtgcagagatgatggagaggccctgcctgcccacagcggggcccccctgctggtggaggagaatggagccatccccaagacccctgtgcagtacctgctgcctgaggccaaggcccaggacagcgacaagatctgtgtggtgattgacctggatgagaccctggtgcacagcagcttcaagcctgtgaacaatgctgacttcatcatccctgtggagattgatggagtggtgcaccaggtgtatgtgctgaagaggcctcatgtggatgagttcctgcagaggatgggagagctgtttgaatgtgtgctcttcaccgccagcctggccaagtatgctgaccctgtggccgacctgctggacaagtggggcgccttccgggcccggctcttccgggagagctgtgtgttccaccggggcaactacgtgaaggacctgagccggctgggccgggacctgcggcgggtgctgatcctggacaacagccctgccagctatgtgttccacccagacaatgctgtgcctgtggcctcctggtttgacaacatgtctgacacagagctgcatgacctgctgcccttctttgagcagctgagccgggtggatgatgtgtacagcgtgctgcggcagccccggcccggcagctag

SEQ ID NO: 148632 - DNA, 2604 bp, synthetic construct
  misc_feature 1..2604: note = Description of Artificial Sequence: Synthetic coding sequence
  source 1..2604: mol_type = other DNA
atggaggtgcctgctgctggccgggtgcctgctgagggcgcccccacagctgctgtggccgaggtgcgctgccccggccctgcccccctgcggctgctggagtggagggtggccgccggggctgctgtgagaattggctctgtgctggccgtgtttgaggccgccgccagcgcccagagcagcggggccagccagagccgggtggccagcggcggctgtgtgcggcctgcccggcctgagcggcggctgcggtctgagcgggccggcgtggtgcgggagctgtgtgcccagcccggccaggtggtggcccctggagctgtgctggtgcggctggagggctgcagccaccctgtggtgatgaagggcctgtgtgccgagtgtggccaggacctgacccagctgcagagcaagaatggcaagcagcaggtgcccctgagcacagccaccgtgtccatggtgcacagcgtgcctgagctgatggtgtcctctgagcaggccgagcagctgggccgggaggaccagcagaggctgcacaggaacaggaagctggtgctgatggtggacctggaccagaccctcatccacaccacagagcagcactgccagcagatgagcaacaagggcatcttccacttccagctgggccgcggggagcccatgctgcacacccggctgcggccccactgcaaggacttcctggagaagatcgccaagctgtatgagctgcacgtgttcaccttcggcagccggctgtatgcccacaccatcgccggcttcctggaccctgagaagaagctgttcagccaccgcatcctgagcagagatgagtgcatcgaccccttcagcaagacaggcaacctgaggaacctcttcccctgtggggacagcatggtgtgcatcattgatgacagagaagatgtgtggaagtttgcccccaacctgatcaccgtgaagaagtatgtgtacttccagggcaccggggacatgaatgcccctcctggcagccgggagagccagaccaggaagaaggtgaaccacagccggggcacagaggtgtctgagcccagcccccctgtgcgggaccctgagggcgtgacccaggcccctggggtggagcccagcaatggcctggagaagccagcccgggagctgaatggaagtgaagctgccaccccccgggacagccccaggcctgggaagccagatgagcgggacatctggcccccagcccaggcccccaccagcagccaggagctggccggggcccctgagccccagggcagctgtgcccagggcggccgggtggcccctggccagaggcctgcccagggcgccaccggcacagacctggactttgacctgagcagtgacagcgagagcagcagcgagagcgagggcaccaagagcagcagcagcgccagtgatggagagagcgagggcaagaggggccggcagaagcccaaggccgcccctgagggcgctggggccctggcccagggcagcagcctggagcccggccggcctgctgcccccagcctgcccggggaggccgagcccggggcccacgccccagacaaggagcctgagctgggcggccaggaggagggggagagagatggcctgtgtggcctgggcaatggctgtgccgacaggaaggaggccgagacagagagccagaacagcgagctgagcggcgtgacagctggggagagcctggaccagagcatggaggaggaggaggaggaggacacagatgaagatgaccacctgatctacctggaggagatcctggtgcgggtgcacacagactactatgccaagtatgaccgctacctgaacaaggagattgaggaggccccagacatcaggaagatcgtgcctgagctgaagagcaaggtgctggctgatgtggccatcatcttcagcggcctgcaccccaccaacttccccatcgagaagacccgggagcactaccacgccacagccctgggcgccaagatcctgacccggctggtgctgagcccagatgccccagaccgggccacccacctgattgctgcccgggccggcacagagaaggtgctgcaggcccaggagtgtggccacctgcacgtggtgaacccagactggctgtggagctgcctggagcgctgggacaaggtggaggagcagctgttccccctgagagatgaccacaccaaggcccagcgggagaacagccctgctgccttcccagaccgggagggcgtgcccccaacagccctcttccaccccatgcctgtgctgcccaaggcccagcccggccctgaggtgcgcatctatgacagcaacacaggcaagctgatcagaactggagcccggggccccccagcccccagcagcagcctgcccatccggcaggagcccagcagcttccgctggaccaccagcctggagaaggccgccaccacagccacagccaggagaggaggcctgcggagcagaagaagaagccccagccctggcagccagggccctgctggcagcggccgcagcggccacctgcggcctgcccggggggcccggcagggcgctgggggccctgaggccacccggggcagctag

SEQ ID NO: 148633 - DNA, 2886 bp, synthetic construct
  misc_feature 1..2886: note = Description of Artificial Sequence: Synthetic coding sequence
  source 1..2886: mol_type = other DNA
atggaggtgcctgctgctggccgggtgcctgctgagggcgcccccacagctgctgtggccgaggtgcgctgccccggccctgcccccctgcggctgctggagtggagggtggccgccggggctgctgtgagaattggctctgtgctggccgtgtttgaggccgccgccagcgcccagagcagcggggccagccagagccgggtggccagcggcggctgtgtgcggcctgcccggcctgagcggcggctgcggtctgagcgggccggcgtggtgcgggagctgtgtgcccagcccggccaggtggtggcccctggagctgtgctggtgcggctggagggctgcagccaccctgtggtgatgaagggcctgtgtgccgagtgtggccaggacctgacccagctgcagagcaagaatggcaagcagcaggtgcccctgagcacagccaccgtgtccatggtgcacagcgtgcctgagctgatggtgtcctctgagcaggccgagcagctgggccgggaggaccagcagaggctgcacaggaacaggaagctggtgctgatggtggacctggaccagaccctcatccacaccacagagcagcactgccagcagatgagcaacaagggcatcttccacttccagctgggccgcggggagcccatgctgcacacccggctgcggccccactgcaaggacttcctggagaagatcgccaagctgtatgagctgcacgtgttcaccttcggcagccggctgtatgcccacaccatcgccggcttcctggaccctgagaagaagctgttcagccaccgcatcctgagcagagatgagtgcatcgaccccttcagcaagacaggcaacctgaggaacctcttcccctgtggggacagcatggtgtgcatcattgatgacagagaagatgtgtggaagtttgcccccaacctgatcaccgtgaagaagtatgtgtacttccagggcaccggggacatgaatgcccctcctggcagccgggagagccagaccaggaagaaggtgaaccacagccggggcacagaggtgtctgagcccagcccccctgtgcgggaccctgagggcgtgacccaggcccctggggtggagcccagcaatggcctggagaagccagcccgggagctgaatggaagtgaagctgccaccccccgggacagccccaggcctgggaagccagatgagcgggacatctggcccccagcccaggcccccaccagcagccaggagctggccggggcccctgagccccagggcagctgtgcccagggcggccgggtggcccctggccagaggcctgcccagggcgccaccggcacagacctggactttgacctgagcagtgacagcgagagcagcagcgagagcgagggcaccaagagcagcagcagcgccagtgatggagagagcgagggcaagaggggccggcagaagcccaaggccgcccctgagggcgctggggccctggcccagggcagcagcctggagcccggccggcctgctgcccccagcctgcccggggaggccgagcccggggcccacgccccagacaaggagcctgagctgggcggccaggaggagggggagagagatggcctgtgtggcctgggcaatggctgtgccgacaggaaggaggccgagacagagagccagaacagcgagctgagcggcgtgacagctggggagagcctggaccagagcatggaggaggaggaggaggaggacacagatgaagatgaccacctgatctacctggaggagatcctggtgcgggtgcacacagactactatgccaagtatgaccgctacctgaacaaggagattgaggaggccccagacatcaggaagatcgtgcctgagctgaagagcaaggtgctggctgatgtggccatcatcttcagcggcctgcaccccaccaacttccccatcgagaagacccgggagcactaccacgccacagccctgggcgccaagatcctgacccggctggtgctgagcccagatgccccagaccgggccacccacctgattgctgcccgggccggcacagagaaggtgctgcaggcccaggagtgtggccacctgcacgtggtgaacccagactggctgtggagctgcctggagcgctgggacaaggtggaggagcagctgttccccctgagagatgaccacaccaaggcccagcgggagaacagccctgctgccttcccagaccgggagggcgtgcccccaacagccctcttccaccccatgcctgtgctgcccaaggcccagcccggccctgaggtgcgcatctatgacagcaacacaggcaagctgatcagaactggagcccggggccccccagcccccagcagcagcctgcccatccggcaggagcccagcagcttccgggctgtgcccccaccccagccccagatgtttggagaggagctgcctgatgcccaggatggagagcagcccggccccagcaggaggaagaggcagcccagcatgtctgagaccatgcccctgtacaccctgtgcaaggaggacctggagagcatggacaaggaggtggatgacatcctgggggagggcagtgatgacagcgacagcgagaagagaagacctgaggagcaggaggaggagccccagcccaggaagccaggcacccggcgggagaggaccctgggcgccccagccagcagcgagaggtctgctgctgggggccggggcccccggggccacaagaggaagctgaatgaagaagatgctgccagcgagagcagccgggagagcagcaatgaagatgagggcagcagcagcgaggctgatgagatggccaaggccctggaggccgagctgaatgacctgatgtag

SEQ ID NO: 148634 - DNA, 786 bp, synthetic construct
  misc_feature 1..786: note = Description of Artificial Sequence: Synthetic coding sequence
  source 1..786: mol_type = other DNA
atggacagcagcgctgtgatcacccagatcagcaaggaggaggcccggggccccctgcggggcaagggggaccagaagtctgctgccagccagaagcccaggagccggggcatcctgcacagcctcttctgctgcgtgtgcagagatgatggagaggccctgcctgcccacagcggggcccccctgctggtggaggagaatggagccatccccaagcagacccctgtgcagtacctgctgcctgaggccaaggcccaggacagcgacaagatctgtgtggtgattgacctggatgagaccctggtgcacagcagcttcaagcctgtgaacaatgctgacttcatcatccctgtggagattgatggagtggtgcaccaggtgtatgtgctgaagaggccccacgtggatgagttcctgcagaggatgggagagctgtttgaatgtgtgctcttcaccgccagcctggccaagtatgctgaccctgtggccgacctgctggacaagtggggcgccttccgggcccggctcttccgggagagctgtgtgttccaccggggcaactacgtgaaggacctgagccggctgggccgggacctgcggcgggtgctgatcctggacaacagccctgccagctatgtgttccacccagacaatgctgtgcctgtggcctcctggtttgacaacatgtctgacacagagctgcatgacctgctgcccttctttgagcagctgagccgggtggatgatgtgtacagcgtgctgcggcagcccaggcctggcagctag

SEQ ID NO: 148635 - DNA, 2928 bp, synthetic construct
  misc_feature 1..2928: note = Description of Artificial Sequence: Synthetic coding sequence
  source 1..2928: mol_type = other DNA
atggaggactatgagcaggagctgtgtggggtggaggatgacttccacaaccagtttgctgctgagctggaggtgctggccgagctggagggcgccagcacccccagccccagcggcgtgcccctcttcaccgctggccggccccccaggacctttgaggaggccctggcccggggagatgctgccagcagccctgccccagctgcctctgtgggcagcagccagggcggggccaggaagaggcaggtggatgctgacctgcagcctgctggcagcctgccccacgccccccgcatcaagaggccccggctgcaggtggtgaagaggctgaacttccgctctgaggagatggaggagcccccacctccagacagcagccccacagacatcaccccaccacccagccctgaggacctggccgagctgtggggccatggagtgtctgaggccgctgctgatgtgggcctgacccgggccagccctgctgccaggaaccctgtgctgcggcggccccccatcctggaggactatgtgcacgtgaccagcacagaaggagtgcgggcctacctggtgctgcgggctgaccccatggcccctggggtgcagggcagcctgctgcacgtgccctggaggggcggcggccagctggacctgctgggcgtgtccctggccagcctgaagaagcaggtggatggagagcggcgggagcggctgctgcaggaggcccagaagctgagtgacaccctgcacagcctgcggagcggggaggaggaggccgcccagcccctgggcgcccctgaggaggagcccacagatggccaggatgccagcagccactgcctgtgggtggatgaatttgcccccaggcactacacagagctgctgagtgatgacttcaccaaccgctgcctgctgaagtggctgaagctgtgggacctggtggtgtttggccacgagcggcccagcaggaagccccggcccagcgtggagcccgcccgggtgtccaaggaggccacagcccctgggaagtggaagagccatgagcaggtgctggaggagatgctggaggccggcctggaccccagccagaggcccaagcagaaggtggccctgctgtgtggccccccaggcctgggcaagaccaccctggcccacgtgattgcccggcatgctggctacagcgtggtggagatgaatgccagtgatgacaggagccctgaggtgttccgcaccagaattgaagctgccacccagatggagagcgtgctgggcgccggcggcaagcccaactgcctggtgattgatgaaattgatggagcccctgtggccgccatcaacgtgctgctgagcatcctgaacaggaagggcccccaggaggtgggcccccagggccctgctgtgcccagcggcggcggcagaagaagaagagctgagggcggcctgctgatgaggcccatcatctgcatctgcaatgaccagtttgcccccagcctgcggcagctgaagcagcaggccttcctgctgcacttcccccccaccctgcccagccggctggtgcagaggctgcaggaggtgtccctgcggcagggcatgagagctgaccccggggtgctggccgccctgtgtgagaagacagacaatgacatccgggcctgcatcaacaccctgcagttcctgtacagccggggccagcgggagctgtctgtgagagatgtgcaggccaccagggtgggcctgaaggaccagaggcggggcctcttctctgtgtggcaggaggtgttccagctgccccgggcccagaggcggcgggtgggccaggaccctgccctgcctgctgacaccctgctgctgggagatggagatgctggcagcctgaccagcgccagccagcgcttctacagagtgctgcacgccgccgccagcgctggggagcacgagaaggtggtgcagggcctgtttgacaacttcctgcggctgcggctgcgggacagcagcctgggcgctgtgtgtgtggccctggactggctggcctttgatgacctgctggccggggccgcccaccacagccagagcttccagctgctgcgctacccacccttcctgcctgtggccttccacgtgctgtttgccagcagccacaccccccgcatcaccttccccagcagccagcaggaggcccagaacaggatgagccagatgaggaacctgatccagaccctggtgtctggcatcgccccagccaccaggagccgggccaccccccaggccctgctgctggatgccctgtgcctgctgctggacatcctggcccccaagctgcggcctgtgtccacccagctgtacagcacccgggagaagcagcagctggccagcctggtgggcaccatgctggcctacagcctgacctaccggcaggagaggaccccagatggccagtacatctaccgcctggagcccaacgtggaggagctgtgccgcttccctgagctgcctgccaggaagcccctgacctaccagaccaagcagctgattgcccgggagattgaggtggagaagatgagaagagctgaggccagcgcccgggtggagaacagcccccaggtggatggcagccccccaggcctggagggcctgctgggcggcatcggggagaagggcgtgcacaggcctgcccccagaaatcatgagcagaggctggagcacatcatgaggcgggccgcccgggaggagcagcctgagaaggacttcttcggccgggtggtggtgcgcagcacagctgtgcccagcgctggggacacagcccctgagcaggacagcgtggagaggaggatgggcacagctgtgggccgctctgaggtgtggttccgcttcaatgaaggagtgtccaatgctgtgcggcgcagcctgtacatccgggacctgctgtag

SEQ ID NO: 148636 - DNA, 3555 bp, synthetic construct
  misc_feature 1..3555: note = Description of Artificial Sequence: Synthetic coding sequence
  source 1..3555: mol_type = other DNA
atgcacgtgaatgccagcgcccggcgctggggccggggcggggccgccgccctgcccggccctgctgccagcccccggcggcctgcccccaggacaggccctgtgggccggcccaccctggcccccagccccagccgggcccacgcccacgccaagaccaacctgctgcccggccgggctgtgcaggccccagatgctgtgcctggggccggcagcagccgggccccagcccgctggaggccccgggaccccggcagcagcgccccagatgcctggcagcgcttccggcctgcccccctgcgggcccagccccggcccccacccaggcctgcccctggccccccaccacccaggaaaggaggctgcggcggccagtggagggccccccaggacaggacccggggcctgcggagcaggaacagcccccggccccccctggcccagccccggctgcggcatgccaaccagtggagggcccctcctggcaccccagctgctgactggaggaggcctgcccggagcggccgggctgtgagagatggcggcggcggggccggcggcagcgagcgggagctgggcctggctgatggcatggaggactatgagcaggagctgtgtggggtggaggatgacttccacaaccagtttgctgctgagctggaggtgctggccgagctggagggcgccagcacccccagccccagcggcgtgcccctcttcaccgctggccggccccccaggacctttgaggaggccctggcccggggagatgctgccagcagccctgccccagctgcctctgtgggcagcagccagggcggggccaggaagaggcaggtggatgctgacctgcagcctgctggcagcctgccccacgccccccgcatcaagaggccccggctgcaggtggtgaagaggctgaacttccgctctgaggagatggaggagcccccacctccagacagcagccccacagacatcaccccaccacccagccctgaggacctggccgagctgtggggccacggcttcagcgaggccgctgctgatgtgggcctgacccgggccagccctgctgccagaaatcctgtgctgcggcggccccccatcctggaggactatgtgcacgtgaccagcacagagggcgtgcgggcctacctggtgctgcgggctgaccccatggcccctggggtgcagggcagcctgctgcacgtgccctggaggggcggcggccagctggacctgctgggcgtgtccctggccagcctgaagaagcaggtggatggagagcggcgggagcggctgctgcaggaggcccagaagctgagtgacaccctgcacaggtctggagaggaggaggccgcccagcccctgggcgcccctgaggaggagcccacagatggccaggatgccagcagccactgcctgtgggtggatgaatttgcccccaggcactacacagagctgctgagtgatgacttcaccaaccgctgcctgctgaagtggctgaagctgtgggacctggtggtgtttggacatgagcggcccagcaggaagccccggcccagcgtggagcccgcccgggtgtccaaggaggccacagcccctgggaagtggaagagccatgagcaggtgctggaggagatgctggaggccggcctggaccccagccagaggcccaagcagaaggtggccctgctgtgtggccccccaggcctgggcaagaccaccctggcccacgtgattgcccggcatgctggctacagcgtggtggagatgaatgccagtgatgacaggagccctgaggtgttccgcacccgcatcgaggccgccacccagatggagagcgtgctgggcgctgggggcaagcccaactgcctggtgattgatgaaattgatggagcccctgtggccgccatcaacgtgctgctgagcatcctgaacaggaagggcccccaggaggtgggcccccagggccctgctgtgcccagcggcggcggcagaagaagaagagctgagggcggcctgctgatgaggcccatcatctgcatctgcaatgaccagtttgcccccagcctgcggcagctgaagcagcaggccttcctgctgcacttcccccccaccctgcccagccggctggtgcagaggctgcaggagggcatgagagctgaccccggggtgctggccgccctgtgtgagaagacagacaatgacatccgggcctgcatcaacaccctgcagttcctgtacagccggggccagcgggagctgtctgtgagagatgtgcaggccaccagggtgggcctgaaggaccagaggcggggcctcttctctgtgtggcaggaggtgttccagctgccccgggcccagaggagcagccagcacgtgtctgtgctgacctgccacggcaccccaggagatgctggcctggtggtgctgcaggacatgggagatgctggcctgggcctgtgggatgtgctgctgctggcctggacccggcggggcaccttccctggccgcttctacagagtgctgcatgctgctgccagcgctggggagcacgagaaggtggtgcagggcctgtttgacaacttcctgcggctgcggctgcgggacagcagcctgggcgctgtgtgtgtggccctggactggctggcctttgatgacctgctggccggggccgcccaccacagccagagcttccagctgctgcgctacccacccttcctgcctgtggccttccacgtgctgtttgccagcagccacaccccccgcatcaccttccccagcagccagcaggaggcccagaacaggatgagccagatgaggaacctgatccagaccctggtgtctggaattgccccagccaccaggagccgggccaccccccaggccctgctgctggatgccctgtgcctgctgctggacatcctggcccccaagctgcggcctgtgtccacccagctgtacagcacccgggagaagcagcagctggccagcctggtgggcaccatgctggcctacagcctgacctaccggcaggagaggaccccagatggccagtacatctaccgcctggagcccaacgtggaggagctgtgccgcttccctgagctgcctgccaggaagcccctgacctaccagaccaagcagctgattgcccgggagattgaggtggagaagatgagaagagctgaggccagcgcccgggtggagaacagcccccaggtggatggcagccccccaggcctggagggcctgctgggcggcattggagagaagggcgtgcacaggcctgcccccaggaaccacgagcagaggctggagcacatcatgagaagagctgcccgggaggagcagcctgagaaggacttcttcggccgggtggtggtgcgcagcacagctgtgcccagcgctggggacacagcccctgagcaggacagcgtggagaggaggatgggcacagctgtgggccgctctgaggtgtggttccgcttcaatgaaggagtgtccaatgctgtgagaagaagcctgtacatccgggacctgctgtag

SEQ ID NO: 148637 - DNA, 3012 bp, synthetic construct
  misc_feature 1..3012: note = Description of Artificial Sequence: Synthetic coding sequence
  source 1..3012: mol_type = other DNA
atggaggactatgagcaggagctgtgtggggtggaggatgacttccacaaccagtttgctgctgagctggaggtgctggccgagctggagggcgccagcacccccagccccagcggcgtgcccctcttcaccgctggccggccccccaggacctttgaggaggccctggcccggggagatgctgccagcagccctgccccagctgcctctgtgggcagcagccagggcggggccaggaagaggcaggtggatgctgacctgcagcctgctggcagcctgccccacggccgcctggccgccctgccccagggcctgcggagcggccgggaggccgaggaggccagcggcagcctgcacgtgagccccccagccccccgcatcaagaggccccggctgcaggtggtgaagaggctgaacttccgctctgaggagatggaggagcccccacctccagacagcagccccacagacatcaccccaccacccagccctgaggacctggccgagctgtggggccatggagtgtctgaggccgctgctgatgtgggcctgacccgggccagccctgctgccaggaaccctgtgctgcggcggccccccatcctggaggactatgtgcacgtgaccagcacagaaggagtgcgggcctacctggtgctgcgggctgaccccatggcccctggggtgcagggcagcctgctgcacgtgccctggaggggcggcggccagctggacctgctgggcgtgtccctggccagcctgaagaagcaggtggatggagagcggcgggagcggctgctgcaggaggcccagaagctgagtgacaccctgcacagcctgcggagcggggaggaggaggccgcccagcccctgggcgcccctgaggaggagcccacagatggccaggatgccagcagccactgcctgtgggtggatgaatttgcccccaggcactacacagagctgctgagtgatgacttcaccaaccgctgcctgctgaagtggctgaagctgtgggacctggtggtgtttggccacgagcggcccagcaggaagccccggcccagcgtggagcccgcccgggtgtccaaggaggccacagcccctgggaagtggaagagccatgagcaggtgctggaggagatgctggaggccggcctggaccccagccagaggcccaagcagaaggtggccctgctgtgtggccccccaggcctgggcaagaccaccctggcccacgtgattgcccggcatgctggctacagcgtggtggagatgaatgccagtgatgacaggagccctgaggtgttccgcaccagaattgaagctgccacccagatggagagcgtgctgggcgccggcggcaagcccaactgcctggtgattgatgaaattgatggagcccctgtggccgccatcaacgtgctgctgagcatcctgaacaggaagggcccccaggaggtgggcccccagggccctgctgtgcccagcggcggcggcagaagaagaagagctgagggcggcctgctgatgaggcccatcatctgcatctgcaatgaccagtttgcccccagcctgcggcagctgaagcagcaggccttcctgctgcacttcccccccaccctgcccagccggctggtgcagaggctgcaggaggtgtccctgcggcagggcatgagagctgaccccggggtgctggccgccctgtgtgagaagacagacaatgacatccgggcctgcatcaacaccctgcagttcctgtacagccggggccagcgggagctgtctgtgagagatgtgcaggccaccagggtgggcctgaaggaccagaggcggggcctcttctctgtgtggcaggaggtgttccagctgccccgggcccagaggcggcgggtgggccaggaccctgccctgcctgctgacaccctgctgctgggagatggagatgctggcagcctgaccagcgccagccagcgcttctacagagtgctgcacgccgccgccagcgctggggagcacgagaaggtggtgcagggcctgtttgacaacttcctgcggctgcggctgcgggacagcagcctgggcgctgtgtgtgtggccctggactggctggcctttgatgacctgctggccggggccgcccaccacagccagagcttccagctgctgcgctacccacccttcctgcctgtggccttccacgtgctgtttgccagcagccacaccccccgcatcaccttccccagcagccagcaggaggcccagaacaggatgagccagatgaggaacctgatccagaccctggtgtctggcatcgccccagccaccaggagccgggccaccccccaggccctgctgctggatgccctgtgcctgctgctggacatcctggcccccaagctgcggcctgtgtccacccagctgtacagcacccgggagaagcagcagctggccagcctggtgggcaccatgctggcctacagcctgacctaccggcaggagaggaccccagatggccagtacatctaccgcctggagcccaacgtggaggagctgtgccgcttccctgagctgcctgccaggaagcccctgacctaccagaccaagcagctgattgcccgggagattgaggtggagaagatgagaagagctgaggccagcgcccgggtggagaacagcccccaggtggatggcagccccccaggcctggagggcctgctgggcggcatcggggagaagggcgtgcacaggcctgcccccagaaatcatgagcagaggctggagcacatcatgaggcgggccgcccgggaggagcagcctgagaaggacttcttcggccgggtggtggtgcgcagcacagctgtgcccagcgctggggacacagcccctgagcaggacagcgtggagaggaggatgggcacagctgtgggccgctctgaggtgtggttccgcttcaatgaaggagtgtccaatgctgtgcggcgcagcctgtacatccgggacctgctgtag

SEQ ID NO: 148638 - DNA, 1575 bp, synthetic construct
  misc_feature 1..1575: note = Description of Artificial Sequence: Synthetic coding sequence
  source 1..1575: mol_type = other DNA
atgaaggagccccgcatcttcccccgggagcggcccaccccctggacccgggcccccctgcccccccggggccgcctggatggcagcctgggcccccagggcggccctgtgctgaacacaggccaccccctgggcgtgaacagcgaccccttcctgatggctgctggcagcctgggcggcaacctgacccccttccccaggaaccccagccccttccctgccagcagcggcagcctggccagcaacccagcccccttccctgctggggcccgggaccccagcatggccagcttcccccggggcatgaaccccactggaactggagctgtgtccttccccaggcctgggggcctgctgggccctggccctggccctggccccaccctgaaccccaggactggagccctgcccggccctggccccctgagcaacccccggctgggcggcctgcccggccctggccccatgagcaaccccagggctgggggcctgctgggcgccggccctgacccccggggcggcggccccatgggccctggcagcggccccaacctgcgggccggcgtgctgctgaccagcggaaatggaccacccaaccccaggcctgtgggcctgggccctggccccaaccccaacctgcggagcggcttcctgggcaccaacccagcccccaggtctggagtcttccctggccctggcctgggccccaacccccggcccagcggcctgggccctggccccaacctggatgcccgggccggcggcctgctgggcactggaagtggcctgaacctgaggatggccggcccccagggcctggacctggcccccatcctgcgggccgccggcctgctgggcgccaacagcgccagcttcagccaggccagcggcaacatgggcaccagccccagctccatggcccgggtgcccggccccatgggccccaacagcggccccagcagccggggcatcggcctgcccggccccaaccccagccccatgagccgggcccctggccccatcggccccaacagcgcccacttcagcaggcctgtgggccccatgggcgtgaatgccaaccccttccccaggggggccggcagcagcgccttcagccagagcagcggcaccctggccagcaacccagccaccttccagaggtctgctggcctgcagggcagcaaccccaccatcttcccccgggccagcggccccctgggccccaacccagccaacttcccccgggccaccggcctgcagggccccagccccaccaccttccccaggagcacaggccccctgggccctggccaggtgaccttccccaggcctgctgctggccacctgggccccagccctgctggccctgtgggcatcaacccagcccccttcacccggcccaccggcaccctgggcctgaacccagccagcttccccaggatgaatggacctgctgggaagagctttgtgcccttcccccgggtgggcagcctgcccggcaccaacccagctgccttccccaggcctgggggccccatggccgccatgtacccaaatggcatgctgcccccatag

SEQ ID NO: 148639 - DNA, 366 bp, synthetic construct
  misc_feature 1..366: note = Description of Artificial Sequence: Synthetic coding sequence
  source 1..366: mol_type = other DNA
atggtgcagatcgtcatcagcagcgcccgggccggcggcctggccgagtgggtgctgatggagctgcagggcgagattgaggcccgctacagcacaggcctggccggcaacctgctgggggacctgcactacaccacagagggcatccctgtgctgattgtgggccaccacatcctgtatggcaagatcatccacctggagaagccctttgctgtgctggtgaagcacacccctggggaccaggactgtgatgagctgggccgggagaccggcacccgctacctggtgacagccctgatcaaggacaagatcctcttcaagacccggcccaagcccatcatcacctctgtgcccaagaaggtgtag

SEQ ID NO: 148640 - DNA, 366 bp, synthetic construct; identical to SEQ ID NO: 148639
  misc_feature 1..366: note = Description of Artificial Sequence: Synthetic coding sequence
  source 1..366: mol_type = other DNA

SEQ ID NO: 148641 - DNA, 1776 bp, synthetic construct
  misc_feature 1..1776: note = Description of Artificial Sequence: Synthetic coding sequence
  source 1..1776: mol_type = other DNA
atgaagtacatcctggtgactggaggagtcatcagcggcatcggcaagggcatcatcgccagctctgtgggcaccatcctgaagagctgtggcctgcacgtgaccagcatcaagattgacccctacatcaacattgatgctggcaccttcagcccctatgaacatggagaggtgtttgtgctggatgatggaggagaggtggacctggacctgggcaactatgagcgcttcctggacatccggctgaccaaggacaacaacctgaccaccgggaagatctaccagtatgtgatcaacaaggagaggaaaggagactacctgggcaagacagtgcaggtggtgccccacatcacagatgccatccaggagtgggtgatgaggcaggccctgatccctgtggatgaagatggcctggagccccaggtgtgtgtgattgagctgggcggcaccgtgggggacatcgagagcatgcccttcatcgaggccttccggcagttccagttcaaggtgaagcgggagaacttctgcaacatccacgtgtccctggtgccccagcccagcagcactggagagcagaagaccaagcccacccagaacagcgtgcgggagctgcggggcctgggcctgagcccagacctggtggtgtgccgctgcagcaaccccctggacacctctgtgaaggagaagatctccatgttctgccacgtggagcctgagcaggtgatctgtgtgcatgatgtgagcagcatctacagagtgcccctgctgctggaggagcagggcgtggtggactacttcctgcggcggctggacctgcccatcgagcggcagcccaggaagatgctgatgaagtggaaggagatggctgacagatatgaccggctgctggagacctgcagcatcgccctggtgggcaagtacaccaagttcagtgacagctatgccagcgtcatcaaggccctggagcacagcgccctggccatcaaccacaagctggagatcaagtacattgattctgctgacctggagcccatcaccagccaggaggagcctgtgcgctaccacgaggcctggcagaagctgtgcagcgcccatggagtgctggtgcctgggggctttggagtgcggggcacagagggcaagatccaggccatcgcctgggccaggaaccagaagaagcccttcctgggcgtgtgcctgggcatgcagctggccgtggtggagttcagcagaaatgtgctgggctggcaggatgccaacagcacagaatttgaccccaccaccagccaccctgtggtggtggacatgcctgagcacaaccctggccagatgggcggcaccatgaggctgggcaagaggaggaccctcttccagaccaagaacagcgtgatgaggaagctgtatggagatgctgactacctggaggagcggcaccgccacagatttgaggtgaaccctgtgtggaagaagtgcctggaggagcagggcctgaagtttgtgggccaggatgtggagggggagaggatggagatcgtggagctggaggaccaccccttctttgtgggcgtgcagtaccaccctgagttcctgagccggcccatcaagcccagccccccctacttcggcctgctgctggcctctgtgggccgcctgagccactacctgcagaagggctgccgcctgagcccccgggacacctacagcgacagaagtggcagcagcagcccagacagcgagatcacagagctgaagttccccagcatcaaccacgactag

SEQ ID NO: 148642 - DNA, 1776 bp, synthetic construct; identical to SEQ ID NO: 148641
  misc_feature 1..1776: note = Description of Artificial Sequence: Synthetic coding sequence
  source 1..1776: mol_type = other DNA

SEQ ID NO: 148643 - DNA, 1083 bp, synthetic construct
  misc_feature 1..1083: note = Description of Artificial Sequence: Synthetic coding sequence
  source 1..1083: mol_type = other DNA
atgttctgccacgtggagcctgagcaggtgatctgtgtgcatgatgtgagcagcatctacagagtgcccctgctgctggaggagcagggcgtggtggactacttcctgcggcggctggacctgcccatcgagcggcagcccaggaagatgctgatgaagtggaaggagatggctgacagatatgaccggctgctggagacctgcagcatcgccctggtgggcaagtacaccaagttcagtgacagctatgccagcgtcatcaaggccctggagcacagcgccctggccatcaaccacaagctggagatcaagtacatcgacagcgctgacctggagcccatcaccagccaggaggagcctgtgcgctaccacgaggcctggcagaagctgtgcagcgcccacggcgtgctggtgcctgggggcttcggcgtgcggggcacagagggcaagatccaggccatcgcctgggccaggaaccagaagaagcccttcctgggcgtgtgcctgggcatgcagctggccgtggtggagttcagcagaaatgtgctgggctggcaggatgccaacagcacagaatttgaccccaccaccagccaccctgtggtggtggacatgcctgagcacaaccctggccagatgggcggcaccatgaggctgggcaagaggaggaccctcttccagaccaagaacagcgtgatgaggaagctgtatggagatgctgactacctggaggagcggcaccgccacagatttgaggtgaaccctgtgtggaagaagtgcctggaggagcagggcctgaagtttgtgggccaggatgtggagggggagaggatggagatcgtggagctggaggaccaccccttctttgtgggcgtgcagtaccaccctgagttcctgagccggcccatcaagcccagccccccctacttcggcctgctgctggcctctgtgggccgcctgagccactacctgcagaagggctgccgcctgagcccccgggacacctacagcgacaggagcggcagcagcagcccagattctgagatcacagagctgaagttccccagcatcaaccacgactag

SEQ ID NO: 148644 - DNA, 945 bp, synthetic construct
  misc_feature 1..945: note = Description of Artificial Sequence: Synthetic coding sequence
  source 1..945: mol_type = other DNA
atgcccaagagcaagagcaagatgaagtacatcctggtgactggaggagtcatctctggaattggcaagggcatcatcgccagctctgtgggcaccatcctgaagagctgtggcctgcacgtgaccagcatcaagattgacccctacatcaacattgatgctggcaccttcagcccctatgagcacggggaggtgtttgtgctggatgatggaggagaggtggacctggacctgggcaactatgagcgcttcctggacatccggctgaccaaggacaacaacctgaccaccgggaagatctaccagtatgtgatcaacaaggagaggaagggggactacctgggcaagacagtgcaggtggtgccccacatcacagatgccatccaggagtgggtgatgaggcaggccctgatccctgtggatgaagatggcctggagccccaggtgtgtgtgattgagctgggcggcaccgtgggggacattgaatccatgcccttcatcgaggccttccggcagttccagttcaaggtgaagcgggagaacttctgcaacatccacgtgtccctggtgccccagcccagcagcactggagagcagaagaccaagcccacccagaacagcgtgcgggagctgcggggcctgggcctgagcccagacctggtggtgtgccgctgcagcaaccccctggacacctctgtgaaggagaagatctccatgttctgccacgtggagcctgagcaggtgatctgtgtgcatgatgtgagcagcatctacagagtgcccctgctgctggaggagcagggcgtggtggactacttcctgcggcggctggacctgcccatcgagcggcagcccaggaagatgctgatgaagtggaaggagatggctgacagatttgcctgcaatgaggagctgggcgtgctggccagcttcaccctgctgtag

SEQ ID NO: 148645 - DNA, 1761 bp, synthetic construct
  misc_feature 1..1761: note = Description of Artificial Sequence: Synthetic coding sequence
  source 1..1761: mol_type = other DNA
atgaagtacatcctggtgactggaggagtcatcagcggcatcggcaagggcatcatcgccagcagcatcggcaccatcctgaagagctgtggcctgcgggtgacagccatcaagattgacccctacatcaacattgatgctggcaccttcagcccctatgaacatggagaggtgtttgtgctgaatgatggaggagaggtggacctggacctgggcaactatgagcgcttcctggacatcaacctgtacaaggacaacaacatcaccaccgggaagatctaccagcacgtgatcaacaaggagcggcggggggactacctgggcaagacagtgcaggtggtgccccacatcacagatgctgtgcaggagtgggtgatgaaccaggccaaggtgcctgtggatggcaacaaggaggagccccagatctgtgtgattgagctgggcggcaccatcggggacatcgagggcatgccctttgtggaggccttccggcagttccagttcaaggccaagcgggagaacttctgcaacatccacgtgtccctggtgccccagctgagcgccactggagagcagaagaccaagcccacccagaacagcgtgcgggccctgcggggcctgggcctgagcccagacctgattgtgtgccgcagcagcacccccatcgagatggctgtgaaggagaagatctccatgttctgccacgtgaaccctgagcaggtgatctgcatccatgatgtgagcagcacctacagagtgcctgtgctgctggaggagcagagcatcgtgaagtacttcaaggagcggctgcacctgcccatcggggacagcgccagcaacctgctcttcaagtggaggaacatggctgacagatatgaaaggctgcagaagatctgcagcatcgccctggtgggcaagtacaccaagctgcgggactgctacgccagcgtcttcaaggccctggagcacagcgccctggccatcaaccacaagctgaacctgatgtacatcgacagcattgacctggagaagatcacagaaacagaagatcctgtgaagttccacgaggcctggcagaagctgtgcaaggcagatggcatcctggtgcctgggggcttcggcatccggggcaccctgggcaagctgcaggccatctcctgggcccggaccaagaagatccccttcctgggcgtgtgcctgggcatgcagctggccgtgattgaatttgccaggaactgcctgaacctgaaggatgctgacagcacagagttccggcccaatgcccctgtgcccctggtgattgacatgcctgagcacaaccctggcaacctgggcggcaccatgaggctgggcatcagaagaacagtgttcaagacagagaacagcatcctgaggaagctgtatggagatgtgcccttcatcgaggagcggcaccgccacagatttgaggtgaaccccaacctgatcaagcagtttgagcagaatgacctgagctttgtgggccaggatgtggatggagacaggatggagatcatcgagctggccaaccacccctactttgtgggcgtgcagttccaccctgagttcagcagccggcccatgaagcccagccccccctacctgggcctgctgctggccgccaccggcaacctgaatgcctacctgcagcagggctgcaagctgagcagcagtgaccgctacagtgatgccagtgatgacagcttcagcgagcccagaattgctgagctggagatctcctag

SEQ ID NO: 148646 - DNA, 531 bp, synthetic construct
  misc_feature 1..531: note = Description of Artificial Sequence: Synthetic coding sequence
  source 1..531: mol_type = other DNA
atgtacatcgacagcattgacctggagaagatcacagaaacagaagatcctgtgaagttccacgaggcctggcagaagctgtgcaaggcagatggcatcctggtgcctgggggcttcggcatccggggcaccctgggcaagctgcaggccatctcctgggcccggaccaagaagatccccttcctgggcgtgtgcctgggcatgcagctggccgtgattgaatttgccaggaactgcctgaacctgaaggatgctgacagcacagagttccggcccaatgcccctgtgcccctggtgattgacatgcctgagcacaaccctggcaacctgggcggcaccatgaggctgggcatcagaagaacagtgttcaagacagagaacagcatcctgatcagcctgagcctgggcctggcctctgtggagcacacagagtgccccagcgcctttgacctgcgggacagcctcttcatcggcctcttctgtgagctgcccatgctgctggagatgaacctggactgggacctggactag

SEQ ID NO: 148647 - DNA, 1761 bp, synthetic construct; identical to SEQ ID NO: 148645
  misc_feature 1..1761: note = Description of Artificial Sequence: Synthetic coding sequence
  source 1..1761: mol_type = other DNA

SEQ ID NO: 148648 - DNA, 1761 bp, synthetic construct; identical to SEQ ID NO: 148645
  misc_feature 1..1761: note = Description of Artificial Sequence: Synthetic coding sequence
  source 1..1761: mol_type = other DNA

SEQ ID NO: 148649 - DNA, 399 bp, synthetic construct
  misc_feature 1..399: note = Description of Artificial Sequence: Synthetic coding sequence
  source 1..399: mol_type = other DNA
tgaggaaagctgcaggccatctcctgggcccggaccaagaagatccccttcctgggcgtgtgcctgggcatgcagctggccgtgattgaatttgccaggaactgcctgaacctgaaggatgctgacagcacagagttccggcccaatgcccctgtgcccctggtgattgacatgcctgagcacaaccctggcaacctgggcggcaccatgaggctgggcatcagaagaacagtgttcaagacagagaacagcatcctgatcagcctgagcctgggcctggcctctgtggagcacacagagtgccccagcgcctttgacctgcgggacagcctcttcatcggcctcttctgtgagctgcccatgctgctggagatgaacctggactgggacctggactag

SEQ ID NO: 148650 - DNA, 3654 bp, synthetic construct
  misc_feature 1..3654: note = Description of Artificial Sequence: Synthetic coding sequence
  source 1..3654: mol_type = other DNA
atggctgctggccgggcccaggtgcccagcagcgagcaggcctggctggaggatgcccaggtgttcatccagaagaccctgtgcccagctgtgaaggagcccaacgtgcagctgacccccctggtgattgactgtgtgaagacagtgtggctgagccagggcaggaaccagggcagcaccctgcccctgagctacagctttgtgtctgtgcaggacctgaagacccaccagaggctgccctgctgcagccacctgtcctggagcagcagcgcctaccaggcctgggcccaggaggccggccccaacggcaaccccctgccccgggagcagctgctgctgctgggcaccctgacagacctgtctgctgacctggagcaggagtgcagaaatggcagcctgtatgtgcgggacaacacaggagtgctgagctgtgagctgattgacctggacctgtcctggctgggccacctgttcctgttcccccgctggagctacctgcccccagcccgctggaacagcagcggggagggccacctggagctgtgggatgcccctgtgcctgtgttccccctgaccatcagccctggccctgtgacccccatccctgtgctgtacccagagagcgccagctgcctgctgcggctgaggaacaagctgcggggcgtgcagaggaacctggccggcagcctggtgcggctgagcgccctggtgaagagcaagcagaaggcctacttcatcctgagcctgggccgcagccaccctgctgtgacccacgtgtccatcatcgtgcaggtgcctgcccagctggtgtggcaccgggccctgcggcctggaacagcctacgtgctgacagagctgcgggtgtccaagatccggggccagaggcagcacgtgtggatgaccagccagagcagccggctgctgctgctgaagccagaatgtgtgcaggagctggagctggagctggagggccccctgctggaggccgaccccaagcccctgcccatgcccagcaacagcgaggacaagaaggaccctgagagcctggtgcgctacagccggctgctgagctacagcggggctgtgactggagtgctgaatgaacctgctggcctgtatgagctggatggccagctgggcctgtgcctggcctaccagcagttccggggcctgcggcgggtgatgaggcctggggtgtgcctgcagctgcaggatgtgcacctgctgcagagcgtgggcggcggcaccaggaggcctgtgctggccccctgcctgcggggagctgtgctgctgcagagcttcagccggcagaagccaggggcccacagcagccggcaggcctacggggccagcctgtatgagcagctggtgtgggagcggcagctgggcctgcccctgtacctgtgggccaccaaggccctggaggagctggcctgcaagctgtgcccccacgtgctgcggcaccaccagttcctgcagcacagcagccctggcagccccagcctgggcctgcagctgctggcccccaccctggacctgctggcccctcctggcagccctgtgagaaatgcccacaatgagatcctggaggagccccaccactgccccctgcagaagtacacccggctgcagacccccagcagcttccccaccctggccaccctgaaggaggagggccagaggaaggcctgggccagctttgaccccaaggccctgctgcccctgcctgaggccagctacctgcccagctgccagctgaacagaaggctggcctggagctggctgtgcctgctgcccagcgccttctgcccagcccaggtgctgctgggcgtgctggtggccagcagccacaagggctgcctgcagctgcgggaccagagcggcagcctgccctgcctgctgctggccaagcacagccagcccctgagtgaccccaggctcatcggctgcctggtgcgggcagagcgcttccagctgattgtggagagagatgtgcgcagcagcttccccagctggaaggagctgtccatgcctggcttcatccagaagcagcaggcccgggtgtatgtgcagttcttcctggctgatgccctgatcctgcctgtgccccggccctgcctgcacagcgccacccccagcaccccccagacagaccccaccggccctgagggcccccacctgggccagagccgcctcttcctgctgtgccacaaggaggccctgatgaagaggaacttctgtgtgcccccaggggccagccctgaggtgcccaagccagccctgtccttctacgtgctgggctcctggctgggcggcacccagaggaaggagggcaccggctggggcctgcctgagccccagggcaatgatgacaatgaccagaaggtgcacctgatcttcttcggcagctctgtgcgctggtttgagttcctgcaccctggccaggtgtaccgcctcatcgcccctggccctgccacccccatgctgtttgagaaggatggcagcagctgcatcagccggcggcccctggagctggccggctgtgccagctgcctgactgtgcaggacaactggaccctggagctggagagcagccaggacatccaggatgtgctggatgccaacaagagcctgcctgagagcagcctgacagacctgctgagtgacaacttcacagacagcctggtgtccttctctgctgagatcctgagcaggaccctgtgtgagcccctggtggccagcctgtggatgaagctgggcaacacaggagccatgaggcgctgtgtgaagctgactgtggccctggagacagcagaatgtgagttccccccccacctggatgtgtacatcgaggacccccacctgccccccagcctgggcctgctgcccggggcccgggtgcacttcagccagctggagaagagggtgagccgcagccacaacgtgtactgctgcttccgcagcagcacctacgtgcaggtgctgtccttccccccagagaccaccatcagcatccccctgccccacatctacctggccgagctgctgcagggcggccagagccccttccaggccacagccagctgccacatcgtgtctgtgttcagcctgcagctgttctgggtgtgtgcctactgcaccagcatctgccggcagggcaagtgcacccggctgggcagcacctgccccacccagacagccatcagccaggccatcatccggctgctggtggaggatggaacagctgaggccgtggtgacctgcaggaaccaccacgtggccgccgccctgggcctgtgcccccgggagtgggccagcctgctggactttgtgcaggtgcccggccgggtggtgctgcagtttgctggccctggggcccagctggagagcagcgcccgggtggatgagcccatgaccatgttcctgtggaccctgtgcaccagccccagcgtgctgcggcccatcgtgctgagctttgagctggagaggaagcccagcaagatcgtgcccctggagcccccccggctgcagcgcttccagtgtggggagctgcccttcctgacccacgtgaacccccggctgcggctgagctgcctgagcatccgggagagcgagtacagcagcagcctgggcatcctggccagcagctgctag

SEQ ID NO: 148651 - DNA, 3096 bp, synthetic construct
  misc_feature 1..3096: note = Description of Artificial Sequence: Synthetic coding sequence
  source 1..3096: mol_type = other DNA
atggctgctggccgggcccaggtgcccagcagcgagcaggcctggctggaggatgcccaggtgttcatccagaagaccctgtgcccagctgtgaaggagcccaacgtgcagctgacccccctggtgattgactgtgtgaagacagtgtggctgagccagggcaggaaccagggcagcaccctgcccctgagctacagctttgtgtctgtgcaggacctgaagacccaccagaggctgccctgctgcagccacctgtcctggagcagcagcgcctaccaggcctgggcccaggaggccggccccaacggcaaccccctgccccgggagcagctgctgctgctgggcaccctgacagacctgtctgctgacctggagcaggagtgcagaaatggcagcctgtatgtgcgggacaacacaggagtgctgagctgtgagctgattgacctggacctgtcctggctgggccacctgttcctgttcccccgctggagctacctgcccccagcccgctggaacagcagcggggagggccacctggagctgtgggatgcccctgtgcctgtgttccccctgaccatcagccctggccctgtgacccccatccctgtgctgtacccagagagcgccagctgcctgctgcggctgcggagccaccctgctgtgacccacgtgtccatcatcgtgcaggtgcctgcccagctggtgtggcaccgggccctgcggcccggcacagcctacgtgctgacagagctgcgggtgtccaagatccggggccagaggcagcacgtgtggatgaccagccagagcagccggctgctgctgctgaagccagaatgtgtgcaggagctggagctggagctggagggccccctgctggaggccgaccccaagcccctgcccatgcccagcaacagcgaggacaagaaggaccctgagagcctggtgcgctacagccggctgctgagctacagcggggctgtgactggagtgctgaatgaacctgctggcctgtatgagctggatggccagctgggcctgtgcctggcctaccagcagttccggggcctgcggcgggtgatgaggcctggggtgtgcctgcagctgcaggatgtgcacctgctgcagagcgtgggcggcggcacccggcggcctgtgctggccccctgcctgcggggagctgtgctgctgcagagcttcagccggcagaagccaggggcccacagcagccggcaggcctatggagccagcctgtatgagcagctggtgtgggagcggcagctgggcctgcccctgtacctgtgggccaccaaggccctggaggagctggcctgcaagctgtgcccccacgtgctgcggcaccaccagttcctgcagcacagcagccctggcagccccagcctgggcctgcagctgctggcccccaccctggacctgctggcccctcctggcagccctgtgagaaatgcccacaatgagatcctggaggagccccaccactgccccctgcagaagtacacccggctgcagacccccagcagcttccccaccctggccaccctgaaggaggagggccagaggaaggcctgggccagctttgaccccaaggccctgctgcccctgcctgaggccagctacctgcccagctgccagctgaacagaaggctggcctggagctggctgtgcctgctgcccagcgccttctgcccagcccaggtgctgctgggcgtgctggtggccagcagccacaagggctgcctgcagctgcgggaccagagcggcagcctgccctgcctgctgctggccaagcacagccagcccctgagtgacccccggctgattggctgcctggtgcgggcagagcgcttccagctgattgtggagagagatgtgcgcagcagcttccccagctggaaggagctgtccatgcctggcttcatccagaagcagcaggcccgggtgtatgtgcagttcttcctggctgatgccctgatcctgcctgtgccccggccctgcctgcacagcgccacccccagcaccccccagacagaccccactggacctgagggcccccacctgggccagagccgcctcttcctgctgtgccacaaggaggccctgatgaagaggaacttctgtgtgcccccaggggccagccctgaggtgcccaagccagccctgtccttctacgtgctgggctcctggctgggcggcacccagaggaaggagggcaccggctggggcctgcctgagccccagggcaatgatgacaatgaccagaaggtgcacctgatcttcttcggcagctctgtgcgctggtttgagttcctgcaccctggccaggtgtaccgcctgattgcccctggccctgccacccccatgctgtttgagaaggatggcagcagctgcatcagcagaagacccctggagctggccggctgtgccagctgcctgactgtgcaggacaactggaccctggagctggagagcagccaggacatccaggatgtgctggatgccaacaagagcctgcctgagagcagcctgacagacctgctgagtgacaacttcacagacagcctggtgtccttctctgctgagatcctgagcaggaccctgtgtgagcccctggtggccagcctgtggatgaagctgggcaacacaggagccatgagaagatgtgtgaagctgactgtggccctggagacagcagaatgtgagttccccccccacctggatgtgtacatcgaggacccccacctgccccccagcctgggcctgctgcccggggcccgggtgcacttcagccagctggagaagagggtgagccgcagccacaacgtgtactgctgcttccgcagcagcacctacgtgcaggtgctgtccttccccccagagaccaccatcagcatccccctgccccacatctacctggccgagctgctgcagggcggccagagccccttccaggccacagccagctgccacatcgtgtctgtgttcagcctgcagctgttctgggtgtgtgcctactgcaccagcatctgccggcaggcccctgggggcggctgggactgccgcagcagaggagacctgtag

SEQ ID NO: 148652 - DNA, 843 bp, synthetic construct
  misc_feature 1..843: note = Description of Artificial Sequence: Synthetic coding sequence
  source 1..843: mol_type = other DNA
atgcaggccaagtacagcagcacccgggacatgctggatgatgatggagacaccaccatgagcctgcacagccagggcagcgccaccaccaggcaccctgagcccaggagaacagagcaccgggcccccagcagcacctggaggcctgtggccctgaccctgctgaccctgtgcctggtgctgctgattggcctggccgccctgggcctgctcttcttccagtactaccagctgagcaacacaggccaggacaccatcagccagatggaggagcggctgggcaacaccagccaggagctgcagagcctgcaggtgcagaacatcaagctggccggcagcctgcagcacgtggccgagaagctgtgccgggagctgtacaacaaggccggggcccaccgctgcagcccctgcacagagcagtggaagtggcacggggacaactgctaccagttctacaaggacagcaagtcctgggaggactgcaagtacttctgcctgtctgagaacagcaccatgctgaagatcaacaagcaggaggacctggagtttgctgccagccagagctacagcgagttcttctacagctactggacaggcctgctgcggccagattctgggaaggcctggctgtggatggatggcacccccttcaccagcgagctgttccacatcatcattgatgtgaccagccccaggagccgggactgtgtggccatcctgaatggcatgatcttcagcaaggactgcaaggagctgaagagatgtgtgtgtgaaagaagagctggcatggtgaagccagagagcctgcacgtgcccccagagaccctgggggagggggactag

SEQ ID NO: 148653 - DNA, 213 bp, synthetic construct
  misc_feature 1..213: note = Description of Artificial Sequence: Synthetic coding sequence
  source 1..213: mol_type = other DNA
atgcaggccaagtacagcagcacccgggacatgctggatgatgatggagacaccaccatgagcctgcacagccagggcagcgccaccaccaggcaccctgagcccaggagaacagagcaccgggcccccagcagcacctggaggcctgtggccctgaccctgctgaccctgtgcctggtgctgctgattggcctggccgccctgggcctgtag

SEQ ID NO: 148654 - DNA, 879 bp, synthetic construct
  misc_feature 1..879: note = Description of Artificial Sequence: Synthetic coding sequence
  source 1..879: mol_type = other DNA
atgaccaggacctatgagaacttccagtacctggagaacaaggtgaaggtgcagggcttcaagaatggccccctgcccctgcagagcctgctgcagaggctgtgcagcggcccctgccacctgctgctgagcctgggcctgggcctgctgctgctggtgatcatctgtgtggtgggcttccagaacagcaagttccagagggacctggtgaccctgaggacagacttcagcaacttcaccagcaacacagtggccgagatccaggccctgaccagccagggcagcagcctggaggagaccatcgccagcctgaaggccgaggtggagggcttcaagcaggagcggcaggccgtgcacagcgagatgctgctgcgggtgcagcagctggtgcaggacctgaagaagctgacctgccaggtggccaccctgaacaacaacggggaggaggccagcacagagggcacctgctgccctgtgaactgggtggagcaccaggacagctgctactggttcagccacagcggcatgtcctgggccgaggccgagaagtactgccagctgaagaatgcccacctggtggtgatcaacagccgggaggagcagaactttgtgcagaagtacctgggcagcgcctacacctggatgggcctgagtgaccctgagggcgcctggaagtgggtggatggaacagattatgccaccggcttccagaactggaagccaggccagccagatgactggcagggccacggcctgggcggcggggaggactgtgcccacttccacccagatggccgctggaatgatgatgtgtgccagaggccctaccactgggtgtgtgaggccggcctgggccagaccagccaggagagccactag

SEQ ID NO: 148655 - DNA, 951 bp, synthetic construct
  misc_feature 1..951: note = Description of Artificial Sequence: Synthetic coding sequence
  source 1..951: mol_type = other DNA
atgaccaggacctatgagaacttccagtacctggagaacaaggtgaaggtgcagggcttcaagaatggccccctgcccctgcagagcctgctgcagaggctgtgcagcggcccctgccacctgctgctgagcctgggcctgggcctgctgctgctggtgatcatctgtgtggtgggcttccagaacagcaagttccagagggacctggtgaccctgaggacagacttcagcaacttcaccagcaacacagtggccgagatccaggccctgaccagccagggcagcagcctggaggagaccatcgccagcctgaaggccgaggtggagggcttcaagcaggagcggcaggccggcgtgtctgagctgcaggagcacaccacccagaaggcccacctgggccactgcccccactgccccagcgtgtgtgtgcctgtgcacagcgagatgctgctgcgggtgcagcagctggtgcaggacctgaagaagctgacctgccaggtggccaccctgaacaacaatgccagcacagagggcacctgctgccctgtgaactgggtggagcaccaggacagctgctactggttcagccacagcggcatgtcctgggccgaggccgagaagtactgccagctgaagaatgcccacctggtggtgatcaacagccgggaggagcagaactttgtgcagaagtacctgggcagcgcctacacctggatgggcctgagtgaccctgagggcgcctggaagtgggtggatggaacagattatgccaccggcttccagaactggaagccaggccagccagatgactggcagggccacggcctgggcggcggggaggactgtgcccacttccacccagatggccgctggaatgatgatgtgtgccagaggccctaccactgggtgtgtgaggccggcctgggccagaccagccaggagagccactag

SEQ ID NO: 148656 - DNA, 879 bp, synthetic construct; identical to SEQ ID NO: 148654
  misc_feature 1..879: note = Description of Artificial Sequence: Synthetic coding sequence
  source 1..879: mol_type = other DNA

SEQ ID NO: 148657 - DNA, 798 bp, synthetic construct
  misc_feature 1..798: note = Description of Artificial Sequence: Synthetic coding sequence
  source 1..798: mol_type = other DNA
atgtctgaggaggtgacctacgccgacctgcagttccagaacagcagcgagatggagaagatccctgagatcggcaagtttggagagaaggcccccccagcccccagccacgtgtggaggcctgctgccctcttcctgaccctgctgtgcctgctgctgctgattggcctgggcgtgctggcctccatgtttcatgtgaccctgaagattgagatgaagaagatgaacaagctgcagaacatcagcgaggagctgcagaggaacatcagcctgcagctgatgagcaacatgaacatcagcaacaagatccggaacctgagcaccaccctgcagaccatcgccaccaagctgtgccgggagctgtacagcaaggagcaggagcacaagtgcaagccctgcccccggcgctggatctggcacaaggacagctgctacttcctgagtgatgatgtgcagacctggcaggagagcaagatggcctgtgccgcccagaatgccagcctgctgaagatcaacaacaagaatgccctggagttcatcaagagccagagccgctcctatgactactggctgggcctgagccctgaggaggacagcacccggggcatgagggtggacaacatcatcaacagcagcgcctgggtgatcagaaatgccccagacctgaacaacatgtactgcggctacatcaaccggctgtatgtgcagtactaccactgcacctacaagaagaggatgatctgtgagaagatggccaaccctgtgcagctgggcagcacctacttccgggaggcctag

SEQ ID NO: 148658 - DNA, 699 bp, synthetic construct
  misc_feature 1..699: note = Description of Artificial Sequence: Synthetic coding sequence
  source 1..699: mol_type = other DNA
atgtctgaggaggtgacctacgccgacctgcagttccagaacagcagcgagatggagaagatccctgagatcggcaagtttggagagaaggtgcacgtgaccctgaagattgagatgaagaagatgaacaagctgcagaacatcagcgaggagctgcagaggaacatcagcctgcagctgatgagcaacatgaacatcagcaacaagatccggaacctgagcaccaccctgcagaccatcgccaccaagctgtgccgggagctgtacagcaaggagcaggagcacaagtgcaagccctgcccccggcgctggatctggcacaaggacagctgctacttcctgagtgatgatgtgcagacctggcaggagagcaagatggcctgtgccgcccagaatgccagcctgctgaagatcaacaacaagaatgccctggagttcatcaagagccagagccgctcctatgactactggctgggcctgagccctgaggaggacagcacccggggcatgagggtggacaacatcatcaacagcagcgcctgggtgatcagaaatgccccagacctgaacaacatgtactgcggctacatcaaccggctgtatgtgcagtactaccactgcacctacaagaagaggatgatctgtgagaagatggccaaccctgtgcagctgggcagcacctacttccgggaggcctag

SEQ ID NO: 148659 - DNA, 828 bp, synthetic construct
  misc_feature 1..828: note = Description of Artificial Sequence: Synthetic coding sequence
  source 1..828: mol_type = other DNA
atgtggattgacttcttcacctacagctccatgtctgaggaggtgacctacgccgacctgcagttccagaacagcagcgagatggagaagatccctgagatcggcaagtttggagagaaggcccccccagcccccagccacgtgtggaggcctgctgccctcttcctgaccctgctgtgcctgctgctgctgattggcctgggcgtgctggcctccatgtttcatgtgaccctgaagattgagatgaagaagatgaacaagctgcagaacatcagcgaggagctgcagaggaacatcagcctgcagctgatgagcaacatgaacatcagcaacaagatccggaacctgagcaccaccctgcagaccatcgccaccaagctgtgccgggagctgtacagcaaggagcaggagcacaagtgcaagccctgcccccggcgctggatctggcacaaggacagctgctacttcctgagtgatgatgtgcagacctggcaggagagcaagatggcctgtgccgcccagaatgccagcctgctgaagatcaacaacaagaatgccctggagttcatcaagagccagagccgctcctatgactactggctgggcctgagccctgaggaggacagcacccggggcatgagggtggacaacatcatcaacagcagcgcctgggtgatcagaaatgccccagacctgaacaacatgtactgcggctacatcaaccggctgtatgtgcagtactaccactgcacctacaagaagaggatgatctgtgagaagatggccaaccctgtgcagctgggcagcacctacttccgggaggcctag

SEQ ID NO: 148660 - DNA, 264 bp, synthetic construct
  misc_feature 1..264: note = Description of Artificial Sequence: Synthetic coding sequence
  source 1..264: mol_type = other DNA
cacaagtgcaagccctgcccccggcgctggatctggcacaaggacagctgctacttcctgagtgatgatgtgcagacctggcaggagagcaagatggcctgtgccgcccagaatgccagcctgctgaagatcaacaacaagaacatcttcagcgtcatcaagaagaagacagagaagttcttctggctgggcctgtcctgggacagcagcggccgctcctggttctgggaggatggctctgtgcccagccccagcctgtactag

SEQ ID NO: 148661 - DNA, 498 bp, synthetic construct
  misc_feature 1..498: note = Description of Artificial Sequence: Synthetic coding sequence
  source 1..498: mol_type = other DNA
atgtctgaggaggtgacctacgccgacctgcagttccagaacagcagcgagatggagaagatccctgagatcggcaagtttggagagaaggcccccccagcccccagccacgtgtggaggcctgctgccctcttcctgaccctgctgtgcctgctgctgctgattggcctgggcgtgctggcctccatgtttcatgtgaccctgaagattgagatgaagaagatgaacaagctgcagaacatcagcgaggagctgcagaggaacatcagcctgcagctgatgagcaacatgaacatcagcaacaagatccggaacctgagcaccaccctgcagaccatcgccaccaagctgtgccgggagctgtacagcaaggagcaggagcacaagtgcaagccctgcccccggcgctggatctggcacaaggacagctgctacttcctgagtgatgatgtgcagacctggcaggagagcaagatggcctgtgccgcccagaactag

SEQ ID NO: 148662 - DNA, 642 bp, synthetic construct
  misc_feature 1..642: note = Description of Artificial Sequence: Synthetic coding sequence
  source 1..642: mol_type = other DNA
atgtctgaggaggtgacctacgccgacctgcagttccagaacagcagcgagatggagaagatccctgagatcggcaagtttggagagaaggcccccccagcccccagccacgtgtggaggcctgctgccctcttcctgaccctgctgtgcctgctgctgctgattggcctgggcgtgctggcctccatgtttcatgtgaccctgaagattgagatgaagaagatgaacaagctgcagaacatcagcgaggagctgcagaggaacatcagcctgcagctgatgagcaacatgaacatcagcaacaagatccggaacctgagcaccaccctgcagaccatcgccaccaagctgtgccgggagctgtacagcaaggagcaggagcacaagtgcaagccctgcccccggcgctggatctggcacaaggacagctgctacttcctgagtgatgatgtgcagacctggcaggagagcaagatggcctgtgccgcccagaatgccagcctgctgaagatcaacaacaagaatgccctggagttcatcaagagccagagccgctcctatgactactggctgggcctgagccctgaggaggacagcacccggggcatgagggtggacaacatcatcaacagcagcgcctag

SEQ ID NO: 148663 - DNA, 423 bp, synthetic construct
  misc_feature 1..423: note = Description of Artificial Sequence: Synthetic coding sequence
  source 1..423: mol_type = other DNA
atggccgccaccggcttcagcgcccccaacggcagctgccacggcaccagcaggacagtgaacagtgatgcccccatgagccctgagctgcccaagccccacctgcctgaccagctggtgattgtgaatgaaacagaagctgacagcaagcccagcaagaatgtggcccggtctgctgctgtggagacagccagcctgagccccagcctggtgcctgcccggcagcccaccatcagcctgctgtgtgaggacacagctgacaccctgtctgtggagagcctgaccctggtgccccctgtggacccccacagcctgcggagcctgaccggcatgccacccctgagcaccccagctgctgcctgcacagagcctgtgggggaggaggccgcctgtgccgagcctgtgggcacagcagaagattag

SEQ ID NO: 148664 - DNA, 2721 bp, synthetic construct
  misc_feature 1..2721: note = Description of Artificial Sequence: Synthetic coding sequence
  source 1..2721: mol_type = other DNA
atgtttggccgcagccgctcctgggtgggcggcggccacggcaagaccagcaggaacatccacagcctggaccacctgaagtacctgtaccacgtgctgaccaagaacaccaccgtgacagagcagaacagaaacctgctggtggagaccatccgcagcatcacagagatcctgatctggggagaccagaatgacagctctgtgtttgacttcttcctggagaagaacatgtttgtgttcttcctgaacatcctgcggcagaagagcggccgctacgtgtgtgtgcagctgctgcagaccctgaacatcctgtttgagaacatcagccatgagaccagcctgtactacctgctgagcaacaactacgtgaacagcatcatcgtgcacaagtttgacttcagtgatgaggagatcatggcctactacatctccttcctgaagaccctgagcctgaagctgaacaaccacacagtgcacttcttctacaatgagcacaccaatgactttgccctgtacacagaggccatcaagttcttcaaccaccctgagagcatggtgagaattgctgtgaggaccatcaccctgaatgtgtacaaggtggacaaccaggccatgctgcactacatccgggacaagacagctgtgccctacttcagcaacctggtgtggttcatcggcagccacgtgattgagctggatgactgtgtgcagacagatgaggagcacaggaacagaggcaagctgagtgacctggtggccgagcacctggaccacctgcactacctgaatgacatcctgatcatcaactgtgagttcctgaatgatgtgctgacagaccacctgctgaacagactcttcctgcccctgtatgtgtacagcctggagaaccaggacaagggcggggagcggcccaagatcagcctgcctgtgtccctgtacctgctgagccaggtgttcctgatcatccaccacgcccccctggtgaacagcctggccgaggtgatcctgaatggagacctgtctgagatgtatgccaagacagagcaggacatccagaggagcagcgccaagcccagcatccgctgcttcatcaagcccacagagaccctggagaggagcctggagatgaacaagcacaagggcaagagaagagtgcagaagaggcccaactacaagaatgtgggggaggaggaggatgaggagaagggccccacagaagatgcccaggaggatgctgagaaggccaaggagattgagatggtgatcatggagaggagcaagctgtctgagctggccgccagcacctctgtgcaggagcagaacaccacagatgaggagaagtctgctgctgccacctgcagcgagagcacccagtggagccggcccttcctggacatggtgtaccacgccctggacagcccagatgatgactaccacgccctgtttgtgctgtgcctgctgtatgccatgagccacaacaagggcatggaccctgagaagctggagcgcatccagctgcctgtgcccaatgctgctgagaagaccacctacaaccaccccctggccgagcggctcatccgcatcatgaacaatgctgcccagccagatggcaagatccggctggccaccctggagctgagctgcctgctgctgaagcagcaggtgctgatgtctgctggctgcatcatgaaggatgtgcacctggcctgcctggagggcgcccgggaggagagcgtgcacctggtgcgccacttctacaagggggaggacatcttcctggacatgtttgaagatgagtaccgctccatgaccatgaagcccatgaatgtggagtacctgatgatggatgccagcatcctgctgccccccaccggcacccccctgactggaattgactttgtgaagaggctgccctgtggagatgtggagaagacccggcgggccatccgggtcttcttcatgctgcggagcctgagcctgcagctgcggggggagcctgagacccagctgcccctgacccgggaggaggacctgatcaagacagatgatgtgctggacctgaacaacagcgacctgattgcctgcaccgtcatcaccaaggatggcggcatggtgcagcgcttcctggccgtggacatctaccagatgagcctggtggagccagatgtgtcccggctgggctggggcgtggtgaagtttgctggcctgctgcaggacatgcaggtgactggagtggaggatgacagccgggccctgaacatcaccatccacaagccagccagcagcccccacagcaagcccttccccatcctgcaggccaccttcatcttcagtgaccacatccgctgcatcatcgccaagcagaggctggccaagggccgcatccaggcccggaggatgaagatgcagagaattgctgccctgctggacctgcccatccagcccaccacagaggtgctgggcttcggcctgggcagcagcaccagcacccagcacctgcccttccgcttctatgaccagggccggcggggcagcagtgaccccaccgtgcagaggtctgtgtttgcctctgtggacaaggtgcctggagagcccgcccccaggcctgccccccagctggtgcaccacggcggccgcagccgctccttcagcctgtggagcctgtgtgagctgcccttcctgagccagaagccccggcggctggccgccccagccagctag

SEQ ID NO: 148665 - DNA, 3162 bp, synthetic construct
  misc_feature 1..3162: note = Description of Artificial Sequence: Synthetic coding sequence
  source 1..3162: mol_type = other DNA
atgtttggccgcagccgctcctgggtgggcggcggccacggcaagaccagcaggaacatccacagcctggaccacctgaagtacctgtaccacgtgctgaccaagaacaccaccgtgacagagcagaacagaaacctgctggtggagaccatccgcagcatcacagagatcctgatctggggagaccagaatgacagctctgtgtttgacttcttcctggagaagaacatgtttgtgttcttcctgaacatcctgcggcagaagagcggccgctacgtgtgtgtgcagctgctgcagaccctgaacatcctgtttgagaacatcagccatgagaccagcctgtactacctgctgagcaacaactacgtgaacagcatcatcgtgcacaagtttgacttcagtgatgaggagatcatggcctactacatctccttcctgaagaccctgagcctgaagctgaacaaccacacagtgcacttcttctacaatgagcacaccaatgactttgccctgtacacagaggccatcaagttcttcaaccaccctgagagcatggtgagaattgctgtgaggaccatcaccctgaatgtgtacaaggtgtccctggacaaccaggccatgctgcactacatccgggacaagacagctgtgccctacttcagcaacctggtgtggttcatcggcagccacgtgattgagctggatgactgtgtgcagacagatgaggagcacaggaacagaggcaagctgagtgacctggtggccgagcacctggaccacctgcactacctgaatgacatcctgatcatcaactgtgagttcctgaatgatgtgctgacagaccacctgctgaacagactcttcctgcccctgtatgtgtacagcctggagaaccaggacaagggcggggagcggcccaagatcagcctgcctgtgtccctgtacctgctgagccaggtgttcctgatcatccaccacgcccccctggtgaacagcctggccgaggtgatcctgaatggagacctgtctgagatgtatgccaagacagagcaggacatccagaggagcagcgccaagcccagcatccgctgcttcatcaagcccacagagaccctggagaggagcctggagatgaacaagcacaagggcaagagaagagtgcagaagaggcccaactacaagaatgtgggggaggaggaggatgaggagaagggccccacagaagatgcccaggaggatgctgagaaggccaagggcacagagggcggcagcaagggcatcaagaccagcggggagagcgaggagattgagatggtgatcatggagaggagcaagctgtctgagctggccgccagcacctctgtgcaggagcagaacaccacagatgaggagaagtctgctgctgccacctgcagcgagagcacccagtggagccggcccttcctggacatggtgtaccacgccctggacagcccagatgatgactaccacgccctgtttgtgctgtgcctgctgtatgccatgagccacaacaagggcatggaccctgagaagctggagcgcatccagctgcctgtgcccaatgctgctgagaagaccacctacaaccaccccctggccgagcggctcatccgcatcatgaacaatgctgcccagccagatggcaagatccggctggccaccctggagctgagctgcctgctgctgaagcagcaggtgctgatgtctgctggctgcatcatgaaggatgtgcacctggcctgcctggagggcgcccgggaggagagcgtgcacctggtgcgccacttctacaagggggaggacatcttcctggacatgtttgaagatgagtaccgctccatgaccatgaagcccatgaatgtggagtacctgatgatggatgccagcatcctgctgccccccaccggcacccccctgactggaattgactttgtgaagaggctgccctgtggagatgtggagaagacccggcgggccatccgggtcttcttcatgctgcggagcctgagcctgcagctgcggggggagcctgagacccagctgcccctgacccgggaggaggacctgatcaagacagatgatgtgctggacctgaacaacagcgacctgattgcctgcaccgtcatcaccaaggatggcggcatggtgcagcgcttcctggccgtggacatctaccagatgagcctggtggagccagatgtgtcccggctgggctggggcgtggtgaagtttgctggcctgctgcaggacatgcaggtgactggagtggaggatgacagccgggccctgaacatcaccatccacaagccagccagcagcccccacagcaagcccttccccatcctgcaggccaccttcatcttcagtgaccacatccgctgcatcatcgccaagcagaggctggccaagggccgcatccaggcccggaggatgaagatgcagagaattgctgccctgctggacctgcccatccagcccaccacagaggtgctgggcttcggcctgggcagcagcaccagcacccagcacctgcccttccgcttctatgaccagggccggcggggcagcagtgaccccaccgtgcagaggtctgtgtttgcctctgtggacaaggtgcccggctttgctgtggcccagtgcatcaaccagcacagcagccccagcctgagcagccagagccccccatctgccagcggcagccccagcggcagcggcagcaccagccactgtgacagcggcggcaccagcagcagcagcacccccagcacagcccagagccctgcagatgcccccatgagccctgagctgcccaagccccacctgcctgaccagctggtgattgtgaatgaaacagaggccgacagcaagcccagcaagaatgtggcccggtctgctgctgtggagacagccagcctgagccccagcctggtgcctgcccggcagcccaccatcagcctgctgtgtgaggacacagctgacaccctgtctgtggagagcctgaccctggtgccccctgtggacccccacagcctgcggagcctgaccggcatgccacccctgagcaccccagctgctgcctgcacagagcctgtgggggaggaggccgcctgtgccgagcctgtgggcacagctgaggactag

SEQ ID NO: 148666 - DNA, 3162 bp, synthetic construct
  misc_feature 1..3162: note = Description of Artificial Sequence: Synthetic coding sequence
  source 1..3162: mol_type = other DNA
atgtttggccgcagccgctcctgggtgggcggcggccacggcaagaccagcaggaacatccacagcctggaccacctgaagtacctgtaccacgtgctgaccaagaacaccaccgtgacagagcagaacagaaacctgctggtggagaccatccgcagcatcacagagatcctgatctggggagaccagaatgacagctctgtgtttgacttcttcctggagaagaacatgtttgtgttcttcctgaacatcctgcggcagaagagcggccgctacgtgtgtgtgcagctgctgcagaccctgaacatcctgtttgagaacatcagccatgagaccagcctgtactacctgctgagcaacaactacgtgaacagcatcatcgtgcacaagtttgacttcagtgatgaggagatcatggcctactacatctccttcctgaagaccctgagcctgaagctgaacaaccacacagtgcacttcttctacaatgagcacaccaatgactttgccctgtacacagaggccatcaagttcttcaaccaccctgagagcatggtgagaattgctgtgaggaccatcaccctgaatgtgtacaaggtgtctgtggacaaccaggccatgctgcactacatccgggacaagacagctgtgccctacttcagcaacctggtgtggttcatcggcagccacgtgattgagctggatgactgtgtgcagacagatgaggagcacaggaacagaggcaagctgagtgacctggtggccgagcacctggaccacctgcactacctgaatgacatcctgatcatcaactgtgagttcctgaatgatgtgctgacagaccacctgctgaacagactcttcctgcccctgtatgtgtacagcctggagaaccaggacaagggcggggagcggcccaagatcagcctgcctgtgtccctgtacctgctgagccaggtgttcctgatcatccaccacgcccccctggtgaacagcctggccgaggtgatcctgaatggagacctgtctgagatgtatgccaagacagagcaggacatccagaggagcagcgccaagcccagcatccgctgcttcatcaagcccacagagaccctggagaggagcctggagatgaacaagcacaagggcaagagaagagtgcagaagaggcccaactacaagaatgtgggggaggaggaggatgaggagaagggccccacagaagatgcccaggaggatgctgagaaggccaagggcacagagggcggcagcaagggcatcaagaccagcggggagagcgaggagattgagatggtgatcatggagaggagcaagctgtctgagctggccgccagcacctctgtgcaggagcagaacaccacagatgaggagaagtctgctgctgccacctgcagcgagagcacccagtggagccggcccttcctggacatggtgtaccacgccctggacagcccagatgatgactaccacgccctgtttgtgctgtgcctgctgtatgccatgagccacaacaagggcatggaccctgagaagctggagcgcatccagctgcctgtgcccaatgctgctgagaagaccacctacaaccaccccctggccgagcggctcatccgcatcatgaacaatgctgcccagccagatggcaagatccggctggccaccctggagctgagctgcctgctgctgaagcagcaggtgctgatgtctgctggctgcatcatgaaggatgtgcacctggcctgcctggagggcgcccgggaggagagcgtgcacctggtgcgccacttctacaagggggaggacatcttcctggacatgtttgaagatgagtaccgctccatgaccatgaagcccatgaatgtggagtacctgatgatggatgccagcatcctgctgccccccaccggcacccccctgactggaattgactttgtgaagaggctgccctgtggagatgtggagaagacccggcgggccatccgggtcttcttcatgctgcggagcctgagcctgcagctgcggggggagcctgagacccagctgcccctgacccgggaggaggacctgatcaagacagatgatgtgctggacctgaacaacagcgacctgattgcctgcaccgtcatcaccaaggatggcggcatggtgcagcgcttcctggccgtggacatctaccagatgagcctggtggagccagatgtgtcccggctgggctggggcgtggtgaagtttgctggcctgctgcaggacatgcaggtgactggagtggaggatgacagccgggccctgaacatcaccatccacaagccagccagcagcccccacagcaagcccttccccatcctgcaggccaccttcatcttcagtgaccacatccgctgcatcatcgccaagcagaggctggccaagggccgcatccaggcccggaggatgaagatgcagagaattgctgccctgctggacctgcccatccagcccaccacagaggtgctgggcttcggcctgggcagcagcaccagcacccagcacctgcccttccgcttctatgaccagggccggcggggcagcagtgaccccaccgtgcagaggtctgtgtttgcctctgtggacaaggtgcccggctttgctgtggcccagtgcatcaaccagcacagcagccccagcctgagcagccagagccccccatctgccagcggcagccccagcggcagcggcagcaccagccactgtgacagcggcggcaccagcagcagcagcacccccagcacagcccagagccctgcagatgcccccatgagccctgagctgcccaagccccacctgcctgaccagctggtgattgtgaatgaaacagaggccgacagcaagcccagcaagaatgtggcccggtctgctgctgtggagacagccagcctgagccccagcctggtgcctgcccggcagcccaccatcagcctgctgtgtgaggacacagctgacaccctgtctgtggagagcctgaccctggtgccccctgtggacccccacagcctgcggagcctgaccggcatgccacccctgagcaccccagctgctgcctgcacagagcctgtgggggaggaggccgcctgtgccgagcctgtgggcacagctgaggactag

SEQ ID NO: 148667 - DNA, 288 bp, synthetic construct
  misc_feature 1..288: note = Description of Artificial Sequence: Synthetic coding sequence
  source 1..288: mol_type = other DNA
atgcatgacagcaacaacgtggagaaggacatcacccccagcgagctgcctgccaacccagccatccgggccaactgccaccaggagcccagcgtgtgcctgcaggccgcctgcccagagagctggattggcttccagaggaagtgcttctacttcagtgatgacaccaagaactggaccagcagccagcgcttctgtgacagccaggatgctgacctggcccaggtggagagcttccaggagctggtgtcctacccaggcagcagaagagtgtgcctgtttgaatag

SEQ ID NO: 148668 - DNA, 525 bp, synthetic construct
  misc_feature 1..525: note = Description of Artificial Sequence: Synthetic coding sequence
  source 1..525: mol_type = other DNA
atgatcaaccctgagctgagagatggccgggcagatggcttcatccaccgcatcgtgcccaagctgatccagaactggaagattggcctgatgtgcttcctgagcatcatcatcaccaccgtgtgcatcatcatgattgccacctggagcaagcacgccaagcctgtggcctgcagcggggactggctgggcgtgcgggacaagtgcttctacttcagtgatgacaccaggaactggacagccagcaagatcttctgcagcctgcagaaggccgagctggcccagattgacacccaggaggacatggagttcctgaagagatatgccggcacagacatgcactggattggcctgagcaggaagcagggcgacagctggaagtggaccaacggcaccaccttcaacggctggtttgagatcattggaaatggcagctttgccttcctgtctgcagatggagtgcacagcagccggggcttcatcgacatcaagtggatctgcagcaagcccaagtacttcctgtag

SEQ ID NO: 148669 - DNA, 2406 bp, synthetic construct
  misc_feature 1..2406: note = Description of Artificial Sequence: Synthetic coding sequence
  source 1..2406: mol_type = other DNA
atgcaccacaggatgaatgagatgaacctgagccctgtgggcatggagcagctgaccagcagctctgtgtccaatgccctgcctgtgtctggcagccacctgggcctggccgccagccccacccacagcgccatcccagcccctggcctgcctgtggccatccccaacctgggccccagcctgagcagcctgcccagcgccctgagcctgatgctgcccatgggcatcggggaccggggcgtgatgtgtggcctgcctgagaggaactacaccctgcccccaccaccctacccccacctggagagcagctacttccgcaccatcctgcccggcatcctgagctacctggccgaccggcccccaccccagtacatccaccccaacagcatcaacgtggatggcaacacagccctgagcatcaccaacaaccccagcgccctggacccctaccagagcaatggaaatgtgggcctggagcccggcatcgtgtccattgacagccgctctgtgaacacccatggagcccagagcctgcaccccagtgatggccacgaggtggccctggacacagccatcaccatggagaatgtgtcccgggtgaccagccccatcagcacagatggcatggccgaggagctgaccatggatggagtggccggggagcacagccagatccccaacggcagccgcagccatgagcccctgtctgtggacagcgtgagcaacaacctggccgcagatgctgtgggccatggaggagtcatccccatgcacggcaatggcctggagctgcctgtggtgatggagacagaccacatcgccagccgggtgaatggcatgtctgattctgccctgagtgacagcatccacacagtggccatgagcaccaacagcgtgtctgtggccctgagcaccagccacaacctggccagcctggagagcgtgtccctgcacgaggtgggcctgagcctggagcctgtggccgtgagcagcatcacccaggaggtggccatgggcaccggccacgtggatgtgtccagtgacagcctgagctttgtgagccccagcctgcagatggaggacagcaacagcaacaaggagaacatggccaccctcttcaccatctggtgcaccctgtgtgaccgggcctaccccagcgactgcccagagcacggccctgtgacctttgtgcctgacacccccatcgagagccgggcccggctgagcctgcccaagcagctggtgctgcggcagagcatcgtgggcgctgaggtgggcgtgtggacaggagagaccatccctgtgaggacctgcttcggccccctgattggccagcagagccacagcatggaggtggccgagtggacagacaaggctgtgaaccacatctggaagatctaccacaatggagtgctggagttctgcatcatcaccacagatgaaaatgaatgcaactggatgatgtttgtgaggaaggccaggaaccgggaggagcagaacctggtggcctacccccatgatggcaagatcttcttctgcaccagccaggacatccccccagaaaatgagctgctcttctactacagccgggactatgcccagcagatcggcgtgcctgagcacccagatgtgcacctgtgcaactgtgggaaggagtgcaacagctacacagagttcaaggcccacctgaccagccacatccacaaccacctgcccacccagggccacagcggcagccacggccccagccacagcaaggagaggaagtggaagtgcagcatgtgcccccaggccttcatcagccccagcaagctgcacgtgcacttcatgggccacatgggcatgaagccccacaagtgtgacttctgcagcaaggccttcagtgaccccagcaacctgcggacccacctgaagatccacacaggccagaagaactaccgctgcaccctgtgtgacaagagcttcacccagaaggcccacctggagagccacatggtgatccacactggagagaagaacctgaagtgtgactactgtgacaagctgttcatgaggcggcaggacctgaagcagcacgtgctgatccacacccaggagcggcagatcaagtgccccaagtgtgacaagctgttcctgcggaccaaccacctgaagaagcacctgaacagccatgagggcaagagggactatgtgtgtgagaagtgcaccaaggcctacctgaccaagtaccacctgaccaggcacctgaagacctgcaagggccccaccagcagcagcagcgcccctgaggaggaggaggaggatgacagcgaggaggaggacctggccgacagcgtgggcacagaggactgccgcatcaacagcgctgtgtacagcgcagatgagagcctgagcgcccacaagtag

SEQ ID NO: 148670 - DNA, 465 bp, synthetic construct
  misc_feature 1..465: note = Description of Artificial Sequence: Synthetic coding sequence
  source 1..465: mol_type = other DNA
atgcatgacagcaacaacgtggagaaggacatcacccccagcgagctgcctgccaacccagccatccgggccaactgccaccaggagcccagcgtgtgcctgcaggccgcctgcccagagagctggattggcttccagaggaagtgcttctacttcagtgatgacaccaagaactggaccagcagccagcgcttctgtgacagccaggatgctgacctggcccaggtggagagcttccaggagctgaacttcctgctgcgctacaagggccccagcgaccactggattggcctgagccgggagcagggccagccctggaagtggatcaatggaacagagtggacccggcagttccccatcctgggcgctggagaatgtgcctacctgaatgacaagggggccagcagcgcccggcactacacagagaggaagtggatctgcagcaagagtgacatccacgtgtag

SEQ ID NO: 148671 - DNA, 585 bp, synthetic construct
  misc_feature 1..585: note = Description of Artificial Sequence: Synthetic coding sequence
  source 1..585: mol_type = other DNA
atgcatgacagcaacaacgtggagaaggacatcacccccagcgagctgcctgccaaccctggctgcctgcacagcaaggagcacagcatcaaggccaccctcatctggaggctcttcttcctgatcatgttcctgaccatcatcgtgtgtggcatggtggccgccctgagcgccatccgggccaactgccaccaggagcccagcgtgtgcctgcaggccgcctgcccagagagctggattggcttccagaggaagtgcttctacttcagtgatgacaccaagaactggaccagcagccagcgcttctgtgacagccaggatgctgacctggcccaggtggagagcttccaggagctgaacttcctgctgcgctacaagggccccagcgaccactggattggcctgagccgggagcagggccagccctggaagtggatcaatggaacagagtggacccggcagctggtgatgaaggaggatggagccaacctgtatgtggccaaggtgtcccaggtgcccaggatgaaccccaggcctgtgatggtgtcctacccaggcagccggcgggtgtgcctgtttgaatag

SEQ ID NO: 148672 - DNA, 576 bp, synthetic construct
  misc_feature 1..576: note = Description of Artificial Sequence: Synthetic coding sequence
  source 1..576: mol_type = other DNA
atgcatgacagcaacaacgtggagaaggacatcacccccagcgagctgcctgccaaccctggctgcctgcacagcaaggagcacagcatcaaggccaccctcatctggaggctcttcttcctgatcatgttcctgaccatcatcgtgtgtggcatggtggccgccctgagcgccatccgggccaactgccaccaggagcccagcgtgtgcctgcaggccgcctgcccagagagctggattggcttccagaggaagtgcttctacttcagtgatgacaccaagaactggaccagcagccagcgcttctgtgacagccaggatgctgacctggcccaggtggagagcttccaggagctgaacttcctgctgcgctacaagggccccagcgaccactggattggcctgagccgggagcagggccagccctggaagtggatcaatggaacagagtggacccggcagttccccatcctgggcgctggggagtgtgcctacctgaatgacaagggggccagcagcgcccggcactacacagagaggaagtggatctgcagcaagagtgacatccacgtgtag

SEQ ID NO: 148673 - DNA, 399 bp, synthetic construct
  misc_feature 1..399: note = Description of Artificial Sequence: Synthetic coding sequence
  source 1..399: mol_type = other DNA
atgcatgacagcaacaacgtggagaaggacatcacccccagcgagctgcctgccaaccctggctgcctgcacagcaaggagcacagcatcaaggccaccctcatctggaggctcttcttcctgatcatgttcctgaccatcatcgtgtgtggcatggtggccgccctgagcgccatccgggccaactgccaccaggagcccagcgtgtgcctgcaggccgcctgcccagagagctggattggcttccagaggaagtgcttctacttcagtgatgacaccaagaactggaccagcagccagcgcttctgtgacagccaggatgctgacctggcccaggtggagagcttccaggagctggtgtcctacccaggcagccggcgggtgtgcctgtttgaatag

SEQ ID NO: 148674 - DNA, 891 bp, synthetic construct
  misc_feature 1..891: note = Description of Artificial Sequence: Synthetic coding sequence
  source 1..891: mol_type = other DNA
atgtctgacagcaaggagccccgggtgcagcagctgggcctgctgggctgcctgggccacggggccctggtgctgcagctgctgtccttcatgctgctggccggcgtgctggtggccatcctggtgcaggtgtccaaggtgcccagcagcctgagccaggagcagagcgagcaggatgccatctaccagaacctgacccagctgaaggctgctgtgggggagctgtctgagaagagcaagctgcaggagatctaccaggagctgacccagctgaaggctgctgtgggggagctgcctgagaagagcaagctgcaggagatctaccaggagctgacccggctgaaggctgctgtgggggagctgcctgagaagagcaagctgcaggagatctaccaggagctgacccggctgaaggctgctgtgggggagctgcctgagaagagcaagctgcaggagatctaccaggagctgacccggctgaaggctgctgtgggggagctgcctgagaagagcaagctgcaggagatctaccaggagctgacagagctgaaggctgctgtgggggagctgcctgagaagagcaagctgcaggagatctaccaggagctgacccagctgaaggctgctgtgggggagctgcctgaccagagcaagcagcagcagatctaccaggagctgacagacctgaagacagcctttgagcggctgtgccgccactgccccaaggactggaccttcttccagggcaactgctacttcatgagcaacagccagaggaactggcatgacagcgtgacagcctgccaggaggtgcgggcccagctggtggtgatcaagacagctgaggagcagctgcctgctgtgctggagcagtggaggacccagcagtag

SEQ ID NO: 148675 - DNA, 2379 bp, synthetic construct
  misc_feature 1..2379: note = Description of Artificial Sequence: Synthetic coding sequence
  source 1..2379: mol_type = other DNA
atggccgcccccagcctgctgaactggaggagagtgagcagcttcaccggccctgtgccccgggcccggcacggccacagagctgtggccatccgggagctgatgatcatctttggaggcggcaatgaaggaattgctgatgagctgcacgtgtacaacacagccaccaaccagtggttcctgcctgctgtgcggggggacatccccccaggctgtgccgcccacggctttgtgtgtgatggcacccgcatcctggtgtttggaggcatggtggagtatggccgctacagcaatgagctgtatgagctgcaggccagccgctggctgtggaagaaggtgaagccccaccccccacccagcggcctgcccccctgcccccggctgggccacagcttcagcctgtatggcaacaagtgctacctgtttggaggcctggccaatgaaagtgaggacagcaacaacaacgtgccccgctacctgaatgacttctatgagctggagctgcagcacggcagcggcgtggtgggctggagcatccctgtgaccaagggcgtggtgcccagcccccgggagagccacacagctgtgatctactgcaagaaggacagcggcagccccaagatgtatgtgtttggaggcatgtgtggggcccggctggatgacctgtggcagctggacctggagaccatgtcctggagcaagccagagaccaagggcaccgtgcccctgcccaggagcctgcacacagcctctgtgattggcaacaagatgtacatctttggaggctgggtgccccacaagggagaaaatacagagaccagcccccatgactgtgagtggcgctgcaccagcagcttctcctacctgaacctggacaccacagagtggaccaccctggtgtctgacagccaggaggacaagaagaacagccggccccggccccgggccggccactgtgctgtggccatcggcacccggctgtacttctggagcggcagagatggctacaagaaggccctgaacagccaggtgtgctgcaaggacctgtggtacctggacacagagaagcccccagcccccagccaggtgcagctgatcaaggccaccaccaacagcttccacgtgaagtgggatgaggtgtccacagtggagggctacctgctgcagctgagcacagacctgccctaccaggccgccagcagtgacagcagcgctgcccccaacatgcagggcgtgaggatggacccccaccggcagggcagcaacaacatcgtgcccaacagcatcaatgacaccatcaacagcaccaagacagagcagcctgccaccaaggagacctccatgaagaacaagccagacttcaaggccctgacagacagcaatgccatcctgtaccccagcctggccagcaatgccagcaaccacaacagccacgtggtggacatgctgaggaagaatgaaggcccccacaccagcgccaacgtgggcgtgctgagcagctgcctggatgtgaggacagtcatccctgagacctctgtgagcagcacagtgagcagcacccagaccatggtgacccagcagaccatcaagacagagagcagcagcaccaatggagctgtggtgaaggatgagaccagcctgaccaccttcagcaccaagtctgaggtggatgagacctacgccctgcctgccaccaagatcagccgggtggagacccacgccacagccacccccttcagcaaggagacccccagcaaccctgtggccaccgtgaaggccggggagcggcagtggtgtgatgtgggcatcttcaagaacaacacagccctggtgtcccagttctacctgctgcccaagggcaagcagagcatcagcaaggtgggcaatgctgatgtgcctgactacagcctgctgaagaagcaggacctggtgcccggcaccggctaccgcttccgggtggccgccatcaatggctgcggcatcggccccttcagcaagatcagcgagttcaagacctgcatccctggcttccctggggcccccagcgctgtgcgcatcagcaagaatgtggagggcatccacctgtcctgggagccccccaccagccccagcggcaacatcctggagtacagcgcctacctggccatcagaacagcccagatccaggacaaccccagccagctggtgttcatgaggatctactgcggcctgaagaccagctgcatcgtgacagctggccagctggccaatgcccacatcgactacaccagcaggcctgccatcgtgttccgcatcagcgccaagaatgagaagggctacggccctgccacccaggtgcgctggctgcagggcaacaacaagaaggcccccctgaactag

SEQ ID NO: 148676 - DNA, 498 bp, synthetic construct
  misc_feature 1..498: note = Description of Artificial Sequence: Synthetic coding sequence
  source 1..498: mol_type = other DNA
atgaccagcgagatcacctacgccgaggtgcgcttcaagaatgagttcaagagcagcggcatcaacacagccagcagcgctgagacagcctggagctgctgccccaagaactggaagagcttcagcagcaactgctacttcatcagcacagagagcgcctcctggcaggacagcgagaaggactgtgccaggatggaggcccacctgctggtgatcaacacccaggaggagcaggacttcatcttccagaacctgcaggaggagagcgcctactttgtgggcctgagtgaccctgagggccagaggcactggcagtgggtggaccagaccccctacaatgaaagcagcaccttctggcacccccgggagcccagcgaccccaatgaaagatgtgtggtgctgaacttcaggaagagccccaagcgctggggctggaatgatgtgaactgcctgggcccccagaggtctgtgtgtgagatgatgaagatccacctgtag

SEQ ID NO: 148677 - DNA, 615 bp, synthetic construct
  misc_feature 1..615: note = Description of Artificial Sequence: Synthetic coding sequence
  source 1..615: mol_type = other DNA
atgaccagcgagatcacctacgccgaggtgcgcttcaagaatgagttcaagagcagcggcatcaacacagccagcagcgctgccagcaaggagaggacagccccccacaagagcaacacaggcttccccaagctgctgtgtgccagcctgctgatcttcttcctgctgctggccatctccttcttcatcgcctttgtgaagacagcctggagctgctgccccaagaactggaagagcttcagcagcaactgctacttcatcagcacagaaagtgcctcctggcaggacagcgagaaggactgtgccaggatggaggcccacctgctggtgatcaacacccaggaggagcaggacttcatcttccagaacctgcaggaggagagcgcctactttgtgggcctgagtgaccctgagggccagaggcactggcagtgggtggaccagaccccctacaatgaaagcagcaccttctggcacccccgggagcccagcgaccccaatgaaagatgtgtggtgctgaacttcaggaagagccccaagcgctggggctggaatgatgtgaactgcctgggcccccagaggtctgtgtgtgagatgatgaagatccacctgtag

SEQ ID NO: 148678 - DNA, 597 bp, synthetic construct
  misc_feature 1..597: note = Description of Artificial Sequence: Synthetic coding sequence
  source 1..597: mol_type = other DNA
atgaccagcgagatcacctacgccgaggtgcgcttcaagaatgagttcaagagcagcggcatcaacacagccagcagcgctgtgttcttccagaagtacagccagctgctggagaagaagaccaccaaggagctggtgcacaccaccctggagtgtgtgaagaagaacatgcctgtggaggagacagcctggagctgctgccccaagaactggaagagcttcagcagcaactgctacttcatcagcacagaaagtgcctcctggcaggacagcgagaaggactgtgccaggatggaggcccacctgctggtgatcaacacccaggaggagcaggacttcatcttccagaacctgcaggaggagagcgcctactttgtgggcctgagtgaccctgagggccagaggcactggcagtgggtggaccagaccccctacaatgaaagcagcaccttctggcacccccgggagcccagcgaccccaatgaaagatgtgtggtgctgaacttcaggaagagccccaagcgctggggctggaatgatgtgaactgcctgggcccccagaggtctgtgtgtgagatgatgaagatccacctgtag

SEQ ID NO: 148679 - DNA, 549 bp, synthetic construct
  misc_feature 1..549: note = Description of Artificial Sequence: Synthetic coding sequence
  source 1..549: mol_type = other DNA
atggtgcctgaggaggagccccaggacagagtgccccacaacttcatgtacagcaagacagtgaagaggctgagcaagctgcgggagtaccagcagtaccaccccagcctgacctgtgtgatggagggcaaggacatcgaggactggagctgctgccccaccccctggaccagcttccagagcagctgctacttcatcagcacaggcatgcagagctggaccaagagccagaagaactgcagcgtgatgggcgctgacctggtggtgatcaacacccgggaggagcaggacttcatcatccagaacctgaagaggaacagcagctacttcctgggcctgagtgaccccggcggcagaagacactggcagtgggtggaccagaccccctacaatgaaaatgtgaccttctggcacagcggggagcccaacaacctggatgagcgctgtgccatcatcaacttccgcagcagcgaggagtggggctggaatgacatccactgccacgtgccccagaagagcatctgcaagatgaagaagatctacatctag

SEQ ID NO: 148680 - DNA, 642 bp, synthetic construct
  misc_feature 1..642: note = Description of Artificial Sequence: Synthetic coding sequence
  source 1..642: mol_type = other DNA
atggtgcctgaggaggagccccaggaccgggagaagggcctgtggtggttccagctgaaggtgtggagcatggctgtggtgtccatcctgctgctgtctgtgtgcttcaccgtgtcctctgtggtgccccacaacttcatgtacagcaagacagtgaagaggctgagcaagctgcgggagtaccagcagtaccaccccagcctgacctgtgtgatggagggcaaggacatcgaggactggagctgctgccccaccccctggaccagcttccagagcagctgctacttcatcagcacaggcatgcagagctggaccaagagccagaagaactgcagcgtgatgggcgctgacctggtggtgatcaacacccgggaggagcaggacttcatcatccagaacctgaagaggaacagcagctacttcctgggcctgagtgaccccggcggccgccgccactggcagtgggtggaccagaccccctacaatgaaaatgtgaccttctggcacagcggggagcccaacaacctggatgagcgctgtgccatcatcaacttccgcagcagcgaggagtggggctggaatgacatccactgccacgtgccccagaagagcatctgcaagatgaagaagatctacatctag

SEQ ID NO: 148681 - DNA, 549 bp, synthetic construct; identical to SEQ ID NO: 148679
  misc_feature 1..549: note = Description of Artificial Sequence: Synthetic coding sequence
  source 1..549: mol_type = other DNA

SEQ ID NO: 148682 - DNA, 642 bp, synthetic construct; identical to SEQ ID NO: 148680
  misc_feature 1..642: note = Description of Artificial Sequence: Synthetic coding sequence
  source 1..642: mol_type = other DNA

SEQ ID NO: 148683 - DNA, 648 bp, synthetic construct
  misc_feature 1..648: note = Description of Artificial Sequence: Synthetic coding sequence
  source 1..648: mol_type = other DNA
atgggcctggagaagccccagagcaagctggagggcggcatgcacccccagctgatccccagcgtgattgctgtggtgttcatcctgctgctgtctgtgtgcttcatcgccagctgcctggtgacccaccacaacttcagccgctgcaagaggggcactggagtgcacaagctggagcaccacgccaagctgaagtgcatcaaggagaagtctgagctgaagtctgctgagggcagcacctggaactgctgccccatcgactggagggccttccagagcaactgctacttccccctgacagacaacaagacctgggccgagagcgagaggaactgcagcggcatgggcgcccacctgatgaccatcagcacagaggccgagcagaacttcatcatccagttcctggaccggcggctgagctacttcctgggcctgagagatgaaaatgccaagggccagtggcgctgggtggaccagacccccttcaaccccaggagggtcttctggcacaagaatgaaccagacaacagccagggcgagaactgtgtggtgctggtgtacaaccaggacaagtgggcctggaatgatgtgccctgcaactttgaggccagccgcatctgcaagatccctggcaccaccctgaactag

SEQ ID NO: 148684 - DNA, 435 bp, synthetic construct
  misc_feature 1..435: note = Description of Artificial Sequence: Synthetic coding sequence
  source 1..435: mol_type = other DNA
atgggcctggagaagccccagagcaagctggagggcggcatgcacccccagctgatccccagcgtgattgctgtggtgttcatcctgctgctgtctgtgtgcttcatcgccagctgcctggtgacccaccacaacttcagccgctgcaagaggggcactggagtgcacaagctggagcaccacgccaagctgaagtgcatcaaggagaagtctgagctgaagtctgctgagggcagcacctggaactgctgccccatcgactggagggccttccagagcaactgctacttccccctgacagacaacaagacctgggccgagagcgagaggaactgcagcggcatgggcgcccacctgatgaccatcagcacagaggccgagcagaacttcatcatccagttcctggaccggcggctgagctacttcctgggctag

SEQ ID NO: 148685 - DNA, 660 bp, synthetic construct
  misc_feature 1..660: note = Description of Artificial Sequence: Synthetic coding sequence
  source 1..660: mol_type = other DNA
atgaacagcagcaagagcagcgagacccagtgcacagagcggggctgcttcagcagccagatgttcctgtggacagtggccggcatccccatcctcttcctgagcgcctgcttcatcacccgctgtgtggtgaccttccgcatcttccagacctgtgatgagaagaagttccagctgcctgagaacttcacagagctgagctgctacaactacggcagcggctctgtgaagaactgctgccccctgaactgggagtacttccagagcagctgctacttcttcagcacagacaccatctcctgggccctgagcctgaagaactgcagcgccatgggcgcccacctggtggtgatcaacagccaggaggagcaggagttcctgagctacaagaagcccaagatgagggagttcttcatcggcctgagtgaccaggtggtggagggccagtggcagtgggtggatggcacccccctgaccaagagcctgtccttctgggatgtgggggagcccaacaacatcgccaccctggaggactgtgccaccatgagggacagcagcaacccccggcagaactggaatgatgtgacctgcttcctgaactacttccgcatctgtgagatggtgggcatcaaccccctgaacaagggcaagagcctgtag

SEQ ID NO: 148686 - DNA, 1134 bp, synthetic construct
  misc_feature 1..1134: note = Description of Artificial Sequence: Synthetic coding sequence
  source 1..1134: mol_type = other DNA
atgtctgacagcaaggagccccgggtgcagcagctgggcctgctggaggaggaccccaccaccagcggcatccgcctcttcccccgggacttccagttccagcagatccacggccacaagagcagcacaggctgcctgggccacggggccctggtgctgcagctgctgtccttcatgctgctggccggcgtgctggtggccatcctggtgcaggtgtccaaggtgcccagcagcctgagccaggagcagagcgagcaggatgccatctaccagaacctgacccagctgaaggctgctgtgggggagctgtctgagaagagcaagctgcaggagatctaccaggagctgacccagctgaaggctgctgtggtgggggagctgcctgagaagagcaagctgcaggagatctaccaggagctgacccggctgaaggctgctgtgggggagctgcctgagaagagcaagctgcaggagatctaccaggagctgacccggctgaaggctgctgtgggggagctgcctgagaagagcaagctgcaggagatctaccaggagctgacagagctgaaggctgctgtgggggagctgcctgagaagagcaagctgcaggagatctaccaggagctgacccagctgaaggctgctgtgggggagctgcctgaccagagcaagcagcagcagatctaccaggagctgacagacctgaagacagcctttgagcggctgtgccgccactgccccaaggactggaccttcttccagggcaactgctacttcatgagcaacagccagaggaactggcatgacagcgtgacagcctgccaggaggtgcgggcccagctggtggtgatcaagacagctgaggagcagaacttcctgcagctgcagaccagccgcagcaaccgcttctcctggatgggcctgagtgacctgaaccaggagggcacctggcagtgggtggatggcagccccctgagccccagcttccagcgctactggaacagcggggagcccaacaacagcggaaatgaagactgtgccgagttcagcggcagcggctggaatgacaacagatgtgatgtggacaactactggatctgcaagaagccagctgcctgcttcagagatgaatag

SEQ ID NO: 148687 - DNA, 1200 bp, synthetic construct
  misc_feature 1..1200: note = Description of Artificial Sequence: Synthetic coding sequence
  source 1..1200: mol_type = other DNA
atgtctgacagcaaggagccccgggtgcagcagctgggcctgctggaggaggaccccaccaccagcggcatccgcctcttcccccgggacttccagttccagcagatccacggccacaagagcagcacaggctgcctgggccacggggccctggtgctgcagctgctgtccttcatgctgctggccggcgtgctggtggccatcctggtgcaggtgtccaaggtgcccagcagcctgagccaggagcagagcgagcaggatgccatctaccagaacctgacccagctgaaggctgctgtgggggagctgtctgagaagagcaagctgcaggagatctaccaggagctgacccagctgaaggctgctgtgggggagctgcctgagaagagcaagctgcaggagatctaccaggagctgacccggctgaaggctgctgtgggggagctgcctgagaagagcaagctgcaggagatctaccaggagctgacccggctgaaggctgctgtgggggagctgcctgagaagagcaagctgcaggagatctaccaggagctgacccggctgaaggctgctgtgggggagctgcctgagaagagcaagctgcaggagatctaccaggagctgacagagctgaaggctgctgtgggggagctgcctgagaagagcaagctgcaggagatctaccaggagctgacccagctgaaggctgctgtgggggagctgcctgaccagagcaagcagcagcagatctaccaggagctgacagacctgaagacagcctttgagcggctgtgccgccactgccccaaggactggaccttcttccagggcaactgctacttcatgagcaacagccagaggaactggcatgacagcgtgacagcctgccaggaggtgcgggcccagctggtggtgatcaagacagctgaggagcagaacttcctgcagctgcagaccagccgcagcaaccgcttctcctggatgggcctgagtgacctgaaccaggagggcacctggcagtgggtggatggcagccccctgagccccagcttccagcgctactggaacagcggggagcccaacaacagcggaaatgaagactgtgccgagttcagcggcagcggctggaatgacaacagatgtgatgtggacaactactggatctgcaagaagccagctgcctgcttcagagatgaatag

SEQ ID NO: 148688 - DNA, 1047 bp, synthetic construct
  misc_feature 1..1047: note = Description of Artificial Sequence: Synthetic coding sequence
  source 1..1047: mol_type = other DNA
atgtctgacagcaaggagccccgggtgcagcagctgggcctgctgggctgcctgggccacggggccctggtgctgcagctgctgtccttcatgctgctggccggcgtgctggtggccatcctggtgcaggtgtccaaggtgcccagcagcctgagccaggagcagagcgagcaggatgccatctaccagaacctgacccagctgaaggctgctgtgggggagctgtctgagaagagcaagctgcaggagatctaccaggagctgacccagctgaaggctgctgtgggggagctgcctgagaagagcaagctgcaggagatctaccaggagctgacccggctgaaggctgctgtgggggagctgcctgagaagagcaagctgcaggagatctaccaggagctgacccggctgaaggctgctgtgggggagctgcctgagaagagcaagctgcaggagatctaccaggagctgacagagctgaaggctgctgtgggggagctgcctgagaagagcaagctgcaggagatctaccaggagctgacccagctgaaggctgctgtgggggagctgcctgaccagagcaagcagcagcagatctaccaggagctgacagacctgaagacagcctttgagcggctgtgccgccactgccccaaggactggaccttcttccagggcaactgctacttcatgagcaacagccagaggaactggcatgattctgtgacagcctgccaggaggtgcgggcccagctggtggtgatcaagacagctgaggagcagaacttcctgcagctgcagaccagccgcagcaaccgcttctcctggatgggcctgagtgacctgaaccaggagggcacctggcagtgggtggatggcagccccctgagccccagcttccagcgctactggaacagcggggagcccaacaacagcggaaatgaagactgtgccgagttcagcggcagcggctggaatgacaacagatgtgatgtggacaactactggatctgcaagaagccagctgcctgcttcagagatgaatag

SEQ ID NO: 148689 - DNA, 975 bp, synthetic construct
  misc_feature 1..975: note = Description of Artificial Sequence: Synthetic coding sequence
  source 1..975: mol_type = other DNA
atgtctgacagcaaggagccccgggtgcagcagctgggcctgctggaggaggaccccaccaccagcggcatccgcctcttcccccgggacttccagttccagcagatccacggccacaagagcagcacaggctgcctgggccacggggccctggtgctgcagctgctgtccttcatgctgctggccggcgtgctggtggccatcctggtgcaggtgtccaaggtgcccagcagcctgagccaggagcagagcgagcaggatgccatctaccagaacctgacccagctgaaggctgctgtgggggagctgtctgagaagagcaagctgcaggagatctaccaggagctgacccagctgaaggctgctgtgggggagctgcctgagaagagcaagctgcaggagatctaccaggagctgacccggctgaaggctgctgtgggggagctgcctgagaagagcaagctgcaggagatctaccaggagctgacccggctgaaggctgctgtgggggagctgcctgagaagagcaagctgcaggagatctaccaggagctgacccggctgaaggctgctgtgggggagctgcctgagaagagcaagctgcaggagatctaccaggagctgacagagctgaaggctgctgtgggggagctgcctgagaagagcaagctgcaggagatctaccaggagctgacccagctgaaggctgctgtgggggagctgcctgaccagagcaagcagcagcagatctaccaggagctgacagacctgaagacagcctttgagcggctgtgccgccactgccccaaggactggaccttcttccagggcaactgctacttcatgagcaacagccagaggaactggcatgacagcgtgacagcctgccaggaggtgcgggcccagctggtggtgatcaagacagctgaggagcagctgcctgctgtgctggagcagtggaggacccagcagtag

SEQ ID NO: 148690 - DNA, 771 bp, synthetic construct
  misc_feature 1..771: note = Description of Artificial Sequence: Synthetic coding sequence
  source 1..771: mol_type = other DNA
atgtctgacagcaaggagccccgggtgcagcagctgggcctgctggtgtccaaggtgcccagcagcctgagccaggagcagagcgagcaggatgccatctaccagaacctgacccagctgaaggctgctgtgggggagctgtctgagaagagcaagctgcaggagatctaccaggagctgacccagctgaaggctgctgtgggggagctgcctgagaagagcaagctgcaggagatctaccaggagctgacccggctgaaggctgctgtgggggagctgcctgagaagagcaagctgcaggagatctaccaggagctgacccggctgaaggctgctgtgggggagctgcctgagaagagcaagctgcaggagatctaccaggagctgacccggctgaaggctgctgtgggggagctgcctgagaagagcaagctgcaggagatctaccaggagctgacagagctgaaggctgctgtgggggagctgcctgagaagagcaagctgcaggagatctaccaggagctgacccagctgaaggctgctgtgggggagctgcctgaccagagcaagcagcagcagatctaccaggagctgacagacctgaagacagcctttgagcggctgtgccgccactgccccaaggactggaccttcttccagggcaactgctacttcatgagcaacagccagaggaactggcatgacagcgtgacagcctgccaggaggtgcgggcccagctggtggtgatcaagacagctgaggagcagtag

SEQ ID NO: 148691 - DNA, 999 bp, synthetic construct
  misc_feature 1..999: note = Description of Artificial Sequence: Synthetic coding sequence
  source 1..999: mol_type = other DNA
atgtctgacagcaaggagccccgggtgcagcagctgggcctgctggaggaggaccccaccaccagcggcatccgcctcttcccccgggacttccagttccagcagatccacggccacaagagcagcacagtgcccttcctgctgggccctgtgtccaaggtgcccagcagcctgagccaggagcagagcgagcaggatgccatctaccagaacctgacccagctgaaggctgctgtgggggagctgtctgagaagagcaagctgcaggagatctaccaggagctgacccagctgaaggctgctgtgggggagctgcctgagaagagcaagctgcaggagatctaccaggagctgacccggctgaaggctgctgtgggggagctgcctgagaagagcaagctgcaggagatctaccaggagctgacccggctgaaggctgctgtgggggagctgcctgagaagagcaagctgcaggagatctaccaggagctgacagagctgaaggctgctgtgggggagctgcctgagaagagcaagctgcaggagatctaccaggagctgacccagctgaaggctgctgtggagcggctgtgccgccactgccccaaggactggaccttcttccagggcaactgctacttcatgagcaacagccagaggaactggcatgattctgtgacagcctgccaggaggtgcgggcccagctggtggtgatcaagacagctgaggagcagaacttcctgcagctgcagaccagccgcagcaaccgcttctcctggatgggcctgagtgacctgaaccaggagggcacctggcagtgggtggatggcagccccctgagccccagcttccagcgctactggaacagcggggagcccaacaacagcggaaatgaagactgtgccgagttcagcggcagcggctggaatgacaacagatgtgatgtggacaactactggatctgcaagaagccagctgcctgcttcagagatgaatag

SEQ ID NO: 148692 - DNA, 1164 bp, synthetic construct
  misc_feature 1..1164: note = Description of Artificial Sequence: Synthetic coding sequence
  source 1..1164: mol_type = other DNA
atgtctgacagcaaggagccccgggtgcagcagctgggcctgctggaggaggaccccaccaccaacttccagttccagcagatccacggccacaagagcagcacaggctgcctgggccacggggccctggtgctgcagctgctgtccttcatgctgctggccggcgtgctgccccggctgagcaaggtgcccagcagcctgagccaggagcagagcgagcaggatgccatctaccagaacctgacccagctgaaggctgctgtgggggagctgtctgagaagagcaagctgcaggagatctaccaggagctgacccagctgaaggctgctgtgggggagctgcctgagaagagcaagctgcaggagatctaccaggagctgacccggctgaaggctgctgtgggggagctgcctgagaagagcaagctgcaggagatctaccaggagctgacccggctgaaggctgctgtgggggagctgcctgagaagagcaagctgcaggagatctaccaggagctgacccggctgaaggctgctgtgggggagctgcctgagaagagcaagctgcaggagatctaccaggagctgacagagctgaaggctgctgtgggggagctgcctgagaagagcaagctgcaggagatctaccaggagctgacccagctgaaggctgctgtgggggagctgcctgaccagagcaagcagcagcagatctaccaggagctgacagacctgaagacagcctttgagcggctgtgccgccactgccccaaggactggaccttcttccagggcaactgctacttcatgagcaacagccagaggaactggcatgacagcgtgacagcctgccaggaggtgcgggcccagctggtggtgatcaagacagctgaggagcagaacttcctgcagctgcagaccagccgcagcaaccgcttctcctggatgggcctgagtgacctgaaccaggagggcacctggcagtgggtggatggcagccccctgagccccagcttccagcgctactggaacagcggggagcccaacaacagcggaaatgaagactgtgccgagttcagcggcagcggctggaatgacaacagatgtgatgtggacaactactggatctgcaagaagccagctgcctgcttcagagatgaatag

SEQ ID NO: 148693 - DNA, 567 bp, synthetic construct
  misc_feature 1..567: note = Description of Artificial Sequence: Synthetic coding sequence
  source 1..567: mol_type = other DNA
atgaactggcacatgatcatcagcggcctgattgtggtggtgctgaaggtggtgggcatgaccctcttcctgctgtacttcccccagatcttcaacaagagcaatgatggcttcaccaccaccaggagctatggcaccgtgtcccagatcttcggcagcagcagccccagccccaacggcttcatcaccaccaggagctatggaacagtgtgccccaaggactgggagttctaccaggcccgctgcttcttcctgagcaccagcgagagctcctggaatgaaagccgggacttctgcaagggcaagggcagcaccctggccatcgtgaacaccccagagaagctgaagttcctgcaggacatcacagatgctgagaagtacttcatcggcctcatctaccaccgggaggagaagcgctggcgctggatcaacaacagcgtcttcaatggaaatgtgaccaaccagaaccagaacttcaactgtgccaccatcggcctgaccaagacctttgatgctgccagctgtgacatctcctaccgccgcatctgtgagaagaatgccaagtag

SEQ ID NO: 148694 - DNA, 630 bp, synthetic construct
  misc_feature 1..630: note = Description of Artificial Sequence: Synthetic coding sequence
  source 1..630: mol_type = other DNA
atgatgcaggagcagcagccccagagcacagagaagaggggctggctgagcctgcggctgtggagcgtggccggcatcagcatcgccctgctgagcgcctgcttcatcgtgtcctgtgtggtgacctaccacttcacctatggagagaccgggaagaggctgtctgagctgcacagctaccacagcagcctgacctgcttcagcgagggcaccaaggtgcctgcctggggctgctgcccagcctcctggaagagctttggcagcagctgctacttcatcagcagcgaggagaaggtgtggagcaagtctgagcagaactgtgtggagatgggcgcccacctggtggtgttcaacacagaagctgagcagaacttcatcgtgcagcagctgaatgaaagcttctcctacttcctgggcctgagtgacccccagggcaacaacaactggcagtggattgacaagaccccctatgagaagaatgtgcgcttctggcacctgggggagcccaaccacagcgctgagcagtgtgccagcatcgtgttctggaagcccaccggctggggctggaatgatgtgatctgtgagaccaggaggaacagcatctgtgagatgaacaagatctacctgtag

SEQ ID NO: 148695 - DNA, 432 bp, synthetic construct
  misc_feature 1..432: note = Description of Artificial Sequence: Synthetic coding sequence
  source 1..432: mol_type = other DNA
atggagtaccacccagacctggagaacctggatgaagatggctacacccagctgcactttgacagccagagcaacaccagaattgctgtggtgtctgagaagggcagctgtgccgccagccccccctggaggctgattgctgtgatcctgggcatcctgtgcctggtgatcctggtgattgctgtggtgctgggcaccatgggcgtgctgagcagcccctgcccccccaactggatcatctatgagaagagctgctacctgttctccatgagcctgaacagctgggatggcagcaagaggcagtgctggcagctgggcagcaacctgctgaagattgacagcagcaatgagctgatcagtgaccagaaccacagctaccccaggaagcccatcagcaagctgtgcatggacagccgggtgagccacctgtag

SEQ ID NO: 148696 - DNA, 744 bp, synthetic construct
  misc_feature 1..744: note = Description of Artificial Sequence: Synthetic coding sequence
  source 1..744: mol_type = other DNA
atggagtaccacccagacctggagaacctggatgaagatggctacacccagctgcactttgacagccagagcaacaccagaattgctgtggtgtctgagaagggcagctgtgccgccagccccccctggaggctgattgctgtgatcctgggcatcctgtgcctggtgatcctggtgattgctgtggtgctgggcaccatggccatctggaggagcaacagcggcagcaacaccctggagaatggctacttcctgagcaggaacaaggagaaccacagccagcccacccagagcagcctggaggacagcgtgacccccaccaaggctgtgaagaccactggagtgctgagcagcccctgcccccccaactggatcatctatgagaagagctgctacctgttctccatgagcctgaacagctgggatggcagcaagaggcagtgctggcagctgggcagcaacctgctgaagattgacagcagcaatgagctgggcttcatcgtgaagcaggtgagcagccagcctgacaacagcttctggattggcctgagccggccccagacagaggtgccctggctgtgggaggatggcagcaccttcagcagcaacctcttccagatccgcaccacagccacccaggagaaccccagccccaactgtgtgtggatccacgtgtctgtcatctatgaccagctgtgcagcgtgcccagctacagcatctgtgagaagaagttctccatgtag

SEQ ID NO: 148697 - DNA, 234 bp, synthetic construct
  misc_feature 1..234: note = Description of Artificial Sequence: Synthetic coding sequence
  source 1..234: mol_type = other DNA
atggagtaccacccagacctggagaacctggatgaagatggctacacccagctgcactttgacagccagagcaacaccagaattgctgtggtgtctgagaagggcagctgtgccgccagccccccctggaggctgattgctgtgatcctgggcatcctgtgcctggtgatcctggtgattgctgtggtgctgggcaccatggccggcttcaaggctgtggagttcaagggctag

SEQ ID NO: 148698 - DNA, 606 bp, synthetic construct
  misc_feature 1..606: note = Description of Artificial Sequence: Synthetic coding sequence
  source 1..606: mol_type = other DNA
atggagtaccacccagacctggagaacctggatgaagatggctacacccagctgcactttgacagccagagcaacaccagaattgctgtggtgtctgagaagggcagctgtgccgccagccccccctggaggctgattgctgtgatcctgggcatcctgtgcctggtgatcctggtgattgctgtggtgctgggcaccatgggcgtgctgagcagcccctgcccccccaactggatcatctatgagaagagctgctacctgttctccatgagcctgaacagctgggatggcagcaagaggcagtgctggcagctgggcagcaacctgctgaagattgacagcagcaatgagctgggcttcatcgtgaagcaggtgagcagccagcctgacaacagcttctggattggcctgagccggccccagacagaggtgccctggctgtgggaggatggcagcaccttcagcagcaacctcttccagatccgcaccacagccacccaggagaaccccagccccaactgtgtgtggatccacgtgtctgtcatctatgaccagctgtgcagcgtgcccagctacagcatctgtgagaagaagttctccatgtag

SEQ ID NO: 148699 - DNA, 507 bp, synthetic construct
  misc_feature 1..507: note = Description of Artificial Sequence: Synthetic coding sequence
  source 1..507: mol_type = other DNA
atggagtaccacccagacctggagaacctggatgaagatggctacacccagctgcactttgacagccagagcaacaccagaattgctgtggtgtctgagaagggcgtgctgagcagcccctgcccccccaactggatcatctatgagaagagctgctacctgttctccatgagcctgaacagctgggatggcagcaagaggcagtgctggcagctgggcagcaacctgctgaagattgacagcagcaatgagctgggcttcatcgtgaagcaggtgagcagccagcctgacaacagcttctggattggcctgagccggccccagacagaggtgccctggctgtgggaggatggcagcaccttcagcagcaacctcttccagatccgcaccacagccacccaggagaaccccagccccaactgtgtgtggattcatgtgtctgtcatctatgaccagctgtgcagcgtgcccagctacagcatctgtgagaagaagttctccatgtag

SEQ ID NO: 148700 - DNA, 351 bp, synthetic construct
  misc_feature 1..351: note = Description of Artificial Sequence: Synthetic coding sequence
  source 1..351: mol_type = other DNA
atggagtaccacccagacctggagaacctggatgaagatggctacacccagctgcactttgacagccagagcaacaccagaattgctgtggtgtctgagaagggcagctgtgccgccagccccccctggaggctgattgctgtgatcctgggcatcctgtgcctggtgatcctggtgattgctgtggtgctgggcaccatgggcaccggccagttcctgaaggacctgtccttcctgaacaacagaaggaagctgtttggagaccccatccaggaggccacccactggaggatggccaccttctaccaggagatcaagaggaccaccgtgaacccccacaaccacctgtag

SEQ ID NO: 148701 - DNA, 744 bp, synthetic construct; identical to SEQ ID NO: 148696
  misc_feature 1..744: note = Description of Artificial Sequence: Synthetic coding sequence
  source 1..744: mol_type = other DNA

SEQ ID NO: 148702 - DNA, 570 bp, synthetic construct
  misc_feature 1..570: note = Description of Artificial Sequence: Synthetic coding sequence
  source 1..570: mol_type = other DNA
atggagtaccacccagacctggagaacctggatgaagatggctacacccagctgcactttgacagccagagcaacaccagaattgctgtggtgtctgagaagggcagctgtgccgccagccccccctggaggctgattgctgtgatcctgggcatcctgtgcctggtgatcctggtgattgctgtggtgctgggcaccatggccatctggaggagcaacagcggcagcaacaccctggagaatggctacttcctgagcaggaacaaggagaaccacagccagcccacccagagcagcctggaggacagcgtgacccccaccaaggctgtgaagaccactggagtgctgagcagcccctgcccccccaactggatcatctatgagaagagctgctacctgttctccatgagcctgaacagctgggatggcagcaagaggcagtgctggcagctgggcagcaacctgctgaagattgacagcagcaatgagctgatcagtgaccagaaccacagctaccccaggaagcccatcagcaagctgtgcatggacagccgggtgagccacctgtag

SEQ ID NO: 148703 - DNA, 10281 bp, synthetic construct
  misc_feature 1..10281: note = Description of Artificial Sequence: Synthetic coding sequence
  source 1..10281: mol_type = other DNA
gtgctgcccagccacacctgtggcaaccctggagagatcctgaagggcgtgctgcacggcacccgcttcaacattggagacaagatccgctacagctgcctgcccggctacatcctggagggccacgccatcctgacctgcatcgtgtccccaggaaatggagcctcctgggacttccctgcccccttctgcagagctgagggcgcctgtggcggcaccctgcggggcaccagcagcagcatcagcagcccccacttccccagtgaatatgaaaataatgctgactgcacctggaccatcctggccgagcccggggacaccatcgccctggtgttcacagacttccagctggaggagggctatgacttcctggagatctctggaacagaggcccccagcatctggctgaccggcatgaacctgcccagccctgtgatcagcagcaagaactggctgcggctgcacttcaccagtgacagcaaccacaggaggaagggcttcaatgcccagttccaggtgaagaaggccatcgagctgaagagcagaggagtgaagatgctgcccagcaaggatggcagccacaagaacagcgtgctgagccagggcggcgtggccctggtgtctgacatgtgcccagaccccggcatcccagaaaatggaagaagagctggcagtgacttcagccgggtgggcgccaacgtgcagttcagctgtgaggacaactacgtgctgcagggcagcaagagcatcacctgccagagggtgacagagaccctggccgcctggagcgaccaccggcccatctgccgggcccggacctgtggcagcaacctgcggggccccagcggggtcatcaccagccccaactaccctgtgcagtatgaagataatgcccactgtgtgtgggtgatcaccaccacagatcctgacaaggtgatcaagctggcctttgaggagtttgagctggagcggggctatgacaccctgactgtgggagatgctgggaaggtgggggacaccaggtctgtgctgtatgtgctgaccggcagctctgtgcctgacctgattgtgtccatgagcaaccagatgtggctgcacctgcagagtgatgacagcatcggcagccctggcttcaaggctgtgtaccaggagattgaaaaaggaggctgtggggaccccggcatcccagcctacggcaagaggacaggcagcagcttcctgcacggggacaccctgacctttgaatgtcctgctgcctttgagctggtgggggagagggtcatcacctgccagcagaacaaccagtggagcggcaacaagcccagctgtgtgttcagctgcttcttcaacttcaccgccagcagcggcatcatcctgagccccaactacccagaggagtatggcaacaacatgaactgtgtgtggctgatcatcagcgagcccggcagccgcatccacctgatcttcaatgactttgatgtggagccccagtttgacttcctggccgtgaaggatgatggcatcagtgacatcaccgtgctgggcaccttctctggaaatgaggtgcccagccagctggccagcagcggccacatcgtgcggctggagttccagagcgaccacagcaccaccggccggggcttcaacatcacctacaccaccttcggccagaatgaatgtcatgaccccggcatccccatcaatggccgccgctttggagaccgcttcctgctgggcagctctgtgtccttccactgtgatgatggctttgtgaagacccagggcagcgagagcatcacctgcatcctgcaggatggaaatgtggtgtggagcagcacagtgccccgctgtgaggccccctgtggcggccacctgacagccagcagtggagtcatcctgcccccaggctggccaggctactacaaggacagcctgcactgtgagtggatcatcgaggccaagccaggccacagcatcaagatcacctttgaccgcttccagacagaggtgaactatgacaccctggaggtgagagatggccctgccagcagcagccccctcatcggggagtaccacggcacccaggccccccagttcctgatcagcactggaaacttcatgtacctgctcttcaccacagacaacagccgcagcagcatcggcttcctgatccactatgagagcgtgaccctggagagtgacagctgcctggaccccggcatccctgtgaatggccaccgccacggcggggactttggcatccgcagcacagtgaccttcagctgtgaccccggctacaccctgagtgatgatgagcccctggtgtgtgagaggaaccaccagtggaaccacgccctgcccagctgtgatgccctgtgtggcggctacatccagggcaagtctggaacagtgctgagccctggcttcccagacttctaccccaacagcctgaactgcacctggaccatcgaggtgtcccatggaaaaggagtgcagatgatcttccacaccttccacctggagagcagccatgactacctgctgatcacagaagatggcagcttcagcgagcctgtggcccggctgactggatctgtgctgccccacaccatcaaggccggcctgtttggaaacttcaccgcccagctgcgcttcatcagtgacttcagcatctcctatgagggcttcaacatcaccttctctgaatatgacctggagccctgtgatgatcctggggtgcctgccttcagccgccgcatcggcttccactttggagtgggggacagcctgaccttcagctgcttcctgggctaccgcctggagggcgccaccaagctgacctgcctgggcggcggcagaagagtgtggagcgcccccctgccccgctgtgtggccgagtgtggggcctctgtgaagggaaatgaaggcaccctgctgagccccaacttccccagcaactatgacaacaaccacgagtgcatctacaagattgaaacagaagctgggaagggcatccacctgcggaccaggagcttccagctgtttgaaggagacaccctgaaggtgtatgatggcaaggacagcagcagccggcccctgggcaccttcaccaagaatgagctgctgggcctcatcctgaacagcaccagcaaccacctgtggctggagttcaacaccaacggcagtgacacagaccagggcttccagctgacctacaccagctttgacctggtgaagtgtgaagatcctggcatccccaactacggctaccgcatcagagatgagggccacttcacagacacagtggtgctgtacagctgcaaccctggctacgccatgcacggcagcaacaccctgacctgcctgagcggggaccggcgggtgtgggacaagcccctgcccagctgcatcgcagaatgtggcggccagatccacgccgccaccagcggccgcatcctgagccctggctacccagccccctatgacaacaacctgcactgcacctggatcattgaagctgaccccgggaagaccatcagcctgcacttcatcgtgtttgacacagagatggcccatgacatcctgaaggtgtgggatggccctgtggacagcgacatcctgctgaaggagtggagcggcagcgccctgcctgaggacatccacagcaccttcaacagcctgaccctgcagtttgacagcgacttcttcatcagcaagagcggcttcagcatccagttcagcaccagcattgctgccacctgcaatgaccccggcatgccccagaatggcacccgctacggggacagccgggaggccggggacacagtgaccttccagtgtgaccccggctaccagctgcagggccaggccaagatcacctgtgtgcagctgaacaaccgcttcttctggcagcctgacccccccacctgcatcgccgcctgtggcggcaacctgactggacctgctggggtcatcctgagccccaactacccccagccctacccacctgggaaggaatgtgactggagggtgaaggtgaacccagactttgtgattgccctgatcttcaagagcttcaacatggagcccagctatgacttcctgcacatctatgaaggagaggacagcaacagccccctgattggcagctaccagggcagccaggcccctgagagaattgagagcagcggcaacagcctcttcctggccttcagaagtgatgcctctgtgggcctgagcggctttgccatcgagttcaaggagaagccccgggaggcctgctttgaccccggcaacatcatgaatggcaccagggtgggcacagacttcaagctgggcagcaccatcacctaccagtgtgacagcggctacaagatcctggaccccagcagcatcacctgtgtgattggagcagatggcaagcccagctgggaccaggtgctgcccagctgcaatgccccctgtggcggccagtacacaggcagcgagggcgtggtgctgagccccaactacccccacaactacacagctggccagatctgcctgtacagcatcaccgtgcccaaggagtttgtggtgtttggccagtttgcctacttccagacagccctgaatgacctggccgagctgtttgatggcacccacgcccaggcccggctgctgagcagcctgagcggcagccacagcggggagaccctgcccctggccaccagcaaccagatcctgctgcgcttcagcgccaagagcggggccagcgcccggggcttccactttgtgtaccaggccgtgcccaggaccagtgacacccagtgcagctctgtgcctgagcccaggtatggccgccgcatcggcagcgagttctctgctggcagcatcgtgcgctttgagtgcaaccctggctacctgctgcagggcagcacagccctgcactgccagagcgtgcccaatgccctggcccagtggaatgacaccatccccagctgtgtggtgccctgcagcggcaacttcacccagaggcggggcaccatcctgagccctggctacccagagccctacggcaacaacctgaactgcatctggaagatcatcgtgacagagggcagcggcatccaggaccccagcgaccagttctgccacggggctgagctgggcctggagatccatgatggaggagatgtgacagccccccggctgggcagcttcagcggcaccaccgtgcctgccctgctgaacagcaccagcaaccagctgtacctgcacttccagagcgacatctctgtggccgctgctggcttccacctggagtacaagacagtgggcctggccgcctgccaggagcccgccctgcccagcaacagcatcaagattggagaccgctacatggtgaatgatgtgctgtccttccagtgtgagcccggctacaccctgcagggccgcagccacatcagctgcatgcctggcaccgtgcggcgctggaactaccccagccccctgtgcatcgccacctgtggcggcaccctgagcaccctgggcggcgtcatcctgagccctggcttccctggcagctaccccaacaacctggactgcacctggaggatcagcctgcccatcggctacggggcccacatccagttcctgaacttcagcacagaggccaaccacgacttcctggagatccagaatggcccctaccacaccagccccatgattggccagttctctggaacagacctgcctgctgccctgctgagcaccacccatgagaccctcatccacttctacagcgaccacagccagaaccggcagggcttcaagctggcctaccaggcctatgagctgcagaactgcccagaccccccacccttccagaatggctacatgatcaacagcgactacagcgtgggccagagcgtgtcctttgagtgctacccaggctacatcctgattggccaccctgtgctgacctgccagcacggcatcaacagaaactggaactaccccttcccccgctgtgatgccccctgtggctacaacgtgaccagccagaatggcaccatctacagccctggcttcccagatgagtaccccatcctgaaggactgcatctggctgatcaccgtgcccccaggccacggcgtgtacatcaacttcaccctgctgcagacagaagctgtgaatgactacatcgctgtgtgggatggccctgaccagaacagcccccagctgggcgtcttcagcggcaacacagccctggagacagcctacagcagcaccaaccaggtgctgctgaagttccacagcgacttcagcaatggaggcttctttgtgctgaacttccacgccttccagctgaagaagtgccagcccccacctgctgtgccccaggccgagatgctgacagaagatgatgactttgagatcggggactttgtgaagtaccagtgccaccctggctacaccctggtgggcacagacatcctgacctgcaagctgagcagccagctgcagtttgagggcagcctgcccacctgtgaggcccagtgcccagccaatgaggtgaggacaggcagcagtggagtcatcctgagccctggctacccaggcaactacttcaacagccagacctgctcctggagcatcaaggtggagcccaactacaacatcaccatctttgtggacaccttccagagcgagaagcagtttgatgccctggaggtgtttgatggcagcagcggccagagccccctgctggtggtgctgagcggcaaccacacagagcagagcaacttcaccagccgcagcaaccagctgtacctgcgctggagcacagaccacgccaccagcaagaagggcttcaagatccgctatgctgccccctactgcagcctgacccaccccctgaagaatggaggcatcctgaacagaacagctggagctgtgggcagcaaggtgcactacttctgcaagccaggctacaggatggtgggccacagcaatgccacctgcagaagaaaccccctgggcatgtaccagtgggacagcctgacccccctgtgccaggccgtgtcctgtggcatccctgagagccctggaaatggcagcttcaccggaaatgagttcaccctggacagcaaggtggtgtatgagtgccacgagggcttcaagctggagagcagccagcaggccacagctgtgtgccaggaggatggcctgtggagcaacaagggcaagccacccacctgcaagcctgtggcctgccccagcattgaggcccagctgtctgaacatgtgatctggaggctggtgtctggcagcctgaatgaatatggagcccaggtgctgctgagctgcagccctggctactacctggagggctggaggctgctgcgctgccaggccaacggcacctggaacattggagatgagcggcccagctgcagggtcatcagctgtggcagcctgtccttcccccccaacggcaacaagattggcaccctgactgtgtatggagccacagccatcttcacctgcaacacaggctacaccctggtgggcagccacgtgagagaatgtctggccaacggcctgtggagcggcagcgagacccgctgcctggccggccactgcggcagcccagaccccatcgtgaatggccacatctctggagatggcttctcctacagagacacagtggtgtaccagtgcaaccctggcttccggctggtgggcacctctgtgcgcatctgcctgcaggaccacaagtggagcggccagacccctgtgtgtgtgcccatcacctgtggccaccctggcaacccagcccacggcttcaccaacggcagcgagttcaacctgaatgatgtggtgaacttcacctgcaacacaggctacctgctgcagggcgtgtcccgggcccagtgccgcagcaatggccagtggagcagccccctgcccacctgccgggtggtgaactgcagcgaccccggctttgtggagaatgccatccgccacggccagcagaacttccctgagagctttgaatatggcatgagcatcctgtaccactgcaagaagggcttctacctgctgggcagcagcgccctgacctgcatggccaacggcctgtgggacaggagcctgcccaagtgcctggccatcagctgtggccaccctggggtgcctgccaatgctgtgctgactggagagctgttcacctatggagctgtggtgcactacagctgccggggcagcgagagcctgattggaaatgacaccagggtgtgccaggaggacagccactggagcggggccctgccccactgcaccggcaacaaccctggcttctgtggggaccccggcaccccagcccacggcagccggctgggagatgacttcaagaccaagagcctgctgcgcttcagctgtgagatgggccaccagctgcggggcagccctgagaggacctgcctgctgaatggctcctggagcggcctgcagcctgtgtgtgaggccgtgtcctgtggcaaccctggcacccccaccaacggcatgattgtgtccagtgatggcatcctcttcagcagcagcgtcatctatgcctgctgggagggctacaagaccagcggcctgatgaccaggcactgcacagccaacggcacctggacaggaacagccccagactgcaccatcatcagctgtggggaccccggcaccctggccaacggcatccagtttggaacagacttcaccttcaacaagacagtgtcctaccagtgcaaccctggctacgtgatggaggccgtgaccagcgccaccatccgctgcaccaaggatggccgctggaaccccagcaagcctgtgtgcaaggctgtgctgtgcccccagcccccacctgtgcagaatggaacagtggagggcagtgacttccgctggggcagcagcatctcctacagctgcatggatggctaccagctgagccacagcgccatcctgagctgtgagggccggggcgtgtggaagggggagatcccccagtgcctgcccgtcttctgtggggaccccggcatcccagctgagggccgcctgagcggcaagagcttcacctacaagtctgaggtgttcttccagtgcaagagccccttcatcctggtgggcagcagccggcgggtgtgccaggctgatggcacctggagcggcatccagcccacctgcattgatcctgcccacaacacctgcccagaccccggcaccccccacttcggcatccagaacagcagccggggctatgaggtgggcagcaccgtcttcttccgctgcaggaagggctaccacatccagggcagcaccaccaggacctgcctggccaacctgacctggagcggcatccagacagagtgcatcccccacgcctgccggcagcctgagaccccagcccacgcagatgtgcgggccatcgacctgcccaccttcggctacaccctggtgtacacctgccaccctggcttcttcctggccggcggcagcgagcacaggacctgcaaggctgacatgaagtggacaggcaagagccctgtgtgcaagagcaaaggagtgcgggaggtgaatgaaacagtgaccaagacccctgtgcccagtgatgtgttctttgtgaacagcctgtggaagggctactatgagtacctgggcaagaggcagcctgccaccctgactgtggactggttcaatgccaccagcagcaaggtgaatgccaccttcagcgaggccagccctgtggagctgaagctgaccggcatctacaagaaggaggaggcccacctgctgctgaaggccttccagatcaagggccaggccgacatctttgtgtccaagtttgaaaatgacaactggggcctggatggctacgtgagcagcggcctggagcggggcggcttcaccttccagggcgacatccacggcaaggactttgggaagttcaagctggagcggcaggaccccctgaacccagaccaggacagcagcagccactaccacggcaccagcagcggctctgtggccgccgccatcctggtgcccttctttgccctgatcctgagcggctttgccttctacctgtacaagcacaggacccggcccaaggtgcagtacaacggctacgccggccacgagaacagcaatggccaggccagctttgagaaccccatgtatgacaccaacctgaagcccacagaggccaaggctgtgcgctttgacaccaccctgaacacagtgtgcaccgtggtgtag

SEQ ID NO: 148704 - DNA, 10167 bp, synthetic construct
  misc_feature 1..10167: note = Description of Artificial Sequence: Synthetic coding sequence
  source 1..10167: mol_type = other DNA
atgacagcctggaggcgcttccagagcctgctgctgctgctgggcctgctggtgctgtgtgcccggctgctgacagctgccaagggccagaactgtggcggcctggtgcagggccccaacggcaccatcgagagccctggcttcccccacggctaccccaactatgccaactgcacctggatcatcatcaccggggagaggaaccgcatccagctgtccttccacacctttgccctggaggaggactttgacatcctgtctgtgtatgatggccagccccagcagggcaacctgaaggtgcggctgagcggcttccagctgcccagcagcatcgtgtccacaggcagcatcctgaccctgtggttcaccacagactttgctgtgtctgcccagggcttcaaggccctgtatgaggtgctgcccagccacacctgtggcaaccctggagagatcctgaagggcgtgctgcacggcacccgcttcaacattggagacaagatccgctacagctgcctgcccggctacatcctggagggccacgccatcctgacctgcatcgtgtccccaggaaatggagcctcctgggacttccctgcccccttctgcagagctgagggcgcctgtggcggcaccctgcggggcaccagcagcagcatcagcagcccccacttccccagtgaatatgaaaataatgctgactgcacctggaccatcctggccgagcccggggacaccatcgccctggtgttcacagacttccagctggaggagggctatgacttcctggagatctctggaacagaggcccccagcatctggctgaccggcatgaacctgcccagccctgtgatcagcagcaagaactggctgcggctgcacttcaccagtgacagcaaccacaggaggaagggcttcaatgcccagttccaggtgaagaaggccatcgagctgaagagcagaggagtgaagatgctgcccagcaaggatggcagccacaagaacagcgtgctgagccagggcggcgtggccctggtgtctgacatgtgcccagaccccggcatcccagaaaatggaagaagagctggcagtgacttcagccgggtgggcgccaacgtgcagttcagctgtgaggacaactacgtgctgcagggcagcaagagcatcacctgccagagggtgacagagaccctggccgcctggagcgaccaccggcccatctgccgggcccggacctgtggcagcaacctgcggggccccagcggggtcatcaccagccccaactaccctgtgcagtatgaagataatgcccactgtgtgtgggtgatcaccaccacagatcctgacaaggtgatcaagctggcctttgaggagtttgagctggagcggggctatgacaccctgactgtgggagatgctgggaaggtgggggacaccaggtctgtgctgtatgtgctgaccggcagctctgtgcctgacctgattgtgtccatgagcaaccagatgtggctgcacctgcagagtgatgacagcatcggcagccctggcttcaaggctgtgtaccaggagattgaaaaaggaggctgtggggaccccggcatcccagcctacggcaagaggacaggcagcagcttcctgcacggggacaccctgacctttgaatgtcctgctgcctttgagctggtgggggagagggtcatcacctgccagcagaacaaccagtggagcggcaacaagcccagctgtgtgttcagctgcttcttcaacttcaccgccagcagcggcatcatcctgagccccaactacccagaggagtatggcaacaacatgaactgtgtgtggctgatcatcagcgagcccggcagccgcatccacctgatcttcaatgactttgatgtggagccccagtttgacttcctggccgtgaaggatgatggcatcagtgacatcaccgtgctgggcaccttctctggaaatgaggtgcccagccagctggccagcagcggccacatcgtgcggctggagttccagagcgaccacagcaccaccggccggggcttcaacatcacctacaccaccttcggccagaatgaatgtcatgaccccggcatccccatcaatggccgccgctttggagaccgcttcctgctgggcagctctgtgtccttccactgtgatgatggctttgtgaagacccagggcagcgagagcatcacctgcatcctgcaggatggaaatgtggtgtggagcagcacagtgccccgctgtgaggccccctgtggcggccacctgacagccagcagtggagtcatcctgcccccaggctggccaggctactacaaggacagcctgcactgtgagtggatcatcgaggccaagccaggccacagcatcaagatcacctttgaccgcttccagacagaggtgaactatgacaccctggaggtgagagatggccctgccagcagcagccccctcatcggggagtaccacggcacccaggccccccagttcctgatcagcactggaaacttcatgtacctgctcttcaccacagacaacagccgcagcagcatcggcttcctgatccactatgagagcgtgaccctggagagtgacagctgcctggaccccggcatccctgtgaatggccaccgccacggcggggactttggcatccgcagcacagtgaccttcagctgtgaccccggctacaccctgagtgatgatgagcccctggtgtgtgagaggaaccaccagtggaaccacgccctgcccagctgtgatgccctgtgtggcggctacatccagggcaagtctggaacagtgctgagccctggcttcccagacttctaccccaacagcctgaactgcacctggaccatcgaggtgtcccatggaaaaggagtgcagatgatcttccacaccttccacctggagagcagccatgactacctgctgatcacagaagatggcagcttcagcgagcctgtggcccggctgactggatctgtgctgccccacaccatcaaggccggcctgtttggaaacttcaccgcccagctgcgcttcatcagtgacttcagcatctcctatgagggcttcaacatcaccttctctgaatatgacctggagccctgtgatgatcctggggtgcctgccttcagccgccgcatcggcttccactttggagtgggggacagcctgaccttcagctgcttcctgggctaccgcctggagggcgccaccaagctgacctgcctgggcggcggcagaagagtgtggagcgcccccctgccccgctgtgtggccgagtgtggggcctctgtgaagggaaatgaaggcaccctgctgagccccaacttccccagcaactatgacaacaaccacgagtgcatctacaagattgaaacagaagctgggaagggcatccacctgcggaccaggagcttccagctgtttgaaggagacaccctgaaggtgtatgatggcaaggacagcagcagccggcccctgggcaccttcaccaagaatgagctgctgggcctcatcctgaacagcaccagcaaccacctgtggctggagttcaacaccaacggcagtgacacagaccagggcttccagctgacctacaccagctttgacctggtgaagtgtgaagatcctggcatccccaactacggctaccgcatcagagatgagggccacttcacagacacagtggtgctgtacagctgcaaccctggctacgccatgcacggcagcaacaccctgacctgcctgagcggggaccggcgggtgtgggacaagcccctgcccagctgcatcgcagaatgtggcggccagatccacgccgccaccagcggccgcatcctgagccctggctacccagccccctatgacaacaacctgcactgcacctggatcattgaagctgaccccgggaagaccatcagcctgcacttcatcgtgtttgacacagagatggcccatgacatcctgaaggtgtgggatggccctgtggacagcgacatcctgctgaaggagtggagcggcagcgccctgcctgaggacatccacagcaccttcaacagcctgaccctgcagtttgacagcgacttcttcatcagcaagagcggcttcagcatccagttcagcaccagcattgctgccacctgcaatgaccccggcatgccccagaatggcacccgctacggggacagccgggaggccggggacacagtgaccttccagtgtgaccccggctaccagctgcagggccaggccaagatcacctgtgtgcagctgaacaaccgcttcttctggcagcctgacccccccacctgcatcgccgcctgtggcggcaacctgactggacctgctggggtcatcctgagccccaactacccccagccctacccacctgggaaggaatgtgactggagggtgaaggtgaacccagactttgtgattgccctgatcttcaagagcttcaacatggagcccagctatgacttcctgcacatctatgaaggagaggacagcaacagccccctgattggcagctaccagggcagccaggcccctgagagaattgagagcagcggcaacagcctcttcctggccttcagaagtgatgcctctgtgggcctgagcggctttgccatcgagttcaaggagaagccccgggaggcctgctttgaccccggcaacatcatgaatggcaccagggtgggcacagacttcaagctgggcagcaccatcacctaccagtgtgacagcggctacaagatcctggaccccagcagcatcacctgtgtgattggagcagatggcaagcccagctgggaccaggtgctgcccagctgcaatgccccctgtggcggccagtacacaggcagcgagggcgtggtgctgagccccaactacccccacaactacacagctggccagatctgcctgtacagcatcaccgtgcccaaggagtttgtggtgtttggccagtttgcctacttccagacagccctgaatgacctggccgagctgtttgatggcacccacgcccaggcccggctgctgagcagcctgagcggcagccacagcggggagaccctgcccctggccaccagcaaccagatcctgctgcgcttcagcgccaagagcggggccagcgcccggggcttccactttgtgtaccaggccgtgcccaggaccagtgacacccagtgcagctctgtgcctgagcccaggtatggccgccgcatcggcagcgagttctctgctggcagcatcgtgcgctttgagtgcaaccctggctacctgctgcagggcagcacagccctgcactgccagagcgtgcccaatgccctggcccagtggaatgacaccatccccagctgtgtggtgccctgcagcggcaacttcacccagaggcggggcaccatcctgagccctggctacccagagccctacggcaacaacctgaactgcatctggaagatcatcgtgacagagggcagcggcatccagatccaggtgatcagctttgccacagagcagaactgggacagcctggagatccatgatggaggagatgtgacagccccccggctgggcagcttcagcggcaccaccgtgcctgccctgctgaacagcaccagcaaccagctgtacctgcacttccagagcgacatctctgtggccgccgccggcttccacctggagtacaagacagtgggcctggccgcctgccaggagcccgccctgcccagcaacagcatcaagatcggggaccgctacatggtgaatgatgtgctgtccttccagtgtgagcccggctacaccctgcagggccgcagccacatcagctgcatgcctggcaccgtgcggcgctggaactaccccagccccctgtgcatcgccacctgtggcggcaccctgagcaccctgggcggcgtcatcctgagccctggcttccctggcagctaccccaacaacctggactgcacctggaggatcagcctgcccatcggctatggagcccacatccagttcctgaacttcagcacagaggccaaccacgacttcctggagatccagaatggcccctaccacaccagccccatgattggccagttcagcggcacagacctgcctgctgccctgctgagcaccacccatgagaccctcatccacttctacagcgaccacagccagaaccggcagggcttcaagctggcctaccaggcctatgagctgcagaactgcccagaccccccacccttccagaatggctacatgatcaacagcgactacagcgtgggccagagcgtgtcctttgagtgctacccaggctacatcctgattggccaccctgtgctgacctgccagcacggcatcaacagaaactggaactaccccttcccccgctgtgatgccccctgtggctacaacgtgaccagccagaatggcaccatctacagccctggcttcccagatgagtaccccatcctgaaggactgcatctggctgatcaccgtgcccccaggccatggagtgtacatcaacttcaccctgctgcagacagaggccgtgaatgactacatcgctgtgtgggatggccctgaccagaacagcccccagctgggcgtcttcagcggcaacacagccctggagacagcctacagcagcaccaaccaggtgctgctgaagttccacagcgacttcagcaatggaggcttctttgtgctgaacttccacgccttccagctgaagaagtgccagcccccacctgctgtgccccaggccgagatgctgacagaagatgatgactttgaaattggagactttgtgaagtaccagtgccaccctggctacaccctggtgggcacagacatcctgacctgcaagctgagcagccagctgcagtttgagggcagcctgcccacctgtgaggcccagtgcccagccaatgaggtgaggacaggcagcagcggggtcatcctgagccctggctacccaggcaactacttcaacagccagacctgctcctggagcatcaaggtggagcccaactacaacatcaccatctttgtggacaccttccagagcgagaagcagtttgatgccctggaggtgtttgatggcagcagcggccagagccccctgctggtggtgctgagcggcaaccacacagagcagagcaacttcaccagccgcagcaaccagctgtacctgcgctggagcacagaccacgccaccagcaagaagggcttcaagatccgctatgctgccccctactgcagcctgacccaccccctgaagaatggaggcatcctgaacagaacagctggagctgtgggcagcaaggtgcactacttctgcaagccaggctacaggatggtgggccacagcaatgccacctgcagaagaaaccccctgggcatgtaccagtgggacagcctgacccccctgtgccaggccgtgtcctgtggcatccctgagagccctggaaatggcagcttcaccggaaatgagttcaccctggacagcaaggtggtgtatgaatgtcatgagggcttcaagctggagagcagccagcaggccacagctgtgtgccaggaggatggcctgtggagcaacaagggcaagccacccacctgcaagcctgtggcctgccccagcattgaggcccagctgtctgagcacgtgatctggaggctggtgtctggcagcctgaatgaatatggagcccaggtgctgctgagctgcagccctggctactacctggagggctggaggctgctgcgctgccaggccaacggcacctggaacattggagatgagcggcccagctgccgggccggccactgcggcagcccagaccccatcgtgaatggccacatctctggagatggcttctcctacagagacacagtggtgtaccagtgcaaccctggcttccggctggtgggcacctctgtgcgcatctgcctgcaggaccacaagtggagcggccagacccctgtgtgtgtgcccatcacctgtggccaccctggcaacccagcccacggcttcaccaatggaagtgagttcaacctgaatgatgtggtgaacttcacctgcaacacaggctacctgctgcagggcgtgtcccgggcccagtgccgcagcaatggccagtggagcagccccctgcccacctgccgggtggtgaactgcagcgaccccggctttgtggagaatgccatcagacatggccagcagaacttccctgagagctttgaatatggcatgagcatcctgtaccactgcaagaagggcttctacctgctgggcagcagcgccctgacctgcatggccaacggcctgtgggacaggagcctgcccaagtgcctggccatcagctgtggccaccctggggtgcctgccaatgctgtgctgaccggggagctgttcacctacggggctgtggtgcactacagctgccggggcagcgagagcctgattggaaatgacaccagggtgtgccaggaggacagccactggagcggggccctgccccactgcaccggcaacaaccctggcttctgtggggaccccggcaccccagcccacggcagccggctgggagatgacttcaagaccaagagcctgctgcgcttcagctgtgagatgggccaccagctgcggggcagccctgagaggacctgcctgctgaatggctcctggagcggcctgcagcctgtgtgtgaggccgtgctgtgcccccagcccccacctgtgcagaatggaacagtggagggcagtgacttccgctggggcagcagcatctcctacagctgcatggatggctaccagctgagccacagcgccatcctgagctgtgagggccggggcgtgtggaagggggagatcccccagtgcctgcccgtcttctgtggggaccccggcatcccagctgagggccgcctgagcggcaagagcttcacctacaagtctgaggtgttcttccagtgcaagagccccttcatcctggtgggcagcagccggcgggtgtgccaggctgatggcacctggagcggcatccagcccacctgcattgatcctgcccacaacacctgcccagaccccggcaccccccacttcggcatccagaacagcagccggggctatgaggtgggcagcaccgtcttcttccgctgcaggaagggctaccacatccagggcagcaccaccaggacctgcctggccaacctgacctggagcggcatccagacagagtgcatcccccacgcctgccggcagcctgagaccccagcccacgcagatgtgcgggccatcgacctgcccaccttcggctacaccctggtgtacacctgccaccctggcttcttcctggccggcggcagcgagcacaggacctgcaaggctgacatgaagtggacaggcaagagccctgtgtgcaagagcaaaggagtgcgggaggtgaatgaaacagtgaccaagacccctgtgcccagtgatgtgttctttgtgaacagcctgtggaagggctactatgagtacctgggcaagaggcagcctgccaccctgactgtggactggttcaatgccaccagcagcaaggtgaatgccaccttcagcgaggccagccctgtggagctgaagctgaccggcatctacaagaaggaggaggcccacctgctgctgaaggccttccagatcaagggccaggccgacatctttgtgtccaagtttgaaaatgacaactggggcctggatggctacgtgagcagcggcctggagcggggcggcttcaccttccagggcgacatccacggcaaggactttgggaagttcaagctggagcggcaggaccccctgaacccagaccaggacagcagcagccactaccacggcaccagcagcggctctgtggccgccgccatcctggtgcccttctttgccctgatcctgagcggctttgccttctacctgtacaagcacaggacccggcccaaggtgcagtacaacggctacgccggccacgagaacagcaatggccaggccagctttgagaaccccatgtatgacaccaacctgaagcccacagaggccaaggctgtgcgctttgacaccaccctgaacacagtgtgcaccgtggtgtag

SEQ ID NO: 148705 - DNA, 10698 bp, synthetic construct
  misc_feature 1..10698: note = Description of Artificial Sequence: Synthetic coding sequence
  source 1..10698: mol_type = other DNA
atgacagcctggaggcgcttccagagcctgctgctgctgctgggcctgctggtgctgtgtgcccggctgctgacagctgccaagggccagaactgtggcggcctggtgcagggccccaacggcaccatcgagagccctggcttcccccacggctaccccaactatgccaactgcacctggatcatcatcaccggggagaggaaccgcatccagctgtccttccacacctttgccctggaggaggactttgacatcctgtctgtgtatgatggccagccccagcagggcaacctgaaggtgcggctgagcggcttccagctgcccagcagcatcgtgtccacaggcagcatcctgaccctgtggttcaccacagactttgctgtgtctgcccagggcttcaaggccctgtatgaggtgctgcccagccacacctgtggcaaccctggagagatcctgaagggcgtgctgcacggcacccgcttcaacattggagacaagatccgctacagctgcctgcccggctacatcctggagggccacgccatcctgacctgcatcgtgtccccaggaaatggagcctcctgggacttccctgcccccttctgcagagctgagggcgcctgtggcggcaccctgcggggcaccagcagcagcatcagcagcccccacttccccagtgaatatgaaaataatgctgactgcacctggaccatcctggccgagcccggggacaccatcgccctggtgttcacagacttccagctggaggagggctatgacttcctggagatctctggaacagaggcccccagcatctggctgaccggcatgaacctgcccagccctgtgatcagcagcaagaactggctgcggctgcacttcaccagtgacagcaaccacaggaggaagggcttcaatgcccagttccaggtgaagaaggccatcgagctgaagagcagaggagtgaagatgctgcccagcaaggatggcagccacaagaacagcgtgctgagccagggcggcgtggccctggtgtctgacatgtgcccagaccccggcatcccagaaaatggaagaagagctggcagtgacttcagccgggtgggcgccaacgtgcagttcagctgtgaggacaactacgtgctgcagggcagcaagagcatcacctgccagagggtgacagagaccctggccgcctggagcgaccaccggcccatctgccgggcccggacctgtggcagcaacctgcggggccccagcggggtcatcaccagccccaactaccctgtgcagtatgaagataatgcccactgtgtgtgggtgatcaccaccacagatcctgacaaggtgatcaagctggcctttgaggagtttgagctggagcggggctatgacaccctgactgtgggagatgctgggaaggtgggggacaccaggtctgtgctgtatgtgctgaccggcagctctgtgcctgacctgattgtgtccatgagcaaccagatgtggctgcacctgcagagtgatgacagcatcggcagccctggcttcaaggctgtgtaccaggagattgaaaaaggaggctgtggggaccccggcatcccagcctacggcaagaggacaggcagcagcttcctgcacggggacaccctgacctttgaatgtcctgctgcctttgagctggtgggggagagggtcatcacctgccagcagaacaaccagtggagcggcaacaagcccagctgtgtgttcagctgcttcttcaacttcaccgccagcagcggcatcatcctgagccccaactacccagaggagtatggcaacaacatgaactgtgtgtggctgatcatcagcgagcccggcagccgcatccacctgatcttcaatgactttgatgtggagccccagtttgacttcctggccgtgaaggatgatggcatcagtgacatcaccgtgctgggcaccttctctggaaatgaggtgcccagccagctggccagcagcggccacatcgtgcggctggagttccagagcgaccacagcaccaccggccggggcttcaacatcacctacaccaccttcggccagaatgaatgtcatgaccccggcatccccatcaatggccgccgctttggagaccgcttcctgctgggcagctctgtgtccttccactgtgatgatggctttgtgaagacccagggcagcgagagcatcacctgcatcctgcaggatggaaatgtggtgtggagcagcacagtgccccgctgtgaggccccctgtggcggccacctgacagccagcagtggagtcatcctgcccccaggctggccaggctactacaaggacagcctgcactgtgagtggatcatcgaggccaagccaggccacagcatcaagatcacctttgaccgcttccagacagaggtgaactatgacaccctggaggtgagagatggccctgccagcagcagccccctcatcggggagtaccacggcacccaggccccccagttcctgatcagcactggaaacttcatgtacctgctcttcaccacagacaacagccgcagcagcatcggcttcctgatccactatgagagcgtgaccctggagagtgacagctgcctggaccccggcatccctgtgaatggccaccgccacggcggggactttggcatccgcagcacagtgaccttcagctgtgaccccggctacaccctgagtgatgatgagcccctggtgtgtgagaggaaccaccagtggaaccacgccctgcccagctgtgatgccctgtgtggcggctacatccagggcaagtctggaacagtgctgagccctggcttcccagacttctaccccaacagcctgaactgcacctggaccatcgaggtgtcccatggaaaaggagtgcagatgatcttccacaccttccacctggagagcagccatgactacctgctgatcacagaagatggcagcttcagcgagcctgtggcccggctgactggatctgtgctgccccacaccatcaaggccggcctgtttggaaacttcaccgcccagctgcgcttcatcagtgacttcagcatctcctatgagggcttcaacatcaccttctctgaatatgacctggagccctgtgatgatcctggggtgcctgccttcagccgccgcatcggcttccactttggagtgggggacagcctgaccttcagctgcttcctgggctaccgcctggagggcgccaccaagctgacctgcctgggcggcggcagaagagtgtggagcgcccccctgccccgctgtgtggccgagtgtggggcctctgtgaagggaaatgaaggcaccctgctgagccccaacttccccagcaactatgacaacaaccacgagtgcatctacaagattgaaacagaagctgggaagggcatccacctgcggaccaggagcttccagctgtttgaaggagacaccctgaaggtgtatgatggcaaggacagcagcagccggcccctgggcaccttcaccaagaatgagctgctgggcctcatcctgaacagcaccagcaaccacctgtggctggagttcaacaccaacggcagtgacacagaccagggcttccagctgacctacaccagctttgacctggtgaagtgtgaagatcctggcatccccaactacggctaccgcatcagagatgagggccacttcacagacacagtggtgctgtacagctgcaaccctggctacgccatgcacggcagcaacaccctgacctgcctgagcggggaccggcgggtgtgggacaagcccctgcccagctgcatcgcagaatgtggcggccagatccacgccgccaccagcggccgcatcctgagccctggctacccagccccctatgacaacaacctgcactgcacctggatcattgaagctgaccccgggaagaccatcagcctgcacttcatcgtgtttgacacagagatggcccatgacatcctgaaggtgtgggatggccctgtggacagcgacatcctgctgaaggagtggagcggcagcgccctgcctgaggacatccacagcaccttcaacagcctgaccctgcagtttgacagcgacttcttcatcagcaagagcggcttcagcatccagttcagcaccagcattgctgccacctgcaatgaccccggcatgccccagaatggcacccgctacggggacagccgggaggccggggacacagtgaccttccagtgtgaccccggctaccagctgcagggccaggccaagatcacctgtgtgcagctgaacaaccgcttcttctggcagcctgacccccccacctgcatcgccgcctgtggcggcaacctgactggacctgctggggtcatcctgagccccaactacccccagccctacccacctgggaaggaatgtgactggagggtgaaggtgaacccagactttgtgattgccctgatcttcaagagcttcaacatggagcccagctatgacttcctgcacatctatgaaggagaggacagcaacagccccctgattggcagctaccagggcagccaggcccctgagagaattgagagcagcggcaacagcctcttcctggccttcagaagtgatgcctctgtgggcctgagcggctttgccatcgagttcaaggagaagccccgggaggcctgctttgaccccggcaacatcatgaatggcaccagggtgggcacagacttcaagctgggcagcaccatcacctaccagtgtgacagcggctacaagatcctggaccccagcagcatcacctgtgtgattggagcagatggcaagcccagctgggaccaggtgctgcccagctgcaatgccccctgtggcggccagtacacaggcagcgagggcgtggtgctgagccccaactacccccacaactacacagctggccagatctgcctgtacagcatcaccgtgcccaaggagtttgtggtgtttggccagtttgcctacttccagacagccctgaatgacctggccgagctgtttgatggcacccacgcccaggcccggctgctgagcagcctgagcggcagccacagcggggagaccctgcccctggccaccagcaaccagatcctgctgcgcttcagcgccaagagcggggccagcgcccggggcttccactttgtgtaccaggccgtgcccaggaccagtgacacccagtgcagctctgtgcctgagcccaggtatggccgccgcatcggcagcgagttctctgctggcagcatcgtgcgctttgagtgcaaccctggctacctgctgcagggcagcacagccctgcactgccagagcgtgcccaatgccctggcccagtggaatgacaccatccccagctgtgtggtgccctgcagcggcaacttcacccagaggcggggcaccatcctgagccctggctacccagagccctacggcaacaacctgaactgcatctggaagatcatcgtgacagagggcagcggcatccagatccaggtgatcagctttgccacagagcagaactgggacagcctggagatccatgatggaggagatgtgacagccccccggctgggcagcttcagcggcaccaccgtgcctgccctgctgaacagcaccagcaaccagctgtacctgcacttccagagcgacatctctgtggccgccgccggcttccacctggagtacaagacagtgggcctggccgcctgccaggagcccgccctgcccagcaacagcatcaagatcggggaccgctacatggtgaatgatgtgctgtccttccagtgtgagcccggctacaccctgcagggccgcagccacatcagctgcatgcctggcaccgtgcggcgctggaactaccccagccccctgtgcatcgccacctgtggcggcaccctgagcaccctgggcggcgtcatcctgagccctggcttccctggcagctaccccaacaacctggactgcacctggaggatcagcctgcccatcggctatggagcccacatccagttcctgaacttcagcacagaggccaaccacgacttcctggagatccagaatggcccctaccacaccagccccatgattggccagttcagcggcacagacctgcctgctgccctgctgagcaccacccatgagaccctcatccacttctacagcgaccacagccagaaccggcagggcttcaagctggcctaccaggcctatgagctgcagaactgcccagaccccccacccttccagaatggctacatgatcaacagcgactacagcgtgggccagagcgtgtcctttgagtgctacccaggctacatcctgattggccaccctgtgctgacctgccagcacggcatcaacagaaactggaactaccccttcccccgctgtgatgccccctgtggctacaacgtgaccagccagaatggcaccatctacagccctggcttcccagatgagtaccccatcctgaaggactgcatctggctgatcaccgtgcccccaggccatggagtgtacatcaacttcaccctgctgcagacagaggccgtgaatgactacatcgctgtgtgggatggccctgaccagaacagcccccagctgggcgtcttcagcggcaacacagccctggagacagcctacagcagcaccaaccaggtgctgctgaagttccacagcgacttcagcaatggaggcttctttgtgctgaacttccacgccttccagctgaagaagtgccagcccccacctgctgtgccccaggccgagatgctgacagaagatgatgactttgaaattggagactttgtgaagtaccagtgccaccctggctacaccctggtgggcacagacatcctgacctgcaagctgagcagccagctgcagtttgagggcagcctgcccacctgtgaggcccagtgcccagccaatgaggtgaggacaggcagcagcggggtcatcctgagccctggctacccaggcaactacttcaacagccagacctgctcctggagcatcaaggtggagcccaactacaacatcaccatctttgtggacaccttccagagcgagaagcagtttgatgccctggaggtgtttgatggcagcagcggccagagccccctgctggtggtgctgagcggcaaccacacagagcagagcaacttcaccagccgcagcaaccagctgtacctgcgctggagcacagaccacgccaccagcaagaagggcttcaagatccgctatgctgccccctactgcagcctgacccaccccctgaagaatggaggcatcctgaacagaacagctggagctgtgggcagcaaggtgcactacttctgcaagccaggctacaggatggtgggccacagcaatgccacctgcagaagaaaccccctgggcatgtaccagtgggacagcctgacccccctgtgccaggccgtgtcctgtggcatccctgagagccctggaaatggcagcttcaccggaaatgagttcaccctggacagcaaggtggtgtatgaatgtcatgagggcttcaagctggagagcagccagcaggccacagctgtgtgccaggaggatggcctgtggagcaacaagggcaagccacccacctgcaagcctgtggcctgccccagcattgaggcccagctgtctgagcacgtgatctggaggctggtgtctggcagcctgaatgaatatggagcccaggtgctgctgagctgcagccctggctactacctggagggctggaggctgctgcgctgccaggccaacggcacctggaacattggagatgagcggcccagctgcagggtcatcagctgtggcagcctgtccttccccccaaatggaaacaagattggcaccctgactgtgtatggagccacagccatcttcacctgcaacacaggctacaccctggtgggcagccacgtgcgggagtgcctggccaacggcctgtggagcggcagcgagacccgctgcctggccggccactgcggcagcccagaccccatcgtgaatggccacatctctggagatggcttctcctacagagacacagtggtgtaccagtgcaaccctggcttccggctggtgggcacctctgtgcgcatctgcctgcaggaccacaagtggagcggccagacccctgtgtgtgtgcccatcacctgtggccaccctggcaacccagcccacggcttcaccaatggaagtgagttcaacctgaatgatgtggtgaacttcacctgcaacacaggctacctgctgcagggcgtgtcccgggcccagtgccgcagcaatggccagtggagcagccccctgcccacctgccgggtggtgaactgcagcgaccccggctttgtggagaatgccatcagacatggccagcagaacttccctgagagctttgaatatggcatgagcatcctgtaccactgcaagaagggcttctacctgctgggcagcagcgccctgacctgcatggccaacggcctgtgggacaggagcctgcccaagtgcctggccatcagctgtggccaccctggggtgcctgccaatgctgtgctgaccggggagctgttcacctacggggctgtggtgcactacagctgccggggcagcgagagcctgattggaaatgacaccagggtgtgccaggaggacagccactggagcggggccctgccccactgcaccggcaacaaccctggcttctgtggggaccccggcaccccagcccacggcagccggctgggagatgacttcaagaccaagagcctgctgcgcttcagctgtgagatgggccaccagctgcggggcagccctgagaggacctgcctgctgaatggctcctggagcggcctgcagcctgtgtgtgaggccgtgtcctgtggcaaccctggcacccccaccaacggcatgattgtgtccagtgatggcatcctcttcagcagcagcgtcatctatgcctgctgggagggctacaagaccagcggcctgatgaccaggcactgcacagccaacggcacctggacaggaacagccccagactgcaccatcatcagctgtggggaccccggcaccctggccaacggcatccagtttggaacagacttcaccttcaacaagacagtgtcctaccagtgcaaccctggctacgtgatggaggccgtgaccagcgccaccatccgctgcaccaaggatggccgctggaaccccagcaagcctgtgtgcaaggctgtgctgtgcccccagcccccacctgtgcagaatggcaccgtggagggcagtgacttccgctggggcagcagcatctcctacagctgcatggatggctaccagctgagccacagcgccatcctgagctgtgagggccggggcgtgtggaagggggagatcccccagtgcctgcctgtgttctgtggggaccccggcatcccagctgagggccgcctgagcggcaagagcttcacctacaagtctgaggtgttcttccagtgcaagagccccttcatcctggtgggcagcagcagaagagtgtgccaggctgatggcacctggagcggcatccagcccacctgcatcgaccctgcccacaacacctgcccagaccccggcaccccccacttcggcatccagaacagcagccggggctatgaggtgggcagcacagtgttcttccgctgcaggaagggctaccacatccagggcagcaccaccaggacctgcctggccaacctgacctggagcggcatccagacagagtgcatcccccacgcctgccggcagcctgagaccccagcccatgctgatgtgcgggccatcgacctgcccaccttcggctacaccctggtgtacacctgccaccctggcttcttcctggccggcggcagcgagcacaggacctgcaaggctgacatgaagtggacaggcaagagccctgtgtgcaagagcaagggcgtgcgggaggtgaatgagaccgtgaccaagacccctgtgcccagtgatgtgttctttgtgaacagcctgtggaagggctactatgagtacctgggcaagaggcagcctgccaccctgactgtggactggttcaatgccaccagcagcaaggtgaatgccaccttcagcgaggccagccctgtggagctgaagctgaccggcatctacaagaaggaggaggcccacctgctgctgaaggccttccagatcaagggccaggccgacatctttgtgtccaagtttgaaaatgacaactggggcctggatggctacgtgagcagcggcctggagcggggcggcttcaccttccagggcgacatccacggcaaggactttgggaagttcaagctggagcggcaggaccccctgaacccagaccaggacagcagcagccactaccacggcaccagcagcggctctgtggccgccgccatcctggtgcccttctttgccctgatcctgagcggctttgccttctacctgtacaagcacaggacccggcccaaggtgcagtacaacggctacgccggccacgagaacagcaatggccaggccagctttgagaaccccatgtatgacaccaacctgaagcccacagaggccaaggctgtgcgctttgacaccaccctgaacacagtgtgcaccgtggtgtag

SEQ ID NO: 148706 - DNA, 10695 bp, synthetic construct
  misc_feature 1..10695: note = Description of Artificial Sequence: Synthetic coding sequence
  source 1..10695: mol_type = other DNA
atgacagcctggaggcgcttccagagcctgctgctgctgctgggcctgctggtgctgtgtgcccggctgctgacagctgccaagggccagaactgtggcggcctggtgcagggccccaacggcaccatcgagagccctggcttcccccacggctaccccaactatgccaactgcacctggatcatcatcaccggggagaggaaccgcatccagctgtccttccacacctttgccctggaggaggactttgacatcctgtctgtgtatgatggccagccccagcagggcaacctgaaggtgcggctgagcggcttccagctgcccagcagcatcgtgtccacaggcagcatcctgaccctgtggttcaccacagactttgctgtgtctgcccagggcttcaaggccctgtatgaggtgctgcccagccacacctgtggcaaccctggagagatcctgaagggcgtgctgcacggcacccgcttcaacattggagacaagatccgctacagctgcctgcccggctacatcctggagggccacgccatcctgacctgcatcgtgtccccaggaaatggagcctcctgggacttccctgcccccttctgcagagctgagggcgcctgtggcggcaccctgcggggcaccagcagcagcatcagcagcccccacttccccagtgaatatgaaaataatgctgactgcacctggaccatcctggccgagcccggggacaccatcgccctggtgttcacagacttccagctggaggagggctatgacttcctggagatctctggaacagaggcccccagcatctggctgaccggcatgaacctgcccagccctgtgatcagcagcaagaactggctgcggctgcacttcaccagtgacagcaaccacaggaggaagggcttcaatgcccagttccaggtgaagaaggccatcgagctgaagagcagaggagtgaagatgctgcccagcaaggatggcagccacaagaacagcgtgctgagccagggcggcgtggccctggtgtctgacatgtgcccagaccccggcatcccagaaaatggaagaagagctggcagtgacttccgggtgggcgccaacgtgcagttcagctgtgaggacaactacgtgctgcagggcagcaagagcatcacctgccagagggtgacagagaccctggccgcctggagcgaccaccggcccatctgccgggcccggacctgtggcagcaacctgcggggccccagcggggtcatcaccagccccaactaccctgtgcagtatgaggacaatgcccactgtgtgtgggtgatcaccaccacagatcctgacaaggtgatcaagctggcctttgaggagtttgagctggagcggggctatgacaccctgactgtgggagatgctgggaaggtgggggacaccaggtctgtgctgtatgtgctgaccggcagctctgtgcctgacctgattgtgtccatgagcaaccagatgtggctgcacctgcagagtgatgacagcatcggcagccctggcttcaaggctgtgtaccaggagattgagaagggcggctgtggggaccccggcatcccagcctacggcaagaggacaggcagcagcttcctgcatggagacaccctgacctttgagtgcccagctgcctttgagctggtgggggagagggtcatcacctgccagcagaacaaccagtggagcggcaacaagcccagctgtgtgttcagctgcttcttcaacttcaccgccagcagcggcatcatcctgagccccaactacccagaggagtatggcaacaacatgaactgtgtgtggctgatcatcagcgagcccggcagccgcatccacctgatcttcaatgactttgatgtggagccccagtttgacttcctggccgtgaaggatgatggcatcagtgacatcaccgtgctgggcaccttctctggaaatgaggtgcccagccagctggccagcagcggccacatcgtgcggctggagttccagagcgaccacagcaccaccggccggggcttcaacatcacctacaccaccttcggccagaatgaatgccacgaccccggcatccccatcaatggaagaagatttggagaccgcttcctgctgggcagctctgtgtccttccactgtgatgatggctttgtgaagacccagggcagcgagagcatcacctgcatcctgcaggatggaaatgtggtgtggagcagcacagtgccccgctgtgaggccccctgtggcggccacctgacagccagcagcggggtcatcctgcccccaggctggccaggctactacaaggacagcctgcactgtgagtggatcatcgaggccaagccaggccacagcatcaagatcacctttgaccgcttccagacagaggtgaactatgacaccctggaggtgagagatggccctgccagcagcagccccctgattggagagtaccacggcacccaggccccccagttcctgatcagcacaggcaacttcatgtacctgctcttcaccacagacaacagccgcagcagcatcggcttcctgatccactatgaatctgtgaccctggagagtgacagctgcctggaccccggcatccctgtgaatggccacagacatggaggagactttggcatccgcagcacagtgaccttcagctgtgaccccggctacaccctgagtgatgatgagcccctggtgtgtgaaagaaaccaccagtggaaccacgccctgcccagctgtgatgccctgtgtggcggctacatccagggcaagagcggcaccgtgctgagccctggcttcccagacttctaccccaacagcctgaactgcacctggaccatcgaggtgagccacggcaagggcgtgcagatgatcttccacaccttccacctggagagcagccatgactacctgctgatcacagaagatggcagcttcagcgagcctgtggcccggctgaccggctctgtgctgccccacaccatcaaggccggcctgtttggaaacttcaccgcccagctgcgcttcatcagtgacttcagcatctcctatgagggcttcaacatcaccttctctgaatatgacctggagccctgtgatgaccccggggtgcctgccttcagcagaagaattggcttccactttggagtgggggacagcctgaccttcagctgcttcctgggctaccgcctggagggcgccaccaagctgacctgcctgggcggcggccggcgggtgtggagcgcccccctgccccgctgtgtggctgaatgtggggcctctgtgaagggaaatgaaggcaccctgctgagccccaacttccccagcaactatgacaacaaccacgagtgcatctacaagattgaaacagaggccggcaagggcatccacctgcggaccaggagcttccagctgtttgaaggagacaccctgaaggtgtatgatggcaaggacagcagcagccggcccctgggcaccttcaccaagaatgagctgctgggcctcatcctgaacagcaccagcaaccacctgtggctggagttcaacaccaatggaagtgacacagaccagggcttccagctgacctacaccagctttgacctggtgaagtgtgaggaccccggcatccccaactacggctaccgcatcagagatgagggccacttcacagacacagtggtgctgtacagctgcaaccctggctacgccatgcacggcagcaacaccctgacctgcctgagcggggacagaagagtgtgggacaagcccctgcccagctgcatcgccgagtgtggcggccagatccatgctgccaccagcggccgcatcctgagccctggctacccagccccctatgacaacaacctgcactgcacctggatcatcgaggccgaccccgggaagaccatcagcctgcacttcatcgtgtttgacacagagatggcccatgacatcctgaaggtgtgggatggccctgtggacagcgacatcctgctgaaggagtggagcggcagcgccctgcctgaggacatccacagcaccttcaacagcctgaccctgcagtttgacagcgacttcttcatcagcaagagcggcttcagcatccagttcagcaccagcattgctgccacctgcaatgaccccggcatgccccagaatggcaccaggtatggagacagccgggaggccggggacacagtgaccttccagtgtgaccccggctaccagctgcagggccaggccaagatcacctgtgtgcagctgaacaaccgcttcttctggcagcctgacccccccacctgcatcgccgcctgtggcggcaacctgaccggccctgctggggtcatcctgagccccaactacccccagccctacccacctgggaaggaatgtgactggagggtgaaggtgaacccagactttgtgattgccctgatcttcaagagcttcaacatggagcccagctatgacttcctgcacatctatgaaggagaggacagcaacagccccctcatcggcagctaccagggcagccaggcccctgagcgcatcgagagcagcggcaacagcctcttcctggccttcagaagtgatgcctctgtgggcctgagcggctttgccatcgagttcaaggagaagccccgggaggcctgctttgatcctggcaacatcatgaatggcaccagggtgggcacagacttcaagctgggcagcaccatcacctaccagtgtgacagcggctacaagatcctggaccccagcagcatcacctgtgtgattggagcagatggcaagcccagctgggaccaggtgctgcccagctgcaatgccccctgtggcggccagtacacaggcagcgagggcgtggtgctgagccccaactacccccacaactacacagctggccagatctgcctgtacagcatcaccgtgcccaaggagtttgtggtgtttggccagtttgcctacttccagacagccctgaatgacctggccgagctgtttgatggcacccacgcccaggcccggctgctgagcagcctgagcggcagccacagcggggagaccctgcccctggccaccagcaaccagatcctgctgcgcttcagcgccaagagcggggccagcgcccggggcttccactttgtgtaccaggccgtgcccaggaccagtgacacccagtgcagctctgtgcctgagcccaggtatggaagaagaattggcagcgagttctctgctggcagcatcgtgcgctttgagtgcaaccctggctacctgctgcagggcagcacagccctgcactgccagagcgtgcccaatgccctggcccagtggaatgacaccatccccagctgtgtggtgccctgcagcggcaacttcacccagaggcggggcaccatcctgagccctggctacccagagccctacggcaacaacctgaactgcatctggaagatcatcgtgacagagggcagcggcatccagatccaggtgatcagctttgccacagagcagaactgggacagcctggagatccatgatggaggagatgtgacagccccccggctgggcagcttcagcggcaccaccgtgcctgccctgctgaacagcaccagcaaccagctgtacctgcacttccagagcgacatctctgtggccgctgctggcttccacctggagtacaagacagtgggcctggccgcctgccaggagcccgccctgcccagcaacagcatcaagattggagaccgctacatggtgaatgatgtgctgtccttccagtgtgagcccggctacaccctgcagggccgcagccacatcagctgcatgcctggcaccgtgcggcgctggaactaccccagccccctgtgcatcgccacctgtggcggcaccctgagcaccctgggcggcgtcatcctgagccctggcttccctggcagctaccccaacaacctggactgcacctggaggatcagcctgcccatcggctacggggcccacatccagttcctgaacttcagcacagaggccaaccacgacttcctggagatccagaatggcccctaccacaccagccccatgattggccagttctctggaacagacctgcctgctgccctgctgagcaccacccatgagaccctcatccacttctacagcgaccacagccagaaccggcagggcttcaagctggcctaccaggcctatgagctgcagaactgcccagaccccccacccttccagaatggctacatgatcaacagcgactacagcgtgggccagagcgtgtcctttgagtgctacccaggctacatcctgattggccaccctgtgctgacctgccagcacggcatcaacagaaactggaactaccccttcccccgctgtgatgccccctgtggctacaacgtgaccagccagaatggcaccatctacagccctggcttcccagatgagtaccccatcctgaaggactgcatctggctgatcaccgtgcccccaggccacggcgtgtacatcaacttcaccctgctgcagacagaagctgtgaatgactacatcgctgtgtgggatggccctgaccagaacagcccccagctgggcgtcttcagcggcaacacagccctggagacagcctacagcagcaccaaccaggtgctgctgaagttccacagcgacttcagcaatggaggcttctttgtgctgaacttccacgccttccagctgaagaagtgccagcccccacctgctgtgccccaggccgagatgctgacagaagatgatgactttgagatcggggactttgtgaagtaccagtgccaccctggctacaccctggtgggcacagacatcctgacctgcaagctgagcagccagctgcagtttgagggcagcctgcccacctgtgaggcccagtgcccagccaatgaggtgaggacaggcagcagtggagtcatcctgagccctggctacccaggcaactacttcaacagccagacctgctcctggagcatcaaggtggagcccaactacaacatcaccatctttgtggacaccttccagagcgagaagcagtttgatgccctggaggtgtttgatggcagcagcggccagagccccctgctggtggtgctgagcggcaaccacacagagcagagcaacttcaccagccgcagcaaccagctgtacctgcgctggagcacagaccacgccaccagcaagaagggcttcaagatccgctatgctgccccctactgcagcctgacccaccccctgaagaatggaggcatcctgaacagaacagctggagctgtgggcagcaaggtgcactacttctgcaagccaggctacaggatggtgggccacagcaatgccacctgcagaagaaaccccctgggcatgtaccagtgggacagcctgacccccctgtgccaggccgtgtcctgtggcatccctgagagccctggaaatggcagcttcaccggaaatgagttcaccctggacagcaaggtggtgtatgagtgccacgagggcttcaagctggagagcagccagcaggccacagctgtgtgccaggaggatggcctgtggagcaacaagggcaagccacccacctgcaagcctgtggcctgccccagcattgaggcccagctgtctgaacatgtgatctggaggctggtgtctggcagcctgaatgaatatggagcccaggtgctgctgagctgcagccctggctactacctggagggctggaggctgctgcgctgccaggccaacggcacctggaacattggagatgagcggcccagctgcagggtcatcagctgtggcagcctgtccttcccccccaacggcaacaagattggcaccctgactgtgtatggagccacagccatcttcacctgcaacacaggctacaccctggtgggcagccacgtgagagaatgtctggccaacggcctgtggagcggcagcgagacccgctgcctggccggccactgcggcagcccagaccccatcgtgaatggccacatctctggagatggcttctcctacagagacacagtggtgtaccagtgcaaccctggcttccggctggtgggcacctctgtgcgcatctgcctgcaggaccacaagtggagcggccagacccctgtgtgtgtgcccatcacctgtggccaccctggcaacccagcccacggcttcaccaacggcagcgagttcaacctgaatgatgtggtgaacttcacctgcaacacaggctacctgctgcagggcgtgtcccgggcccagtgccgcagcaatggccagtggagcagccccctgcccacctgccgggtggtgaactgcagcgaccccggctttgtggagaatgccatccgccacggccagcagaacttccctgagagctttgaatatggcatgagcatcctgtaccactgcaagaagggcttctacctgctgggcagcagcgccctgacctgcatggccaacggcctgtgggacaggagcctgcccaagtgcctggccatcagctgtggccaccctggggtgcctgccaatgctgtgctgactggagagctgttcacctatggagctgtggtgcactacagctgccggggcagcgagagcctgattggaaatgacaccagggtgtgccaggaggacagccactggagcggggccctgccccactgcaccggcaacaaccctggcttctgtggggaccccggcaccccagcccacggcagccggctgggagatgacttcaagaccaagagcctgctgcgcttcagctgtgagatgggccaccagctgcggggcagccctgagaggacctgcctgctgaatggctcctggagcggcctgcagcctgtgtgtgaggccgtgtcctgtggcaaccctggcacccccaccaacggcatgattgtgtccagtgatggcatcctcttcagcagcagcgtcatctatgcctgctgggagggctacaagaccagcggcctgatgaccaggcactgcacagccaacggcacctggacaggaacagccccagactgcaccatcatcagctgtggggaccccggcaccctggccaacggcatccagtttggaacagacttcaccttcaacaagacagtgtcctaccagtgcaaccctggctacgtgatggaggccgtgaccagcgccaccatccgctgcaccaaggatggccgctggaaccccagcaagcctgtgtgcaaggctgtgctgtgcccccagcccccacctgtgcagaatggaacagtggagggcagtgacttccgctggggcagcagcatctcctacagctgcatggatggctaccagctgagccacagcgccatcctgagctgtgagggccggggcgtgtggaagggggagatcccccagtgcctgcccgtcttctgtggggaccccggcatcccagctgagggccgcctgagcggcaagagcttcacctacaagtctgaggtgttcttccagtgcaagagccccttcatcctggtgggcagcagccggcgggtgtgccaggctgatggcacctggagcggcatccagcccacctgcattgatcctgcccacaacacctgcccagaccccggcaccccccacttcggcatccagaacagcagccggggctatgaggtgggcagcaccgtcttcttccgctgcaggaagggctaccacatccagggcagcaccaccaggacctgcctggccaacctgacctggagcggcatccagacagagtgcatcccccacgcctgccggcagcctgagaccccagcccacgcagatgtgcgggccatcgacctgcccaccttcggctacaccctggtgtacacctgccaccctggcttcttcctggccggcggcagcgagcacaggacctgcaaggctgacatgaagtggacaggcaagagccctgtgtgcaagagcaaaggagtgcgggaggtgaatgaaacagtgaccaagacccctgtgcccagtgatgtgttctttgtgaacagcctgtggaagggctactatgagtacctgggcaagaggcagcctgccaccctgactgtggactggttcaatgccaccagcagcaaggtgaatgccaccttcagcgaggccagccctgtggagctgaagctgaccggcatctacaagaaggaggaggcccacctgctgctgaaggccttccagatcaagggccaggccgacatctttgtgtccaagtttgaaaatgacaactggggcctggatggctacgtgagcagcggcctggagcggggcggcttcaccttccagggcgacatccacggcaaggactttgggaagttcaagctggagcggcaggaccccctgaacccagaccaggacagcagcagccactaccacggcaccagcagcggctctgtggccgccgccatcctggtgcccttctttgccctgatcctgagcggctttgccttctacctgtacaagcacaggacccggcccaaggtgcagtacaacggctacgccggccacgagaacagcaatggccaggccagctttgagaaccccatgtatgacaccaacctgaagcccacagaggccaaggctgtgcgctttgacaccaccctgaacacagtgtgcaccgtggtgtag

SEQ ID NO: 148707 - DNA, 6330 bp, synthetic construct
  misc_feature 1..6330: note = Description of Artificial Sequence: Synthetic coding sequence
  source 1..6330: mol_type = other DNA
atgacagcctggaggcgcttccagagcctgctgctgctgctgggcctgctggtgctgtgtgcccggctgctgacagctgccaagggccagaactgtggcggcctggtgcagggccccaacggcaccatcgagagccctggcttcccccacggctaccccaactatgccaactgcacctggatcatcatcaccggggagaggaaccgcatccagctgtccttccacacctttgccctggaggaggactttgacatcctgtctgtgtatgatggccagccccagcagggcaacctgaaggtgcggctgagcggcttccagctgcccagcagcatcgtgtccacaggcagcatcctgaccctgtggttcaccacagactttgctgtgtctgcccagggcttcaaggccctgtatgaggtgctgcccagccacacctgtggcaaccctggagagatcctgaagggcgtgctgcacggcacccgcttcaacattggagacaagatccgctacagctgcctgcccggctacatcctggagggccacgccatcctgacctgcatcgtgtccccaggaaatggagcctcctgggacttccctgcccccttctgcagagctgagggcgcctgtggcggcaccctgcggggcaccagcagcagcatcagcagcccccacttccccagtgaatatgaaaataatgctgactgcacctggaccatcctggccgagcccggggacaccatcgccctggtgttcacagacttccagctggaggagggctatgacttcctggagatctctggaacagaggcccccagcatctggctgaccggcatgaacctgcccagccctgtgatcagcagcaagaactggctgcggctgcacttcaccagtgacagcaaccacaggaggaagggcttcaatgcccagttccaggtgaagaaggccatcgagctgaagagcagaggagtgaagatgctgcccagcaaggatggcagccacaagaacagcgtgctgagccagggcggcgtggccctggtgtctgacatgtgcccagaccccggcatcccagaaaatggaagaagagctggcagtgacttccgggtgggcgccaacgtgcagttcagctgtgaggacaactacgtgctgcagggcagcaagagcatcacctgccagagggtgacagagaccctggccgcctggagcgaccaccggcccatctgccgggcccggacctgtggcagcaacctgcggggccccagcggggtcatcaccagccccaactaccctgtgcagtatgaggacaatgcccactgtgtgtgggtgatcaccaccacagatcctgacaaggtgatcaagctggcctttgaggagtttgagctggagcggggctatgacaccctgactgtgggagatgctgggaaggtgggggacaccaggtctgtgctgtatgtgctgaccggcagctctgtgcctgacctgattgtgtccatgagcaaccagatgtggctgcacctgcagagtgatgacagcatcggcagccctggcttcaaggctgtgtaccaggagattgagaagggcggctgtggggaccccggcatcccagcctacggcaagaggacaggcagcagcttcctgcatggagacaccctgacctttgagtgcccagctgcctttgagctggtgggggagagggtcatcacctgccagcagaacaaccagtggagcggcaacaagcccagctgtgtgttcagctgcttcttcaacttcaccgccagcagcggcatcatcctgagccccaactacccagaggagtatggcaacaacatgaactgtgtgtggctgatcatcagcgagcccggcagccgcatccacctgatcttcaatgactttgatgtggagccccagtttgacttcctggccgtgaaggatgatggcatcagtgacatcaccgtgctgggcaccttctctggaaatgaggtgcccagccagctggccagcagcggccacatcgtgcggctggagttccagagcgaccacagcaccaccggccggggcttcaacatcacctacaccaccttcggccagaatgaatgccacgaccccggcatccccatcaatggaagaagatttggagaccgcttcctgctgggcagctctgtgtccttccactgtgatgatggctttgtgaagacccagggcagcgagagcatcacctgcatcctgcaggatggaaatgtggtgtggagcagcacagtgccccgctgtgaggccccctgtggcggccacctgacagccagcagcggggtcatcctgcccccaggctggccaggctactacaaggacagcctgcactgtgagtggatcatcgaggccaagccaggccacagcatcaagatcacctttgaccgcttccagacagaggtgaactatgacaccctggaggtgagagatggccctgccagcagcagccccctgattggagagtaccacggcacccaggccccccagttcctgatcagcacaggcaacttcatgtacctgctcttcaccacagacaacagccgcagcagcatcggcttcctgatccactatgaatctgtgaccctggagagtgacagctgcctggaccccggcatccctgtgaatggccacagacatggaggagactttggcatccgcagcacagtgaccttcagctgtgaccccggctacaccctgagtgatgatgagcccctggtgtgtgaaagaaaccaccagtggaaccacgccctgcccagctgtgatgccctgtgtggcggctacatccagggcaagagcggcaccgtgctgagccctggcttcccagacttctaccccaacagcctgaactgcacctggaccatcgaggtgagccacggcaagggcgtgcagatgatcttccacaccttccacctggagagcagccatgactacctgctgatcacagaagatggcagcttcagcgagcctgtggcccggctgaccggctctgtgctgccccacaccatcaaggccggcctgtttggaaacttcaccgcccagctgcgcttcatcagtgacttcagcatctcctatgagggcttcaacatcaccttctctgaatatgacctggagccctgtgatgaccccggggtgcctgccttcagcagaagaattggcttccactttggagtgggggacagcctgaccttcagctgcttcctgggctaccgcctggagggcgccaccaagctgacctgcctgggcggcggccggcgggtgtggagcgcccccctgccccgctgtgtggctgaatgtggggcctctgtgaagggaaatgaaggcaccctgctgagccccaacttccccagcaactatgacaacaaccacgagtgcatctacaagattgaaacagaggccggcaagggcatccacctgcggaccaggagcttccagctgtttgaaggagacaccctgaaggtgtatgatggcaaggacagcagcagccggcccctgggcaccttcaccaagaatgagctgctgggcctcatcctgaacagcaccagcaaccacctgtggctggagttcaacaccaatggaagtgacacagaccagggcttccagctgacctacaccagctttgacctggtgaagtgtgaggaccccggcatccccaactacggctaccgcatcagagatgagggccacttcacagacacagtggtgctgtacagctgcaaccctggctacgccatgcacggcagcaacaccctgacctgcctgagcggggacagaagagtgtgggacaagcccctgcccagctgcatcgccgagtgtggcggccagatccatgctgccaccagcggccgcatcctgagccctggctacccagccccctatgacaacaacctgcactgcacctggatcatcgaggccgaccccgggaagaccatcagcctgcacttcatcgtgtttgacacagagatggcccatgacatcctgaaggtgtgggatggccctgtggacagcgacatcctgctgaaggagtggagcggcagcgccctgcctgaggacatccacagcaccttcaacagcctgaccctgcagtttgacagcgacttcttcatcagcaagagcggcttcagcatccagttcagcaccagcattgctgccacctgcaatgaccccggcatgccccagaatggcaccaggtatggagacagccgggaggccggggacacagtgaccttccagtgtgaccccggctaccagctgcagggccaggccaagatcacctgtgtgcagctgaacaaccgcttcttctggcagcctgacccccccacctgcatcgccgcctgtggcggcaacctgaccggccctgctggggtcatcctgagccccaactacccccagccctacccacctgggaaggaatgtgactggagggtgaaggtgaacccagactttgtgattgccctgatcttcaagagcttcaacatggagcccagctatgacttcctgcacatctatgaaggagaggacagcaacagccccctcatcggcagctaccagggcagccaggcccctgagcgcatcgagagcagcggcaacagcctcttcctggccttcagaagtgatgcctctgtgggcctgagcggctttgccatcgagttcaaggagaagccccgggaggcctgctttgatcctggcaacatcatgaatggcaccagggtgggcacagacttcaagctgggcagcaccatcacctaccagtgtgacagcggctacaagatcctggaccccagcagcatcacctgtgtgattggagcagatggcaagcccagctgggaccaggtgctgcccagctgcaatgccccctgtggcggccagtacacaggcagcgagggcgtggtgctgagccccaactacccccacaactacacagctggccagatctgcctgtacagcatcaccgtgcccaaggagtttgtggtgtttggccagtttgcctacttccagacagccctgaatgacctggccgagctgtttgatggcacccacgcccaggcccggctgctgagcagcctgagcggcagccacagcggggagaccctgcccctggccaccagcaaccagatcctgctgcgcttcagcgccaagagcggggccagcgcccggggcttccactttgtgtaccaggccgtgcccaggaccagtgacacccagtgcagctctgtgcctgagcccaggtatggaagaagaattggcagcgagttctctgctggcagcatcgtgcgctttgagtgcaaccctggctacctgctgcagggcagcacagccctgcactgccagagcgtgcccaatgccctggcccagtggaatgacaccatccccagctgtgtggtgccctgcagcggcaacttcacccagaggcggggcaccatcctgagccctggctacccagagccctacggcaacaacctgaactgcatctggaagatcatcgtgacagagggcagcggcatccagatccaggtgatcagctttgccacagagcagaactgggacagcctggagatccatgatggaggagatgtgacagccccccggctgggcagcttcagcggcaccaccgtgcctgccctgctgaacagcaccagcaaccagctgtacctgcacttccagagcgacatctctgtggccgctgctggcttccacctggagtacaagacagtgggcctggccgcctgccaggagcccgccctgcccagcaacagcatcaagattggagaccgctacatggtgaatgatgtgctgtccttccagtgtgagcccggctacaccctgcagggccgcagccacatcagctgcatgcctggcaccgtgcggcgctggaactaccccagccccctgtgcatcgccacctgtggcggcaccctgagcaccctgggcggcgtcatcctgagccctggcttccctggcagctaccccaacaacctggactgcacctggaggatcagcctgcccatcggctacggggcccacatccagttcctgaacttcagcacagaggccaaccacgacttcctggagatccagaatggcccctaccacaccagccccatgattggccagttctctggaacagacctgcctgctgccctgctgagcaccacccatgagaccctcatccacttctacagcgaccacagccagaaccggcagggcttcaagctggcctaccagggcggcagcggcaacatcggccctgccttcccctgcctggacacccccttccaggcccgctgccagggcgaggagaggaccttcaactag

SEQ ID NO: 148708 - DNA, 10164 bp, synthetic construct
  misc_feature 1..10164: note = Description of Artificial Sequence: Synthetic coding sequence
  source 1..10164: mol_type = other DNA
atgacagcctggaggcgcttccagagcctgctgctgctgctgggcctgctggtgctgtgtgcccggctgctgacagctgccaagggccagaactgtggcggcctggtgcagggccccaacggcaccatcgagagccctggcttcccccacggctaccccaactatgccaactgcacctggatcatcatcaccggggagaggaaccgcatccagctgtccttccacacctttgccctggaggaggactttgacatcctgtctgtgtatgatggccagccccagcagggcaacctgaaggtgcggctgagcggcttccagctgcccagcagcatcgtgtccacaggcagcatcctgaccctgtggttcaccacagactttgctgtgtctgcccagggcttcaaggccctgtatgaggtgctgcccagccacacctgtggcaaccctggagagatcctgaagggcgtgctgcacggcacccgcttcaacattggagacaagatccgctacagctgcctgcccggctacatcctggagggccacgccatcctgacctgcatcgtgtccccaggaaatggagcctcctgggacttccctgcccccttctgcagagctgagggcgcctgtggcggcaccctgcggggcaccagcagcagcatcagcagcccccacttccccagtgaatatgaaaataatgctgactgcacctggaccatcctggccgagcccggggacaccatcgccctggtgttcacagacttccagctggaggagggctatgacttcctggagatctctggaacagaggcccccagcatctggctgaccggcatgaacctgcccagccctgtgatcagcagcaagaactggctgcggctgcacttcaccagtgacagcaaccacaggaggaagggcttcaatgcccagttccaggtgaagaaggccatcgagctgaagagcagaggagtgaagatgctgcccagcaaggatggcagccacaagaacagcgtgctgagccagggcggcgtggccctggtgtctgacatgtgcccagaccccggcatcccagaaaatggaagaagagctggcagtgacttccgggtgggcgccaacgtgcagttcagctgtgaggacaactacgtgctgcagggcagcaagagcatcacctgccagagggtgacagagaccctggccgcctggagcgaccaccggcccatctgccgggcccggacctgtggcagcaacctgcggggccccagcggggtcatcaccagccccaactaccctgtgcagtatgaggacaatgcccactgtgtgtgggtgatcaccaccacagatcctgacaaggtgatcaagctggcctttgaggagtttgagctggagcggggctatgacaccctgactgtgggagatgctgggaaggtgggggacaccaggtctgtgctgtatgtgctgaccggcagctctgtgcctgacctgattgtgtccatgagcaaccagatgtggctgcacctgcagagtgatgacagcatcggcagccctggcttcaaggctgtgtaccaggagattgagaagggcggctgtggggaccccggcatcccagcctacggcaagaggacaggcagcagcttcctgcatggagacaccctgacctttgagtgcccagctgcctttgagctggtgggggagagggtcatcacctgccagcagaacaaccagtggagcggcaacaagcccagctgtgtgttcagctgcttcttcaacttcaccgccagcagcggcatcatcctgagccccaactacccagaggagtatggcaacaacatgaactgtgtgtggctgatcatcagcgagcccggcagccgcatccacctgatcttcaatgactttgatgtggagccccagtttgacttcctggccgtgaaggatgatggcatcagtgacatcaccgtgctgggcaccttctctggaaatgaggtgcccagccagctggccagcagcggccacatcgtgcggctggagttccagagcgaccacagcaccaccggccggggcttcaacatcacctacaccaccttcggccagaatgaatgccacgaccccggcatccccatcaatggaagaagatttggagaccgcttcctgctgggcagctctgtgtccttccactgtgatgatggctttgtgaagacccagggcagcgagagcatcacctgcatcctgcaggatggaaatgtggtgtggagcagcacagtgccccgctgtgaggccccctgtggcggccacctgacagccagcagcggggtcatcctgcccccaggctggccaggctactacaaggacagcctgcactgtgagtggatcatcgaggccaagccaggccacagcatcaagatcacctttgaccgcttccagacagaggtgaactatgacaccctggaggtgagagatggccctgccagcagcagccccctgattggagagtaccacggcacccaggccccccagttcctgatcagcacaggcaacttcatgtacctgctcttcaccacagacaacagccgcagcagcatcggcttcctgatccactatgaatctgtgaccctggagagtgacagctgcctggaccccggcatccctgtgaatggccacagacatggaggagactttggcatccgcagcacagtgaccttcagctgtgaccccggctacaccctgagtgatgatgagcccctggtgtgtgaaagaaaccaccagtggaaccacgccctgcccagctgtgatgccctgtgtggcggctacatccagggcaagagcggcaccgtgctgagccctggcttcccagacttctaccccaacagcctgaactgcacctggaccatcgaggtgagccacggcaagggcgtgcagatgatcttccacaccttccacctggagagcagccatgactacctgctgatcacagaagatggcagcttcagcgagcctgtggcccggctgaccggctctgtgctgccccacaccatcaaggccggcctgtttggaaacttcaccgcccagctgcgcttcatcagtgacttcagcatctcctatgagggcttcaacatcaccttctctgaatatgacctggagccctgtgatgaccccggggtgcctgccttcagcagaagaattggcttccactttggagtgggggacagcctgaccttcagctgcttcctgggctaccgcctggagggcgccaccaagctgacctgcctgggcggcggccggcgggtgtggagcgcccccctgccccgctgtgtggctgaatgtggggcctctgtgaagggaaatgaaggcaccctgctgagccccaacttccccagcaactatgacaacaaccacgagtgcatctacaagattgaaacagaggccggcaagggcatccacctgcggaccaggagcttccagctgtttgaaggagacaccctgaaggtgtatgatggcaaggacagcagcagccggcccctgggcaccttcaccaagaatgagctgctgggcctcatcctgaacagcaccagcaaccacctgtggctggagttcaacaccaatggaagtgacacagaccagggcttccagctgacctacaccagctttgacctggtgaagtgtgaggaccccggcatccccaactacggctaccgcatcagagatgagggccacttcacagacacagtggtgctgtacagctgcaaccctggctacgccatgcacggcagcaacaccctgacctgcctgagcggggacagaagagtgtgggacaagcccctgcccagctgcatcgccgagtgtggcggccagatccatgctgccaccagcggccgcatcctgagccctggctacccagccccctatgacaacaacctgcactgcacctggatcatcgaggccgaccccgggaagaccatcagcctgcacttcatcgtgtttgacacagagatggcccatgacatcctgaaggtgtgggatggccctgtggacagcgacatcctgctgaaggagtggagcggcagcgccctgcctgaggacatccacagcaccttcaacagcctgaccctgcagtttgacagcgacttcttcatcagcaagagcggcttcagcatccagttcagcaccagcattgctgccacctgcaatgaccccggcatgccccagaatggcaccaggtatggagacagccgggaggccggggacacagtgaccttccagtgtgaccccggctaccagctgcagggccaggccaagatcacctgtgtgcagctgaacaaccgcttcttctggcagcctgacccccccacctgcatcgccgcctgtggcggcaacctgaccggccctgctggggtcatcctgagccccaactacccccagccctacccacctgggaaggaatgtgactggagggtgaaggtgaacccagactttgtgattgccctgatcttcaagagcttcaacatggagcccagctatgacttcctgcacatctatgaaggagaggacagcaacagccccctcatcggcagctaccagggcagccaggcccctgagcgcatcgagagcagcggcaacagcctcttcctggccttcagaagtgatgcctctgtgggcctgagcggctttgccatcgagttcaaggagaagccccgggaggcctgctttgatcctggcaacatcatgaatggcaccagggtgggcacagacttcaagctgggcagcaccatcacctaccagtgtgacagcggctacaagatcctggaccccagcagcatcacctgtgtgattggagcagatggcaagcccagctgggaccaggtgctgcccagctgcaatgccccctgtggcggccagtacacaggcagcgagggcgtggtgctgagccccaactacccccacaactacacagctggccagatctgcctgtacagcatcaccgtgcccaaggagtttgtggtgtttggccagtttgcctacttccagacagccctgaatgacctggccgagctgtttgatggcacccacgcccaggcccggctgctgagcagcctgagcggcagccacagcggggagaccctgcccctggccaccagcaaccagatcctgctgcgcttcagcgccaagagcggggccagcgcccggggcttccactttgtgtaccaggccgtgcccaggaccagtgacacccagtgcagctctgtgcctgagcccaggtatggaagaagaattggcagcgagttctctgctggcagcatcgtgcgctttgagtgcaaccctggctacctgctgcagggcagcacagccctgcactgccagagcgtgcccaatgccctggcccagtggaatgacaccatccccagctgtgtggtgccctgcagcggcaacttcacccagaggcggggcaccatcctgagccctggctacccagagccctacggcaacaacctgaactgcatctggaagatcatcgtgacagagggcagcggcatccagatccaggtgatcagctttgccacagagcagaactgggacagcctggagatccatgatggaggagatgtgacagccccccggctgggcagcttcagcggcaccaccgtgcctgccctgctgaacagcaccagcaaccagctgtacctgcacttccagagcgacatctctgtggccgctgctggcttccacctggagtacaagacagtgggcctggccgcctgccaggagcccgccctgcccagcaacagcatcaagattggagaccgctacatggtgaatgatgtgctgtccttccagtgtgagcccggctacaccctgcagggccgcagccacatcagctgcatgcctggcaccgtgcggcgctggaactaccccagccccctgtgcatcgccacctgtggcggcaccctgagcaccctgggcggcgtcatcctgagccctggcttccctggcagctaccccaacaacctggactgcacctggaggatcagcctgcccatcggctacggggcccacatccagttcctgaacttcagcacagaggccaaccacgacttcctggagatccagaatggcccctaccacaccagccccatgattggccagttctctggaacagacctgcctgctgccctgctgagcaccacccatgagaccctcatccacttctacagcgaccacagccagaaccggcagggcttcaagctggcctaccaggcctatgagctgcagaactgcccagaccccccacccttccagaatggctacatgatcaacagcgactacagcgtgggccagagcgtgtcctttgagtgctacccaggctacatcctgattggccaccctgtgctgacctgccagcacggcatcaacagaaactggaactaccccttcccccgctgtgatgccccctgtggctacaacgtgaccagccagaatggcaccatctacagccctggcttcccagatgagtaccccatcctgaaggactgcatctggctgatcaccgtgcccccaggccacggcgtgtacatcaacttcaccctgctgcagacagaagctgtgaatgactacatcgctgtgtgggatggccctgaccagaacagcccccagctgggcgtcttcagcggcaacacagccctggagacagcctacagcagcaccaaccaggtgctgctgaagttccacagcgacttcagcaatggaggcttctttgtgctgaacttccacgccttccagctgaagaagtgccagcccccacctgctgtgccccaggccgagatgctgacagaagatgatgactttgagatcggggactttgtgaagtaccagtgccaccctggctacaccctggtgggcacagacatcctgacctgcaagctgagcagccagctgcagtttgagggcagcctgcccacctgtgaggcccagtgcccagccaatgaggtgaggacaggcagcagtggagtcatcctgagccctggctacccaggcaactacttcaacagccagacctgctcctggagcatcaaggtggagcccaactacaacatcaccatctttgtggacaccttccagagcgagaagcagtttgatgccctggaggtgtttgatggcagcagcggccagagccccctgctggtggtgctgagcggcaaccacacagagcagagcaacttcaccagccgcagcaaccagctgtacctgcgctggagcacagaccacgccaccagcaagaagggcttcaagatccgctatgctgccccctactgcagcctgacccaccccctgaagaatggaggcatcctgaacagaacagctggagctgtgggcagcaaggtgcactacttctgcaagccaggctacaggatggtgggccacagcaatgccacctgcagaagaaaccccctgggcatgtaccagtgggacagcctgacccccctgtgccaggccgtgtcctgtggcatccctgagagccctggaaatggcagcttcaccggaaatgagttcaccctggacagcaaggtggtgtatgagtgccacgagggcttcaagctggagagcagccagcaggccacagctgtgtgccaggaggatggcctgtggagcaacaagggcaagccacccacctgcaagcctgtggcctgccccagcattgaggcccagctgtctgaacatgtgatctggaggctggtgtctggcagcctgaatgaatatggagcccaggtgctgctgagctgcagccctggctactacctggagggctggaggctgctgcgctgccaggccaacggcacctggaacattggagatgagcggcccagctgcagagctggccactgcggcagcccagaccccatcgtgaatggccacatctctggagatggcttctcctacagagacacagtggtgtaccagtgcaaccctggcttccggctggtgggcacctctgtgcgcatctgcctgcaggaccacaagtggagcggccagacccctgtgtgtgtgcccatcacctgtggccaccctggcaacccagcccacggcttcaccaacggcagcgagttcaacctgaatgatgtggtgaacttcacctgcaacacaggctacctgctgcagggcgtgtcccgggcccagtgccgcagcaatggccagtggagcagccccctgcccacctgccgggtggtgaactgcagcgaccccggctttgtggagaatgccatccgccacggccagcagaacttccctgagagctttgaatatggcatgagcatcctgtaccactgcaagaagggcttctacctgctgggcagcagcgccctgacctgcatggccaacggcctgtgggacaggagcctgcccaagtgcctggccatcagctgtggccaccctggggtgcctgccaatgctgtgctgactggagagctgttcacctatggagctgtggtgcactacagctgccggggcagcgagagcctgattggaaatgacaccagggtgtgccaggaggacagccactggagcggggccctgccccactgcaccggcaacaaccctggcttctgtggggaccccggcaccccagcccacggcagccggctgggagatgacttcaagaccaagagcctgctgcgcttcagctgtgagatgggccaccagctgcggggcagccctgagaggacctgcctgctgaatggctcctggagcggcctgcagcctgtgtgtgaggccgtgctgtgcccccagcccccacctgtgcagaatggcaccgtggagggcagtgacttccgctggggcagcagcatctcctacagctgcatggatggctaccagctgagccacagcgccatcctgagctgtgagggccggggcgtgtggaagggggagatcccccagtgcctgcctgtgttctgtggggaccccggcatcccagctgagggccgcctgagcggcaagagcttcacctacaagtctgaggtgttcttccagtgcaagagccccttcatcctggtgggcagcagcagaagagtgtgccaggctgatggcacctggagcggcatccagcccacctgcatcgaccctgcccacaacacctgcccagaccccggcaccccccacttcggcatccagaacagcagccggggctatgaggtgggcagcacagtgttcttccgctgcaggaagggctaccacatccagggcagcaccaccaggacctgcctggccaacctgacctggagcggcatccagacagagtgcatcccccacgcctgccggcagcctgagaccccagcccatgctgatgtgcgggccatcgacctgcccaccttcggctacaccctggtgtacacctgccaccctggcttcttcctggccggcggcagcgagcacaggacctgcaaggctgacatgaagtggacaggcaagagccctgtgtgcaagagcaagggcgtgcgggaggtgaatgagaccgtgaccaagacccctgtgcccagtgatgtgttctttgtgaacagcctgtggaagggctactatgagtacctgggcaagaggcagcctgccaccctgactgtggactggttcaatgccaccagcagcaaggtgaatgccaccttcagcgaggccagccctgtggagctgaagctgaccggcatctacaagaaggaggaggcccacctgctgctgaaggccttccagatcaagggccaggccgacatctttgtgtccaagtttgaaaatgacaactggggcctggatggctacgtgagcagcggcctggagcggggcggcttcaccttccagggcgacatccacggcaaggactttgggaagttcaagctggagcggcaggaccccctgaacccagaccaggacagcagcagccactaccacggcaccagcagcggctctgtggccgccgccatcctggtgcccttctttgccctgatcctgagcggctttgccttctacctgtacaagcacaggacccggcccaaggtgcagtacaacggctacgccggccacgagaacagcaatggccaggccagctttgagaaccccatgtatgacaccaacctgaagcccacagaggccaaggctgtgcgctttgacaccaccctgaacacagtgtgcaccgtggtgtag

SEQ ID NO: 148709 - DNA, 10464 bp, synthetic construct
  misc_feature 1..10464: note = Description of Artificial Sequence: Synthetic coding sequence
  source 1..10464: mol_type = other DNA
atgaggctcatcagcatcgcccctggcccccgctggcaggtgcagagccaccaccccaggtctgctggccagaactgcaccttccagctgcacggccccaacggcaccgtggagagccctggcttcccctacggctaccccaactatgccaactgcacctggaccatcacagctgaggagcagcaccgcatccagctggtgttccagagctttgccctggaggaggactttgatgtgctgtctgtgtttgatggccccccccagcctgagaacctgcggacccggctgaccggcttccagctgcctgccaccatcgtgtctgctgccaccaccctgagcctgcggctcatcagtgactatgctgtgtctgcccagggcttccacgccacctatgaggtgctgcccagccacacctgtggcaaccctggccgcctgcccaacggcatccagcagggcagcaccttcaacctgggggacaaggtgcgctacagctgcaacctgggcttcttcctggagggccatgctgtgctgacctgccacgccggcagcgagaacagcgccacctgggacttccccctgcccagctgcagagcagatgatgcctgtggcggcaccctgcggggccagagcggcatcatcagcagcccccacttccccagcgagtaccacaacaatgctgactgcacctggaccatcctggccgagctgggggacaccatcgccctggtgttcatcgacttccagctggaggatggctatgacttcctggaggtgactggaacagagggcagcagcctgtggttcaccggggccagcctgcctgcccctgtgatcagcagcaagaactggctgcggctgcacttcaccagtgatggcaaccaccggcagaggggcttcagcgcccagtaccaggtgaagaagcagatcgagctgaagagcagaggagtgaagctgatgcccagcaaggacaacagccagaagacctctgtgctgacccaggtgggcgtgtcccagggccacaacatgtgcccagaccccggcatccctgagcggggcaagaggctgggcagtgacttccggctgggcagctctgtgcagttcacctgcaatgaaggctatgacctgcagggcagcaagaggatcacctgcatgaaggtgtctgacatgtttgctgcctggagcgaccacaggcctgtgtgccgggccaggatgtgtgatgcccacctgcggggccccagcggcatcatcaccagccccaacttccccatccagtatgacaacaatgcccactgtgtgtggatcatcacagccctgaaccccagcaaggtgatcaagctggcctttgaggagtttgacctggagcggggctatgacaccctgactgtgggagatggcggccaggatggagaccagaagacagtgctgtacatcctgaccggcacctctgtgcctgacctgattgtgtccaccaaccaccagatgtggctgctcttccagacagatggcagcggcagcagcctgggcttcaaggccagctatgaggagattgagcagggcagctgtggggaccccggcatcccagcctatggaagaagagagggcagccgcttccaccacggggacaccctgaagtttgagtgccagcctgcctttgagctggtgggccagaaggccatcacctgccagaagaacaaccagtggagcgccaagaagccaggctgtgtgttcagctgcttcttcaacttcaccagccccagcggcgtggtgctgagccccaactacccagaggactatggcaaccacctgcactgtgtgtggctgatcctggcccggcctgagagccgcatccacctggccttcaatgacattgatgtggagccccagtttgacttcctggtgatcaaggatggagccacagctgaggcccctgtgctgggcaccttcagcggcaaccagctgcccagcagcatcaccagcagcggccacgtggcccggctggagttccagacagaccacagcacaggcaagaggggcttcaacatcaccttcaccaccttccgccacaatgaatgtcctgaccccggggtgcctgtgaatggcaagagatttggagacagcctgcagctgggcagcagcatctccttcctgtgtgatgagggcttcctgggcacccagggcagcgagaccatcacctgtgtgctgaaggagggctctgtggtgtggaacagcgctgtgctgcgctgtgaggccccctgtggcggccacctgaccagccccagcggcaccatcctgagccctggctggccaggcttctacaaggatgccctgagctgtgcctgggtgattgaggcccagcccggctaccccatcaagatcacctttgaccgcttcaagacagaggtgaactatgacaccctggaggtgagagatggccgcacctacagcgcccccctgattggagtgtaccacggcacccaggtgccccagttcctgatcagcaccagcaactacctgtacctgctcttcagcacagacaagagccacagcgacatcggcttccagctgcgctatgagaccatcaccctgcagagcgaccactgcctggaccccggcatccctgtgaatggccagagacatggaaatgacttctacgtgggcgccctggtgaccttcagctgtgacagcggctacaccctgagtgatggagagcccctggagtgtgagcccaacttccagtggagccgggccctgcccagctgtgaggccctgtgtggcggcttcatccagggcagcagcggcaccatcctgagccctggcttcccagacttctaccccaacaacctgaactgcacctggatcatcgagaccagccacggcaagggcgtcttcttcaccttccacaccttccacctggagagcggccatgactacctgctgatcacagaaaatggcagcttcacccagcccctgcggcagctgaccggcagccggctgcctgcccccatctctgctggcctgtatggcaacttcaccgcccaggtgcgcttcatcagtgacttctccatgtcctatgagggcttcaacatcaccttctctgaatatgacctggagccctgtgaggagcctgaggtgcctgcctacagcatcaggaagggcctgcagtttggagtgggggacaccctgaccttcagctgcttccctggctaccgcctggagggcacagcccgcatcacctgcctgggcggcagaagaaggctgtggagcagccccctgccccgctgtgtggctgaatgtggcaacagcgtgacaggcacccagggcaccctgctgagccccaacttccctgtgaactacaacaacaaccacgagtgcatctacagcatccagacccagcccgggaagggcatccagctgaaggcccgggcctttgagctgtctgaaggagatgtgctgaaggtgtatgatggcaacaacaacagcgcccggctgctgggcgtcttcagccacagcgagatgatgggcgtgaccctgaacagcaccagcagcagcctgtggctggacttcatcacagatgctgagaacaccagcaaaggatttgagctgcacttcagcagctttgagctgatcaagtgtgaggaccccggcacccccaagtttggctacaaggtgcatgatgagggccactttgctggcagctctgtgtccttcagctgtgaccccggctacagcctgcggggcagcgaggagctgctgtgcctgagcggggagaggaggacctgggaccggcccctgcccacctgtgtggccgagtgtggcggcaccgtgcggggggaggtgtctggccaggtgctgagccctggctacccagccccctatgagcacaacctgaactgcatctggaccatcgaggccgaggccggctgcaccatcggcctgcacttcctggtgtttgacacagaggaggtgcatgatgtgctgcgcatctgggatggccctgtggagagcggcgtgctgctgaaggagctgagcggccctgccctgcccaaggacctgcacagcaccttcaacagcgtggtgctgcagttcagcacagacttcttcaccagcaagcagggctttgccatccagttctctgtgtccacagccaccagctgcaatgaccccggcatcccccagaatggcagccgcagcggggacagctgggaggccggggacagcacagtgttccagtgtgaccccggctacgccctgcagggcagcgctgagatcagctgtgtgaagattgaaaatcgcttcttctggcagcccagcccccccacctgcatcgccccctgtggcggggacctgaccggccccagcggggtcatcctgagccccaactacccagagccctacccacctgggaaggaatgtgactggaaggtgacagtgtccccagactatgtgattgccctggtgttcaacatcttcaacctggagcccggctatgacttcctgcacatctatgatggccgggacagcctgagccccctcatcggcagcttctacggcagccagctgcccggccgcatcgagagcagcagcaacagcctcttcctggccttcagaagtgatgcctctgtgtccaatgccggcttcgtcatcgactacacagagaacccccgggagagctgctttgatcctggcagcatcaagaatggcaccagggtgggcagtgacctgaagctgggcagctctgtgacctactactgccacggcggctatgaggtggagggcaccagcaccctgagctgcatcctgggcccagatggcaagcctgtgtggaacaaccccaggcctgtgtgcacagccccctgtggcggccagtatgtgggcagtgatggagtggtgctgagccccaactacccccagaactacaccagcggccagatctgcctgtactttgtgacagtgcccaaggactatgtggtgtttggccagtttgccttcttccacacagccctgaatgatgtggtggaggtgcatgatggccacagccagcacagccggctgctgagcagcctgagcggcagccacactggagagagcctgcccctggccaccagcaaccaggtgctgatcaagttcagcgccaagggcctggccccagcccggggcttccactttgtgtaccaggccgtgcccaggaccagcgccacccagtgcagctctgtgcctgagcccaggtatggcaagaggctgggcagtgacttctctgtgggcgccatcgtgcgctttgagtgcaacagcggctacgccctgcagggcagccctgagattgagtgcctgcctgtgcctggggccctggcccagtggaatgtgtctgcccccacctgtgtggtgccctgtggcggcaacctgacagaaagaagaggcaccatcctgagccctggcttccctgagccctacctgaacagcctgaactgtgtgtggaagatcgtggtgcctgagggcgccggcatccagatccaggtggtgtcctttgtgacagagcagaactgggacagcctggaggtgtttgatggagctgacaacacagtgaccatgctgggcagcttcagcggcaccaccgtgcctgccctgctgaacagcaccagcaaccagctgtacctgcacttctacagcgacatctctgtgtctgctgctggcttccacctggagtacaagacagtgggcctgagcagctgcccagagcctgctgtgcccagcaatggagtgaagacaggagagcgctacctggtgaatgatgtggtgtccttccagtgtgagcccggctacgccctgcagggccacgcccacatcagctgcatgcctggcaccgtgcggcgctggaactaccccccacccctgtgcatcgcccagtgtggcggcaccgtggaggagatggagggcgtcatcctgagccctggcttccctggcaactaccccagcaacatggactgctcctggaagatcgccctgcctgtgggctttggagcccacatccagttcctgaacttcagcacagagcccaaccacgactacatcgagatcagaaatggcccctatgagaccagcaggatgatgggccgcttcagcggcagcgagctgcccagcagcctgctgagcaccagccatgagaccaccgtgtacttccacagcgaccacagccagaacagacctggcttcaagctggagtaccaggacctgacctacagccaccagatcagcagcttcctgcggggctttgacctgtctgagctggagaggaccaacagcaccccacctgtggccgccagctatgtgtgggacctggaccccggctgtgaggcctatgagctgcaggagtgcccagaccctgagccctttgccaatggaattgtgagaggagctggctacaacgtgggccagagcgtgacctttgagtgcctgcccggctaccagctgaccggccaccctgtgctgacctgccagcacggcaccaacagaaactgggaccaccccctgcccaagtgtgaggtgccctgtggcggcaacatcaccagcagcaatggcaccgtgtacagccctggcttccccagcccctacagcagcagccaggactgtgtgtggctgatcaccgtgcccatcggccacggcgtgcggctgaacctgagcctgctgcagacagagcccagcggggacttcatcaccatctgggatggcccccagcagacagccccccggctgggcgtcttcaccaggtccatggccaagaagacagtgcagagcagcagcaaccaggtgctgctgaagttccacagagatgctgccaccggcggcatctttgccatcgccttcagcgcctaccccctgaccaagtgccccccacccaccatcctgcccaatgctgaggtggtgacagaaaatgaggagttcaacatcggggacatcgtgcgctaccgctgcctgcccggcttcaccctggtgggcaatgagatcctgacctgcaagctgggcacctacctgcagtttgagggccccccacccatctgtgaggtgcactgccccaccaatgagctgctgacagacagcactggagtcatcctgagccagagctacccaggcagctacccccagttccagacctgctcctggctggtgcgggtggagccagactacaacatcagcctgactgtggagtacttcctgtctgagaagcagtatgatgaatttgagatctttgatggccccagcggccagagccccctgctgaaggccctgagcggcaactacagcgcccccctcatcgtgaccagcagcagcaacagcgtgtacctgcgctggagcagtgaccacgcctacaacaggaagggcttcaagatccgctacagcgccccctactgcagcctgccccgggcccccctgcacggcttcatcctgggccagaccagcacccagcccggcggcagcatccacttcggctgcaatgccggctaccgcctggtgggccacagcatggccatctgcaccaggcacccccagggctaccacctgtggagcgaggccatccccctgtgccaggccctgagctgtggcctgcctgaggcccccaagaatggcatggtgtttgggaaggagtacacagtgggcaccaaggccatgtacagctgcagcgagggctaccacctgcaggccggggctgaggccacagctgagtgcctggacaccggcctgtggagcaacagaaatgtgcccccccagtgtgtgcctgtgacctgcccagatgtgagcagcatctctgtggagcacggccgctggaggctcatctttgagacccagtaccagttccaggcccagctgatgctgatctgtgaccccggctactactacacaggccagagggtcatccgctgccaggccaacgggaagtggagcctgggggacagcacccccacctgccgcatcatcagctgtggggagctgcccatcccccccaacggccaccgcatcggcaccctgtctgtgtatggagccacagccatcttcagctgcaacagcggctacaccctggtgggcagccgggtgcgggagtgcatggccaacggcctgtggagcggcagcgaggtgcgctgcctggccggccactgcggcaccccagagcccatcgtgaatggccacatcaacggggagaactacagctaccggggctctgtggtgtaccagtgcaatgccggcttccggctgattggcatgtctgtgcgcatctgccagcaggaccaccactggagcggcaagacccccttctgtgtgctggtgtcctgtggccaccctggcagccccccccacagccagatgtctggggacagctacacagtgggcgctgtggtgcgctacagctgcatcggcaagaggaccctggtgggcaacagcaccaggatgtgtggcctggatggccactggacaggcagcctgccccactgcagcggcacctctgtgggcgtgtgtggggaccccggcatcccagcccacggcatccggctgggggacagctttgatcctggcaccgtgatgaggttcagctgtgaggccggccacgtgctgcggggcagcagcgagaggacctgccaggccaacggctcctggagcggcagccagccagaatgtggggtcatcagctgtggcaaccctggcacccccagcaatgcccgggtggtgttcagtgatggcctggtgttcagcagcagcatcgtgtatgaatgtcgggagggctactatgccaccggcctgctgagccgccactgcagcgtgaatggcacctggacaggcagtgaccctgagtgcctggtgatcaactgtggggaccccggcatcccagccaacggcctgcggctgggcaatgacttccgctacaacaagacagtgacctaccagtgtgtgcccggctacatgatggagagccaccgggtgtctgtgctgagctgcaccaaggacaggacctggaatggcaccaagcctgtgtgcaaggccctgatgtgcaagcccccacccctcatccccaacgggaaggtggtgggcagtgacttcatgtggggcagctctgtgacctacgcctgcctggagggctaccagctgagcctgcctgctgtgttcacctgtgagggcaatggctcctggacaggagagctgccccagtgcttccctgtgttctgtggggaccccggggtgcccagccggggccggcgggaggaccggggcttctcctaccgcagctctgtgtccttcagctgccacccccccctggtgctggtgggcagcccccggcgcttctgccagagtgatggcacctggagcggcacccagcccagctgcatcgaccccaccctgaccacctgtgccgaccccggggtgccccagtttggcatccagaacaacagccagggctaccaggtgggcagcacagtgctcttccgctgccagaagggctacctgctgcagggcagcaccaccaggacctgcctgcccaacctgacctggagcggcaccccaccagactgtgtgccccaccactgccggcagcctgagacccccacccacgccaacgtgggcgccctggacctgcccagcatgggctacaccctcatctacagctgccaggagggcttcagcctgaagggcggcagcgagcacaggacctgcaaggcagatggctcctggacaggcaagccacccatctgcctggaggtgcggcccagcggccggcccatcaacacagcccgggagccccccctgacccaggccctgatccctggagatgtgtttgccaagaacagcctgtggaagggggcctatgagtaccagggcaagaagcagcctgccatgctgcgggtgacaggcttccaggtggccaacagcaaggtgaatgccaccatgattgaccacagcggcgtggagctgcacctggccggcacctacaagaaggaggacttccacctgctgctgcaggtgtaccagatcactggacctgtggagatcttcatgaacaagttcaaggatgaccactgggccctggatggccacgtgagcagcgagagcagcggggccaccttcatctaccagggctctgtgaagggccagggcttcggccagtttggcttccagaggctggacctgcggctgctggagagtgaccctgagagcatcggccgccactttgccagcaacagcagctctgtggccgccgccatcctggtgcccttcatcgccctgatcatcgccggctttgtgctgtacctgtacaagcacagaagaagacccaaggtgcccttcaacggctacgccggccacgagaacaccaacgtgcgggccacctttgagaaccccatgtatgacaggaacatccagcccacagacatcatggccagcgaggccgagttcaccgtgtccacagtgtgcacagctgtgtag

SEQ ID NO: 148710 - DNA, 678 bp, synthetic construct
  misc_feature 1..678: note = Description of Artificial Sequence: Synthetic coding sequence
  source 1..678: mol_type = other DNA
atgtgtgatgcccacctgcggggccccagcggcatcatcaccagccccaacttccccatccagtatgacaacaatgcccactgtgtgtggatcatcacagccctgaaccccagcaaggccggcggggaccccggcaacatccagtgcaacaaggagggcctgtctgtggagacccagagcctgcggctgaggaacagaagctgcctgctgggcaacagcaaggacaatggctgctgcgtgcccaaccctgtgcatggaacaggcctgcaggtgatcaagctggcctttgaggagtttgacctggagcggggctatgacaccctgactgtgggagatggcggccaggatggagaccagaagacagtgctgtacatcctgaccggcacctctgtgcctgacctgattgtgtccaccaaccaccagatgtggctgctcttccagacagatggcagcggcagcagcctgggcttcaaggccagctatgaggagattgagcagggcagctgtggggaccccggcatcccagcctatggaagaagagagggcagccgcttccaccacggggacaccctgaagtttgagtgccagcctgcctttgagctggtgggccagaaggccatcacctgccagaagaacaaccagtggagcgccaagaagccaggctgtgtgtgcaagtag

SEQ ID NO: 148711 - DNA, 1281 bp, synthetic construct
  misc_feature 1..1281: note = Description of Artificial Sequence: Synthetic coding sequence
  source 1..1281: mol_type = other DNA
atgctgggcagcttcagcggcaccaccgtgcctgccctgctgaacagcaccagcaaccagctgtacctgcacttctacagcgacatctctgtgtctgctgctggcttccacctggagtacaagacagtgggcctgagcagctgcccagagcctgctgtgcccagcaatggagtgaagacaggagagcgctacctggtgaatgatgtggtgtccttccagtgtgagcccggctacgccctgcagggccacgcccacatcagctgcatgcctggcaccgtgcggcgctggaactaccccccacccctgtgcatcgcccagtgtggcggcaccgtggaggagatggagggcgtcatcctgagccctggcttccctggcaactaccccagcaacatggactgctcctggaagatcgccctgcctgtgggctttggagcccacatccagttcctgaacttcagcacagagcccaaccacgactacatcgagatcagaaatggcccctatgagaccagcaggatgatgggccgcttcagcggcagcgagctgcccagcagcctgctgagcaccagccatgagaccaccgtgtacttccacagcgaccacagccagaaccggcccggcttcaagctggagtaccaggcctatgagctgcaggagtgcccagaccctgagccctttgccaacggcatcgtgcggggggccggctacaacgtgggccagagcgtgacctttgaatgtctgcccggctaccagctgaccggccaccctgtgctgacctgccagcacggcaccaacagaaactgggaccaccccctgcccaagtgtgaggtgccctgtggcggcaacatcaccagcagcaatggaacagtgtacagccctggcttccccagcccctacagcagcagccaggactgtgtgtggctgatcaccgtgcccatcggccatggagtgcggctgaacctgagcctgctgcagacagagcccagcggggacttcatcaccatctgggatggcccccagcagacagccccccggctgggcgtcttcaccaggtccatggccaagaagacagtgcagagcagcagcaaccaggtgctgctgaagttccacagagatgctgccactggaggcatctttgccatcgccttcagtgaccactgccgctacttcaaccagaagagcggcaagctggacttcacccccagcagcaccctgggccagctgtgcaagaccctgcacaggagcctgccccacctgcggctgcagttcctgcacctgtag

SEQ ID NO: 148712 - DNA, 3504 bp, synthetic construct
  misc_feature 1..3504: note = Description of Artificial Sequence: Synthetic coding sequence
  source 1..3504: mol_type = other DNA
atggtgattgtcatcctcttcccagcagaatgtggcaacagcgtgacaggcacccagggcaccctgctgagccccaacttccctgtgaactacaacaacaaccacgagtgcatctacagcatccagacccagcccgggaagggcatccagctgaaggcccgggcctttgagctgtctgaaggagatgtgctgaaggtgtatgatggcaacaacaacagcgcccggctgctgggcgtcttcagccacagcgagatgatgggcgtgaccctgaacagcaccagcagcagcctgtggctggacttcatcacagatgctgagaacaccagcaagggctttgagctgcacttcagcagctttgagctgatcaagtgtgaagatcctggcacccccaagtttggctacaaggtgcatgatgagggccactttgctggcagctctgtgtccttcagctgtgaccccggctacagcctgcggggcagcgaggagctgctgtgcctgtctggagagaggaggacctgggaccggcccctgcccacctgtgtggctgaatgtggcggcaccgtgcggggggaggtgtctggccaggtgctgagccctggctacccagccccctatgagcacaacctgaactgcatctggaccattgaagctgaggccggctgcaccatcggcctgcacttcctggtgtttgacacagaggaggtgcatgatgtgctgcgcatctgggatggccctgtggagagcggcgtgctgctgaaggagctgagcggccctgccctgcccaaggacctgcacagcaccttcaacagcgtggtgctgcagttcagcacagacttcttcaccagcaagcagggctttgccatccagttctctgtgtccacagccaccagctgcaatgaccccggcatcccccagaatggcagccgcagcggggacagctgggaggccggggacagcaccgtcttccagtgtgaccccggctacgccctgcagggcagcgctgagatcagctgtgtgaagattgagaaccgcttcttctggcagcccagcccccccacctgcatcgccccctgtggcggggacctgaccggccccagcggggtcatcctgagccccaactacccagagccctacccacctgggaaggaatgtgactggaaggtgacagtgtccccagactatgtgattgccctggtgttcaacatcttcaacctggagcccggctatgacttcctgcacatctatgatggccgggacagcctgagccccctgattggcagcttctacggcagccagctgcccggcagaattgagagcagcagcaacagcctcttcctggccttcagaagtgatgcctctgtgtccaatgccggctttgtgattgactacacagagaacccccgggagagctgctttgaccccggcagcatcaagaatggcaccagggtgggcagtgacctgaagctgggcagctctgtgacctactactgccacggcggctatgaggtggagggcaccagcaccctgagctgcatcctgggcccagatggcaagcctgtgtggaacaaccccaggcctgtgtgcacagccccctgtggcggccagtatgtgggcagtgatggagtggtgctgagccccaactacccccagaactacaccagcggccagatctgcctgtactttgtgacagtgcccaaggactatgtggtgtttggccagtttgccttcttccacacagccctgaatgatgtggtggaggtgcatgatggccacagccagcacagccggctgctgagcagcctgagcggcagccacactggagagagcctgcccctggccaccagcaaccaggtgctgatcaagttcagcgccaagggcctggccccagcccggggcttccactttgtgtaccaggccgtgcccaggaccagcgccacccagtgcagctctgtgcctgagcccaggtatggcaagaggctgggcagtgacttctctgtgggcgccatcgtgcgctttgagtgcaacagcggctacgccctgcagggcagccctgagattgaatgtctgcctgtgcctggggccctggcccagtggaatgtgtctgcccccacctgtgtggtgccctgtggcggcaacctgacagagcggcggggcaccatcctgagccctggcttccctgagccctacctgaacagcctgaactgtgtgtggaagatcgtggtgcctgagggcgccggcatccagatccaggtggtgtcctttgtgacagagcagaactgggacagcctggaggtgtttgatggagctgacaacacagtgaccatgctgggcagcttcagcggcaccaccgtgcctgccctgctgaacagcaccagcaaccagctgtacctgcacttctacagcgacatctctgtgtctgctgctggcttccacctggagtacaagacagtgggcctgagcagctgcccagagcctgctgtgcccagcaatggagtgaagacaggagagcgctacctggtgaatgatgtggtgtccttccagtgtgagcccggctacgccctgcagggccacgcccacatcagctgcatgcctggcaccgtgcggcgctggaactaccccccacccctgtgcatcgcccagtgtggcggcaccgtggaggagatggagggcgtcatcctgagccctggcttccctggcaactaccccagcaacatggactgctcctggaagatcgccctgcctgtgggctttggagcccacatccagttcctgaacttcagcacagagcccaaccacgactacatcgagatcagaaatggcccctatgagaccagcaggatgatgggccgcttcagcggcagcgagctgcccagcagcctgctgagcaccagccatgagaccaccgtgtacttccacagcgaccacagccagaaccggcccggcttcaagctggagtaccaggcctatgagctgcaggagtgcccagaccctgagccctttgccaacggcatcgtgcggggggccggctacaacgtgggccagagcgtgacctttgaatgtctgcccggctaccagctgaccggccaccctgtgctgacctgccagcacggcaccaacagaaactgggaccaccccctgcccaagtgtgaggtgccctgtggcggcaacatcaccagcagcaatggaacagtgtacagccctggcttccccagcccctacagcagcagccaggactgtgtgtggctgatcaccgtgcccatcggccatggagtgcggctgaacctgagcctgctgcagacagagcccagcggggacttcatcaccatctgggatggcccccagcagacagccccccggctgggcgtcttcaccaggtccatggccaagaagacagtgcagagcagcagcaaccaggtgctgctgaagttccacagagatgctgccactggaggcatctttgccatcgccttcagcggccacctggccgctgtgtgcaccctgtag

SEQ ID NO: 148713 - DNA, 10896 bp, synthetic construct
  misc_feature 1..10896: note = Description of Artificial Sequence: Synthetic coding sequence
  source 1..10896: mol_type = other DNA
atgcccaggagccggggccgggagctgggccgctgtggctgcccagctggccgggcccggggggagaccggcatcagcgccctggtgcctggggccggcagccgctggggccggcccccaccacccaccccaccacccctgctgctgctgctgggctgcggcctgctgtctgtgtctgctgctgctggccagaactgcaccttccagctgcacggccccaacggcaccgtggagagccctggcttcccctacggctaccccaactatgccaactgcacctggaccatcacagctgaggagcagcaccgcatccagctggtgttccagagctttgccctggaggaggactttgatgtgctgtctgtgtttgatggccccccccagcctgagaacctgcggacccggctgaccggcttccagctgcctgccaccatcgtgtctgctgccaccaccctgagcctgcggctcatcagtgactatgctgtgtctgcccagggcttccacgccacctatgaggtgctgcccagccacacctgtggcaaccctggccgcctgcccaacggcatccagcagggcagcaccttcaacctgggggacaaggtgcgctacagctgcaacctgggcttcttcctggagggccatgctgtgctgacctgccacgccggcagcgagaacagcgccacctgggacttccccctgcccagctgcagagcagatgatgcctgtggcggcaccctgcggggccagagcggcatcatcagcagcccccacttccccagcgagtaccacaacaatgctgactgcacctggaccatcctggccgagctgggggacaccatcgccctggtgttcatcgacttccagctggaggatggctatgacttcctggaggtgactggaacagagggcagcagcctgtggttcaccggggccagcctgcctgcccctgtgatcagcagcaagaactggctgcggctgcacttcaccagtgatggcaaccaccggcagaggggcttcagcgcccagtaccaggtgaagaagcagatcgagctgaagagcagaggagtgaagctgatgcccagcaaggacaacagccagaagacctctgtgctgacccaggtgggcgtgtcccagggccacaacatgtgcccagaccccggcatccctgagcggggcaagaggctgggcagtgacttccggctgggcagctctgtgcagttcacctgcaatgaaggctatgacctgcagggcagcaagaggatcacctgcatgaaggtgtctgacatgtttgctgcctggagcgaccacaggcctgtgtgccgggccaggatgtgtgatgcccacctgcggggccccagcggcatcatcaccagccccaacttccccatccagtatgacaacaatgcccactgtgtgtggatcatcacagccctgaaccccagcaaggtgatcaagctggcctttgaggagtttgacctggagcggggctatgacaccctgactgtgggagatggcggccaggatggagaccagaagacagtgctgtacatcctgaccggcacctctgtgcctgacctgattgtgtccaccaaccaccagatgtggctgctcttccagacagatggcagcggcagcagcctgggcttcaaggccagctatgaggagattgagcagggcagctgtggggaccccggcatcccagcctatggaagaagagagggcagccgcttccaccacggggacaccctgaagtttgagtgccagcctgcctttgagctggtgggccagaaggccatcacctgccagaagaacaaccagtggagcgccaagaagccaggctgtgtgttcagctgcttcttcaacttcaccagccccagcggcgtggtgctgagccccaactacccagaggactatggcaaccacctgcactgtgtgtggctgatcctggcccggcctgagagccgcatccacctggccttcaatgacattgatgtggagccccagtttgacttcctggtgatcaaggatggagccacagctgaggcccctgtgctgggcaccttcagcggcaaccagctgcccagcagcatcaccagcagcggccacgtggcccggctggagttccagacagaccacagcacaggcaagaggggcttcaacatcaccttcaccaccttccgccacaatgaatgtcctgaccccggggtgcctgtgaatggcaagagatttggagacagcctgcagctgggcagcagcatctccttcctgtgtgatgagggcttcctgggcacccagggcagcgagaccatcacctgtgtgctgaaggagggctctgtggtgtggaacagcgctgtgctgcgctgtgaggccccctgtggcggccacctgaccagccccagcggcaccatcctgagccctggctggccaggcttctacaaggatgccctgagctgtgcctgggtgattgaggcccagcccggctaccccatcaagatcacctttgaccgcttcaagacagaggtgaactatgacaccctggaggtgagagatggccgcacctacagcgcccccctgattggagtgtaccacggcacccaggtgccccagttcctgatcagcaccagcaactacctgtacctgctcttcagcacagacaagagccacagcgacatcggcttccagctgcgctatgagaccatcaccctgcagagcgaccactgcctggaccccggcatccctgtgaatggccagagacatggaaatgacttctacgtgggcgccctggtgaccttcagctgtgacagcggctacaccctgagtgatggagagcccctggagtgtgagcccaacttccagtggagccgggccctgcccagctgtgaggccctgtgtggcggcttcatccagggcagcagcggcaccatcctgagccctggcttcccagacttctaccccaacaacctgaactgcacctggatcatcgagaccagccacggcaagggcgtcttcttcaccttccacaccttccacctggagagcggccatgactacctgctgatcacagaaaatggcagcttcacccagcccctgcggcagctgaccggcagccggctgcctgcccccatctctgctggcctgtatggcaacttcaccgcccaggtgcgcttcatcagtgacttctccatgtcctatgagggcttcaacatcaccttctctgaatatgacctggagccctgtgaggagcctgaggtgcctgcctacagcatcaggaagggcctgcagtttggagtgggggacaccctgaccttcagctgcttccctggctaccgcctggagggcacagcccgcatcacctgcctgggcggcagaagaaggctgtggagcagccccctgccccgctgtgtggctgaatgtggcaacagcgtgacaggcacccagggcaccctgctgagccccaacttccctgtgaactacaacaacaaccacgagtgcatctacagcatccagacccagcccgggaagggcatccagctgaaggcccgggcctttgagctgtctgaaggagatgtgctgaaggtgtatgatggcaacaacaacagcgcccggctgctgggcgtcttcagccacagcgagatgatgggcgtgaccctgaacagcaccagcagcagcctgtggctggacttcatcacagatgctgagaacaccagcaaaggatttgagctgcacttcagcagctttgagctgatcaagtgtgaggaccccggcacccccaagtttggctacaaggtgcatgatgagggccactttgctggcagctctgtgtccttcagctgtgaccccggctacagcctgcggggcagcgaggagctgctgtgcctgagcggggagaggaggacctgggaccggcccctgcccacctgtgtggccgagtgtggcggcaccgtgcggggggaggtgtctggccaggtgctgagccctggctacccagccccctatgagcacaacctgaactgcatctggaccatcgaggccgaggccggctgcaccatcggcctgcacttcctggtgtttgacacagaggaggtgcatgatgtgctgcgcatctgggatggccctgtggagagcggcgtgctgctgaaggagctgagcggccctgccctgcccaaggacctgcacagcaccttcaacagcgtggtgctgcagttcagcacagacttcttcaccagcaagcagggctttgccatccagttctctgtgtccacagccaccagctgcaatgaccccggcatcccccagaatggcagccgcagcggggacagctgggaggccggggacagcacagtgttccagtgtgaccccggctacgccctgcagggcagcgctgagatcagctgtgtgaagattgaaaatcgcttcttctggcagcccagcccccccacctgcatcgccccctgtggcggggacctgaccggccccagcggggtcatcctgagccccaactacccagagccctacccacctgggaaggaatgtgactggaaggtgacagtgtccccagactatgtgattgccctggtgttcaacatcttcaacctggagcccggctatgacttcctgcacatctatgatggccgggacagcctgagccccctcatcggcagcttctacggcagccagctgcccggccgcatcgagagcagcagcaacagcctcttcctggccttcagaagtgatgcctctgtgtccaatgccggcttcgtcatcgactacacagagaacccccgggagagctgctttgatcctggcagcatcaagaatggcaccagggtgggcagtgacctgaagctgggcagctctgtgacctactactgccacggcggctatgaggtggagggcaccagcaccctgagctgcatcctgggcccagatggcaagcctgtgtggaacaaccccaggcctgtgtgcacagccccctgtggcggccagtatgtgggcagtgatggagtggtgctgagccccaactacccccagaactacaccagcggccagatctgcctgtactttgtgacagtgcccaaggactatgtggtgtttggccagtttgccttcttccacacagccctgaatgatgtggtggaggtgcatgatggccacagccagcacagccggctgctgagcagcctgagcggcagccacactggagagagcctgcccctggccaccagcaaccaggtgctgatcaagttcagcgccaagggcctggccccagcccggggcttccactttgtgtaccaggccgtgcccaggaccagcgccacccagtgcagctctgtgcctgagcccaggtatggcaagaggctgggcagtgacttctctgtgggcgccatcgtgcgctttgagtgcaacagcggctacgccctgcagggcagccctgagattgagtgcctgcctgtgcctggggccctggcccagtggaatgtgtctgcccccacctgtgtggtgccctgtggcggcaacctgacagaaagaagaggcaccatcctgagccctggcttccctgagccctacctgaacagcctgaactgtgtgtggaagatcgtggtgcctgagggcgccggcatccagatccaggtggtgtcctttgtgacagagcagaactgggacagcctggaggtgtttgatggagctgacaacacagtgaccatgctgggcagcttcagcggcaccaccgtgcctgccctgctgaacagcaccagcaaccagctgtacctgcacttctacagcgacatctctgtgtctgctgctggcttccacctggagtacaagacagtgggcctgagcagctgcccagagcctgctgtgcccagcaatggagtgaagacaggagagcgctacctggtgaatgatgtggtgtccttccagtgtgagcccggctacgccctgcagggccacgcccacatcagctgcatgcctggcaccgtgcggcgctggaactaccccccacccctgtgcatcgcccagtgtggcggcaccgtggaggagatggagggcgtcatcctgagccctggcttccctggcaactaccccagcaacatggactgctcctggaagatcgccctgcctgtgggctttggagcccacatccagttcctgaacttcagcacagagcccaaccacgactacatcgagatcagaaatggcccctatgagaccagcaggatgatgggccgcttcagcggcagcgagctgcccagcagcctgctgagcaccagccatgagaccaccgtgtacttccacagcgaccacagccagaacagacctggcttcaagctggagtaccaggcctatgagctgcaggagtgcccagaccctgagccctttgccaatggaattgtgagaggagctggctacaacgtgggccagagcgtgacctttgagtgcctgcccggctaccagctgaccggccaccctgtgctgacctgccagcacggcaccaacagaaactgggaccaccccctgcccaagtgtgaggtgccctgtggcggcaacatcaccagcagcaatggcaccgtgtacagccctggcttccccagcccctacagcagcagccaggactgtgtgtggctgatcaccgtgcccatcggccacggcgtgcggctgaacctgagcctgctgcagacagagcccagcggggacttcatcaccatctgggatggcccccagcagacagccccccggctgggcgtcttcaccaggtccatggccaagaagacagtgcagagcagcagcaaccaggtgctgctgaagttccacagagatgctgccaccggcggcatctttgccatcgccttcagcgcctaccccctgaccaagtgccccccacccaccatcctgcccaatgctgaggtggtgacagaaaatgaggagttcaacatcggggacatcgtgcgctaccgctgcctgcccggcttcaccctggtgggcaatgagatcctgacctgcaagctgggcacctacctgcagtttgagggccccccacccatctgtgaggtgcactgccccaccaatgagctgctgacagacagcactggagtcatcctgagccagagctacccaggcagctacccccagttccagacctgctcctggctggtgcgggtggagccagactacaacatcagcctgactgtggagtacttcctgtctgagaagcagtatgatgaatttgagatctttgatggccccagcggccagagccccctgctgaaggccctgagcggcaactacagcgcccccctcatcgtgaccagcagcagcaacagcgtgtacctgcgctggagcagtgaccacgcctacaacaggaagggcttcaagatccgctacagcgccccctactgcagcctgccccgggcccccctgcacggcttcatcctgggccagaccagcacccagcccggcggcagcatccacttcggctgcaatgccggctaccgcctggtgggccacagcatggccatctgcaccaggcacccccagggctaccacctgtggagcgaggccatccccctgtgccaggccctgagctgtggcctgcctgaggcccccaagaatggcatggtgtttgggaaggagtacacagtgggcaccaaggccatgtacagctgcagcgagggctaccacctgcaggccggggctgaggccacagctgagtgcctggacaccggcctgtggagcaacagaaatgtgcccccccagtgtgtgcctgtgacctgcccagatgtgagcagcatctctgtggagcacggccgctggaggctcatctttgagacccagtaccagttccaggcccagctgatgctgatctgtgaccccggctactactacacaggccagagggtcatccgctgccaggccaacgggaagtggagcctgggggacagcacccccacctgccgcatcatcagctgtggggagctgcccatcccccccaacggccaccgcatcggcaccctgtctgtgtatggagccacagccatcttcagctgcaacagcggctacaccctggtgggcagccgggtgcgggagtgcatggccaacggcctgtggagcggcagcgaggtgcgctgcctggccacccagaccaagctgcacagcatcttctacaagctgctgtttgatgtgctgagcagccccagcctgaccaaggccggccactgcggcaccccagagcccatcgtgaatggccacatcaatggagagaactacagctaccggggctctgtggtgtaccagtgcaatgccggcttccgcctcatcggcatgtctgtgcgcatctgccagcaggaccaccactggagcggcaagacccccttctgtgtgcccatcacctgtggccaccctggcaaccctgtgaatggcctgacccagggcaaccagttcaacctgaatgatgtggtgaagtttgtgtgcaaccctggctacatggccgagggcgccgcccggagccagtgcctggccagcggccagtggagcgacatgctgcccacctgccgcatcatcaactgcacagaccccggccaccaggagaacagcgtgcggcaggtgcacgccagcggcccccaccgcttctcctttggcaccaccgtgtcctaccgctgcaaccacggcttctacctgctgggcacccctgtgctgagctgccagggagatggcacctgggaccggccccggccccagtgcctgctggtgtcctgtggccaccctggcagccccccccacagccagatgtctggggacagctacacagtgggcgctgtggtgcgctacagctgcatcggcaagaggaccctggtgggcaacagcaccaggatgtgtggcctggatggccactggacaggcagcctgccccactgcagcggcacctctgtgggcgtgtgtggggaccccggcatcccagcccacggcatccggctgggggacagctttgatcctggcaccgtgatgaggttcagctgtgaggccggccacgtgctgcggggcagcagcgagaggacctgccaggccaacggctcctggagcggcagccagccagaatgtggggtcatcagctgtggcaaccctggcacccccagcaatgcccgggtggtgttcagtgatggcctggtgttcagcagcagcatcgtgtatgaatgtcgggagggctactatgccaccggcctgctgagccgccactgcagcgtgaatggcacctggacaggcagtgaccctgagtgcctggtgatcaactgtggggaccccggcatcccagccaacggcctgcggctgggcaatgacttccgctacaacaagacagtgacctaccagtgtgtgcccggctacatgatggagagccaccgggtgtctgtgctgagctgcaccaaggacaggacctggaatggcaccaagcctgtgtgcaaggccctgatgtgcaagcccccacccctcatccccaacgggaaggtggtgggcagtgacttcatgtggggcagctctgtgacctacgcctgcctggagggctaccagctgagcctgcctgctgtgttcacctgtgagggcaatggctcctggacaggagagctgccccagtgcttccctgtgttctgtggggaccccggggtgcccagccggggccggcgggaggaccggggcttctcctaccgcagctctgtgtccttcagctgccacccccccctggtgctggtgggcagcccccggcgcttctgccagagtgatggcacctggagcggcacccagcccagctgcatcgaccccaccctgaccacctgtgccgaccccggggtgccccagtttggcatccagaacaacagccagggctaccaggtgggcagcacagtgctcttccgctgccagaagggctacctgctgcagggcagcaccaccaggacctgcctgcccaacctgacctggagcggcaccccaccagactgtgtgccccaccactgccggcagcctgagacccccacccacgccaacgtgggcgccctggacctgcccagcatgggctacaccctcatctacagctgccaggagggcttcagcctgaagggcggcagcgagcacaggacctgcaaggcagatggctcctggacaggcaagccacccatctgcctggaggtgcggcccagcggccggcccatcaacacagcccgggagccccccctgacccaggccctgatccctggagatgtgtttgccaagaacagcctgtggaagggggcctatgagtaccagggcaagaagcagcctgccatgctgcgggtgacaggcttccaggtggccaacagcaaggtgaatgccaccatgattgaccacagcggcgtggagctgcacctggccggcacctacaagaaggaggacttccacctgctgctgcaggtgtaccagatcactggacctgtggagatcttcatgaacaagttcaaggatgaccactgggccctggatggccacgtgagcagcgagagcagcggggccaccttcatctaccagggctctgtgaagggccagggcttcggccagtttggcttccagaggctggacctgcggctgctggagagtgaccctgagagcatcggccgccactttgccagcaacagcagctctgtggccgccgccatcctggtgcccttcatcgccctgatcatcgccggctttgtgctgtacctgtacaagcacagaagaagacccaaggtgcccttcaacggctacgccggccacgagaacaccaacgtgcgggccacctttgagaaccccatgtatgacaggaacatccagcccacagacatcatggccagcgaggccgagttcaccgtgtccacagtgtgcacagctgtgtag

SEQ ID NO: 148714 - DNA, 1281 bp, synthetic construct; identical to SEQ ID NO: 148711
  misc_feature 1..1281: note = Description of Artificial Sequence: Synthetic coding sequence
  source 1..1281: mol_type = other DNA

SEQ ID NO: 148715 - DNA, 11124 bp, synthetic construct
  misc_feature 1..11124: note = Description of Artificial Sequence: Synthetic coding sequence
  source 1..11124: mol_type = other DNA
atgaagggcatcaggaagggggagagccgggccaaggagagcaagccctgggagcccgggaagaggcgctgtgccaagtgtggccgcctggacttcatcctgatgaagaagatgggcatcaagagcggcttcaccttctggaacctggtgttcctgctgactgtgtcctgtgtgaagggcttcatctacacctgtggcggcaccctgaagggcctgaatggcaccatcgagagccctggcttcccctacggctacccaaatggagccaactgcacctgggtgatcatcgccgaggagaggaaccgcatccagatcgtgttccagagctttgccctggaggaggagtatgactacctgagcctgtatgatggccacccccaccccaccaacttccgcacccggctgaccggcttccacctgcccccacctgtgaccagcaccaagtctgtgttcagcctgcggctgaccagtgactttgctgtgtctgcccacggcttcaaggtgtactatgaggagctgcagagcagcagctgtggcaaccctggggtgccccccaagggcgtgctgtatggcaccaggtttgatgtgggggacaagatccgctacagctgtgtgacaggctacatcctggatggccacccccagctgacctgcatcgccaacagcgtgaacacagcctcctgggacttccctgtgcccatctgcagagcagaagatgcctgtggcggcaccatgaggggcagcagcggcatcatcagcagccccagcttccccaatgagtaccacaacaatgctgactgcacctggaccatcgtggccgagcccggggacaccatcagcctcatcttcacagacttccagatggaggagaagtatgactacctggagattgagggcagcgagccccccaccatctggctgagcggcatgaacatccccccacccatcatcagcaacaagaactggctgcggctgcactttgtgacagacagcaaccaccgctaccggggcttcagcgccccctaccagggcagcagcaccctgacccacaccaccagcactggagagctggaggagcacaacagaaccaccactggagccatcgctgtggccagcaccccagcagatgtgacagtgtcctctgtgacagctgtgaccatccaccggctgtctgaggagcagagggtgcaggtgaccagcctgaggaacagcggcctggaccccaacaccagcaaggatggcctgagcccccaccctgctgacacccagagcaccaggagaagacccaggcatgctgagcagattgaaagaaccaaggagctggccgtggtgacccaccgggtgaagaaggccatcgacttcaagagccggggcttcaagctgtttcctgggaaggacaacagcaacaagttcagcatcctgaatgaaggaggcatcaagacagccagcaacctgtgcccagaccctggagagccagaaaatggcaagagaattggaagtgacttcagcctgggcagcacagtgcagttcagctgtgatgaggactatgtgctgcagggcgccaagagcatcacctgccagagaattgctgaggtgtttgctgcctggagcgaccacaggcctgtgtgcaaggtgaagacctgtggcagcaacctgcagggccccagcggcaccttcaccagccccaacttccccttccagtatgacagcaatgcccagtgtgtgtgggtgatcacagctgtgaacaccaacaaggtgatccagatcaactttgaggagtttgacctggagatcggctatgacaccctgaccatcggagatggaggagaggtgggggaccccaggacagtgctgcaggtgctgaccggcagctttgtgcctgacctgattgtgtccatgagcagccagatgtggctgcacctgcagacagatgagagcgtgggctctgtgggcttcaaggtgaactacaaggagattgagaaggagagctgtggggaccccggcacccccctgtatggcatccgggagggagatggcttcagcaacagagatgtgctgcgctttgagtgccagtttggatttgagctgattggagagaagagcatcgtgtgccaggagaacaaccagtggagcgccaacatccccatctgcatcttcccctgcctgagcaacttcaccgcccccatgggcaccgtgctgagcccagactacccagagggctacggcaacaacctgaactgcatctggaccatcatcagtgaccccggcagccgcatccacctgtccttcaatgactttgacctggagagccagtttgacttcctggccgtgaaggatggagacagccctgagagccccatcctgggcaccttcaccggggctgaggtgcccagccacctgaccagcaacagccacatcctgcggctggagttccaggccgaccacagcatgagcggccggggcttcaacatcacctacaacaccttcggccacaatgaatgtcctgaccccggcatccccatcaatgccaggagatttggagacaacttccagctgggcagcagcatcagcgtcatctgtgaggagggcttcatcaagacccagggcacagagaccatcacctgcatcctgatggatggcaaggtgatgtggagcggcctcatccccaagtgtggggccccctgtggcggccacttcagcgcccccagcggggtcatcctgagccctggctggccaggctactacaaggacagcctgaactgtgagtgggtgattgaagctgagcccggccacagcatcaagatcacctttgagcgcttccagacagagctgaactatgatgtgctggaggtgcatgatggccccaacctgctgagccccctgctgggcagctacaacggcacccaggtgccccagttcctgttcagcagcagcaacttcatctacctgctcttcaccacagacaacagccgcagcaacaacggcttcaagatccactatgagagcgtgacagtgaacacctacagctgcctggaccccggcatccctgtgcacggccgccgctatggccatgacttcagcatcggcagcacagtgtccttcagctgtgacagcggctaccgcctgagccatgaggagcccctgctgtgtgagaagaaccactggtggagccaccccctgcccacctgtgatgccctgtgtggaggagatgtgcggggccccagcggcaccatcctgagccctggctacccagagttctaccccaacagcctgaactgcacctggacagtggatgtgacccatggaaaaggagtgcagttcaacttccacaccttccacctggaggaccaccacgactacctgctgatcacagaaaatggcagcttcacccagcccctggcccggctgactggaagtgacctgccccccaccatcaatgccggcctgtatggcaacttccgggcccagctgcgcttcatcagtgacttcagcatctcctatgagggcttcaacatcaccttcagcgagtacaacctggagccctgtgaagatcctggcatcccccagtatggcagccgcatcggcttcaactttggcatcggggacaccctgaccttcagctgcagcagcggctaccgcctggagggcaccagcgagatcatctgcctgggcggcggcagaagagtgtggagcgcccccctgccccgctgtgtggccgagtgtggggccagcgccaccaacaatgaaggcatcctgctgagccccaactaccccctgaactatgagaacaaccacgagtgcatctacagcatccaggtgcaggccggcaagggcatcaacatcagcgcccggaccttccacctggcccagggagatgtgctgaagatctatgatggcaaggacaagaccacccacctgctgggcgccttcaccggggcctccatgaggggcctgaccctgagcagcaccagcaaccagctgtggctggagttcaacagcgacacagagggcacagatgagggcttccagctggtgtacaccagctttgagctgagccactgtgaagatcctggcatcccccagtttggctacaagatcagtgaccagggccactttgctggcagcaccatcatctacggctgcaaccctggctacaccctgcacggcagcagcctgctgaagtgcatgactggagagcggcgggcctgggactaccccctgcccagctgcatcgcagaatgtggcggccgcttcaagggggagagcagcggccgcatcctgagccctggctaccccttcccctatgacaacaacctgcgctgcatgtggatgattgaggtggaccccggcaacatcgtgtccctgcagttcctggcctttgacacagaggccagccatgacatcctgcgggtgtgggatggccccccagaaaatgacatgctgctgaaggagatcagcggcagcctcatccctgagggcatccacagcaccctgaacatcgtgaccatccagtttgacacagacttctacatcagcaagagcggctttgccatccagttcagcagctctgtggccacagcctgccgggaccccggggtgcccatgaatggcaccagaaatggagatggccgggagcccggggacacagtggtgttccagtgtgaccccggctatgagctgcagggcgaggagcgcatcacctgcatccaggtggagaaccgctacttctggcagcccagcccccctgtgtgcatcgccccctgtggcggcaacctgaccggcagcagcggcttcatcctgagccccaacttcccccacccctacccccacagccgggactgtgactggaccatcaccgtgaatgctgactatgtgatcagcctggccttcatctccttcagcattgagcccaactatgacttcctgtacatctatgatggccctgacagcaacagccccctgattggcagcttccaggacagcaagctgcctgagagaattgagagcagcagcaacaccatgcacctggccttcagaagtgatggctctgtgtcctacacaggcttccacctggagtacaaggccaagctgcgggagagctgctttgaccccggcaacatcatgaatggcacccggctgggcatggactacaagctgggcagcacagtgacctactactgtgatgctggctacgtgctgcagggctacagcaccctgacctgcatcatgggagatgatggccggcccggctggaacagagccctgcccagctgccacgccccctgtggcagccgcagcactggaagtgagggcaccgtgctgagccccaactaccccaagaactacagcgtgggccacaactgtgtgtacagcattgctgtgcccaaggagtttgtggtgtttggccagtttgtgttcttccagaccagcctgcatgatgtggtggaggtgtatgatggccccacccagcagagcagcctgctgagcagcctgagcggcagccacagcggggagagcctgcccctgagcagcggcaaccagatcaccatccgcttcacctctgtgggccccatcacagccaagggcttccactttgtgtaccaggccgtgcccaggaccagcagcacccagtgcagctctgtgcctgagccccgcttcggcagaagaattggaaatgaatttgctgtgggcagctctgtgctgtttgactgcaaccctggctacatcctgcacggcagcatcgccatccgctgtgagaccgtgcccaacagcctggcccagtggaatgacagcctgcccacctgcatcgtgccctgtggcggcatcctgaccaagaggaagggcaccatcctgagccctggctacccagagccctatgacaacaacctgaactgtgtgtggaagatcaccgtgcctgagggcgccggcatccaggtgcaggtggtgtcctttgccacagagcacaactgggacagcctggacttctatgatggaggagacaacaatgccccccggctgggcagctacagcggcaccaccatcccccacctgctgaacagcaccagcaacaacctgtacctgaacttccagagcgacatctctgtgtctgctgctggcttccacctggagtacacagccatcggcctggacagctgcccagagccccagacccccagcagcggcatcaagatcggggaccgctacatggtgggagatgtggtgtccttccagtgtgaccagggctacagcctgcagggccacagccacatcacctgcatgcctggccctgtgcggcgctggaactaccccatccccatctgcctggcccagtgtggcggggccatgtctgacttctctggagtcatcctgagccctggcttccctggcaactaccccagcagcctggactgcacctggaccatcaacctgcccatcggctttggagtgcacctgcagtttgtgaacttcagcacagagaccatccatgactacctggaggtgcgcagcggcagcagcgagaccagcaccgtcatcggccgcctgagcggcccccagatccccagcagcctcttcagcaccacccatgagaccagcctgtacttccacagcgactacagccagaacaagcagggcttccacatcgtgtaccaggcctaccagctgcagagctgcccagacccccggcccttcagaaatggatttgtgattggaaatgacttcaccgtgggccagaccatcagctttgagtgcttccctggctacaccctgattggcaacagcgccctgacctgcctgcacggcgtgtccaggaactggaaccaccccctgccccgctgtgaggccctgtgtggcggcaacatcacagccatgaatggcaccatctacagccctggctacccagatgagtaccccaacttccaggactgcttctggctggtgcgggtgcccccaggaaatggcatctacatcaacttcaccgtgctgcagacagagcccatctatgacttcatcaccgtgtgggatggccctgaccagaacagcccccagatcggccagttcagcggcaacacagccctggagagcgtgtacagcaccagcaaccagatcctgatcaagttccacagcgacttcaccaccagcggcttctttgtgctgagctaccacgcctaccagctgcgggtgtgccagcccccacctcctgtgcccaatgctgagatcctgacagaagatgatgaatttgaaattggagacatcatccgctaccagtgcctgcccggcttcaccctggtgggcaatgccatcctgacctgccgcctgggggagcggctgcagatggatggagcccctcctgtgtgccaggtgctgtgcccagccaatgagctgcggctggacagcactggagtcatcctgagccctggctacccagacagctaccccaacctgcagatgtgtgcctggagcatctctgtggagaagggctacaacatcaccatgtttgtggagttcttccagacagagaaggagtttgatgtgctgcaggtgtatgatggccccaacatccagagccctgtgctgatcagcctgagcggggactacagcagcgccttcaacatcaccagcaatggacatgaggtgttcctgcagtggagcgctgaccacggcaacaacaagaagggcttccgcatccgctacatcgccttctactgcagcaccccagagagcccccctcatggctacatcatcagccagacaggaggccagctgaacagcgtggtgcgctgggcctgtgaccggggcttccggctggtgggcaagagcagcgctgtgtgcaggaagagcagctatggctaccacgcctgggatgcccctgtgcctgcctgccaggccatcagctgtggcatccccaaggcccccaccaacggcggcatcctgaccacagactacctggtgggcaccagggtgacctacttctgcaatgatggctaccgcctgagcagcaaggagctgaccacagctgtgtgccagagtgatggcacctggagcaaccacaacaagaccccccgctgtgtggtggtgacctgccccagcatcaacagcttcatcctggagcacggccgctggagaattgtgaatggcagccactatgagtacaagaccaaggtggtgttcagctgtgaccccggctaccacggcctgggccctgccagcattgagtgcctgcccaacggcacctggagctggagaaatgaaagaccctactgccagatcatcagctgtggggagctgcccaccccaccaaatggaaacaagattggcacccagaccagctatggcagcacagccatcttcacctgtgacctgggcttcatgctggtgggcagcgctgtgcgggagtgcctgagcagcggcctgtggagcgagagcgagacccgctgcctggccggccactgcggcatccctgagctgattgtgaatggccaggtgattggagaaaattatggctacagagacacagtggtgtaccagtgcaaccctggcttccgcctcatcggcagctctgtgcgcatctgccagcaggaccacaactggagcggccagctgcccagctgtgtgcctgtgtcctgtggccaccctggcagccccatctacggccgcaccagcggaaatggcttcaacttcaatgatgtggtgaccttcagctgcaacatcggctacctgatgcagggccccaccaaggcccagtgccaggccaaccggcagtggagccaccccccacccatgtgcaaggtggtgaactgcagcgaccccggcatcccagccaacagcaagcgggagagcaagattgagcacggcaacttcacctatggaacagtggtgttctatgactgcaaccctggctacttcctgtttggcagctctgtgctgatctgccagcccaacggccagtgggacaagcccctgcctgagtgcatcatgattgactgtggccaccctggggtgcccccaaatgctgtgctgtctggagagaagtacaccttcggcagcacagtgcactacagctgcaccgggaagaggagcctgctgggccagagcagcaggacctgccagctgaatggccactggagcggcagccagccccactgcagcggagatgccaccggcacctgtggggaccccggcaccccaggccacggcagccggcaggagagcaacttccgcaccaagagcacagtgcgctatgcctgtgacaccggctacatcctgcacggcagcgaggagaggacctgcctggccaacggctcctggacaggccggcagcctgagtgcaaggctgtgcagtgtggcaaccctggcaccacagccaacgggaaggtgttcagaattgatggcaccaccttcagcagcagcgtcatctacagctgcatggagggctacatcctgagcggccccagcgtgcggcagtgcacagccaacggcacctggagcggcaccctgcccaactgcaccatcatcagctgtggggaccccggcatcccagccaacggcctgcgctatggagatgattatgtggtgggccagaatgtgtcctacatgtgccagcccggctacaccatggagctgaatggcagccgcatccgcacctgcaccatcaatggcacctggagcggcgtgatgcccacctgcagagctgtgacctgccccaccccaccccagatcagcaatggccgcctggagggcaccaactttgactggggcttcagcatctcctacatctgcagccctggctatgagctgtccttccctgctgtgctgacctgtgtgggcaatggcacctggagcggggaggtgccccagtgcctgcccaagttctgtggggaccccggcatcccagcccagggcaagcgggagggcaagagcttcatctaccagagcgaggtgtccttcagctgcaacttccccttcatcctggtgggcagcagcacccgcatctgccaggctgatggcacctggagcggcagcagcccccactgcatcgagcccacccagaccagctgtgaaaatcctggggtgcccaggcatggcagccagaacaacaccttcggcttccaggtgggctctgtggtgcagttccactgcaagaagggccacctgctgcagggcagcaccaccaggacctgcctgcctgacctgacctggagcggcatccagcctgagtgcatcccccacagctgcaagcagcctgagaccccagcccacgccaacgtggtgggcatggacctgcccagccacggctacaccctcatctacacctgccagcccggcttcttcctggccggcggcacagagcaccgggtgtgccgcagtgacaacacctggacaggcaaggtgcccatctgtgaggccggcagcaagatcctggtgaaggaccccaggcctgccctgggcacccccagccccaagctgtctgtgcctgatgatgtgtttgcccagaactacatctggaagggcagctacaacttcaagggcaggaagcagcccatgaccctgactgtgaccagcttcaatgccagcacaggccgggtgaatgccaccctgagcaacagcaacatggagctgctgctgagcggcgtgtacaagagccaggaggcccggctgatgctgcgcatctacctgatcaaggtgcctgcccacgcctctgtgaagaagatgaaggaggagaactgggccatggatggctttgtgtctgctgagccagatggagccacctacgtgttccagggcttcatccagggcaaggactatggccagtttggcctgcagaggctgggcctgaacatgtctgagggcagcaacagcagcaaccagccccacggcaccaacagcagctctgtggccatcgccatcctggtgcccttctttgccctgatctttgctggcttcggcttctacctgtacaagcagaggacagcccccaagacccagtacacaggctgcagcgtgcatgagaacaacaacggccaggccgcctttgagaaccccatgtatgacaccaatgccaagtctgtggagggcaaggctgtgcgctttgaccccaacctgaacacagtgtgcaccatggtgtag

SEQ ID NO: 148716 - DNA, 11004 bp, synthetic construct
  misc_feature 1..11004: note = Description of Artificial Sequence: Synthetic coding sequence
  source 1..11004: mol_type = other DNA
atgtggagctggttcctgtgctggaagcctgtgcagctggaccggcagacagccagcggcttcatctacacctgtggcggcaccctgaagggcctgaatggcaccatcgagagccctggcttcccctacggctacccaaatggagccaactgcacctgggtgatcatcgccgaggagaggaaccgcatccagatcgtgttccagagctttgccctggaggaggagtatgactacctgagcctgtatgatggccacccccaccccaccaacttccgcacccggctgaccggcttccacctgcccccacctgtgaccagcaccaagtctgtgttcagcctgcggctgaccagtgactttgctgtgtctgcccacggcttcaaggtgtactatgaggagctgcagagcagcagctgtggcaaccctggggtgccccccaagggcgtgctgtatggcaccaggtttgatgtgggggacaagatccgctacagctgtgtgacaggctacatcctggatggccacccccagctgacctgcatcgccaacagcgtgaacacagcctcctgggacttccctgtgcccatctgcagagcagaagatgcctgtggcggcaccatgaggggcagcagcggcatcatcagcagccccagcttccccaatgagtaccacaacaatgctgactgcacctggaccatcgtggccgagcccggggacaccatcagcctcatcttcacagacttccagatggaggagaagtatgactacctggagattgagggcagcgagccccccaccatctggctgagcggcatgaacatccccccacccatcatcagcaacaagaactggctgcggctgcactttgtgacagacagcaaccaccgctaccggggcttcagcgccccctaccagggcagcagcaccctgacccacaccaccagcactggagagctggaggagcacaacagaaccaccactggagccatcgctgtggccagcaccccagcagatgtgacagtgtcctctgtgacagctgtgaccatccaccggctgtctgaggagcagagggtgcaggtgaccagcctgaggaacagcggcctggaccccaacaccagcaaggatggcctgagcccccaccctgctgacacccagagcaccaggagaagacccaggcatgctgagcagattgaaagaaccaaggagctggccgtggtgacccaccgggtgaagaaggccatcgacttcaagagccggggcttcaagctgtttcctgggaaggacaacagcaacaagttcagcatcctgaatgaaggaggcatcaagacagccagcaacctgtgcccagaccctggagagccagaaaatggcaagagaattggaagtgacttcagcctgggcagcacagtgcagttcagctgtgatgaggactatgtgctgcagggcgccaagagcatcacctgccagagaattgctgaggtgtttgctgcctggagcgaccacaggcctgtgtgcaaggtgaagacctgtggcagcaacctgcagggccccagcggcaccttcaccagccccaacttccccttccagtatgacagcaatgcccagtgtgtgtgggtgatcacagctgtgaacaccaacaaggtgatccagatcaactttgaggagtttgacctggagatcggctatgacaccctgaccatcggagatggaggagaggtgggggaccccaggacagtgctgcaggtgctgaccggcagctttgtgcctgacctgattgtgtccatgagcagccagatgtggctgcacctgcagacagatgagagcgtgggctctgtgggcttcaaggtgaactacaaggagattgagaaggagagctgtggggaccccggcacccccctgtatggcatccgggagggagatggcttcagcaacagagatgtgctgcgctttgagtgccagtttggatttgagctgattggagagaagagcatcgtgtgccaggagaacaaccagtggagcgccaacatccccatctgcatcttcccctgcctgagcaacttcaccgcccccatgggcaccgtgctgagcccagactacccagagggctacggcaacaacctgaactgcatctggaccatcatcagtgaccccggcagccgcatccacctgtccttcaatgactttgacctggagagccagtttgacttcctggccgtgaaggatggagacagccctgagagccccatcctgggcaccttcaccggggctgaggtgcccagccacctgaccagcaacagccacatcctgcggctggagttccaggccgaccacagcatgagcggccggggcttcaacatcacctacaacaccttcggccacaatgaatgtcctgaccccggcatccccatcaatgccaggagatttggagacaacttccagctgggcagcagcatcagcgtcatctgtgaggagggcttcatcaagacccagggcacagagaccatcacctgcatcctgatggatggcaaggtgatgtggagcggcctcatccccaagtgtggggccccctgtggcggccacttcagcgcccccagcggggtcatcctgagccctggctggccaggctactacaaggacagcctgaactgtgagtgggtgattgaagctgagcccggccacagcatcaagatcacctttgagcgcttccagacagagctgaactatgatgtgctggaggtgcatgatggccccaacctgctgagccccctgctgggcagctacaacggcacccaggtgccccagttcctgttcagcagcagcaacttcatctacctgctcttcaccacagacaacagccgcagcaacaacggcttcaagatccactatgagagcgtgacagtgaacacctacagctgcctggaccccggcatccctgtgcacggccgccgctatggccatgacttcagcatcggcagcacagtgtccttcagctgtgacagcggctaccgcctgagccatgaggagcccctgctgtgtgagaagaaccactggtggagccaccccctgcccacctgtgatgccctgtgtggaggagatgtgcggggccccagcggcaccatcctgagccctggctacccagagttctaccccaacagcctgaactgcacctggacagtggatgtgacccatggaaaaggagtgcagttcaacttccacaccttccacctggaggaccaccacgactacctgctgatcacagaaaatggcagcttcacccagcccctggcccggctgactggaagtgacctgccccccaccatcaatgccggcctgtatggcaacttccgggcccagctgcgcttcatcagtgacttcagcatctcctatgagggcttcaacatcaccttcagcgagtacaacctggagccctgtgaagatcctggcatcccccagtatggcagccgcatcggcttcaactttggcatcggggacaccctgaccttcagctgcagcagcggctaccgcctggagggcaccagcgagatcatctgcctgggcggcggcagaagagtgtggagcgcccccctgccccgctgtgtggccgagtgtggggccagcgccaccaacaatgaaggcatcctgctgagccccaactaccccctgaactatgagaacaaccacgagtgcatctacagcatccaggtgcaggccggcaagggcatcaacatcagcgcccggaccttccacctggcccagggagatgtgctgaagatctatgatggcaaggacaagaccacccacctgctgggcgccttcaccggggcctccatgaggggcctgaccctgagcagcaccagcaaccagctgtggctggagttcaacagcgacacagagggcacagatgagggcttccagctggtgtacaccagctttgagctgagccactgtgaagatcctggcatcccccagtttggctacaagatcagtgaccagggccactttgctggcagcaccatcatctacggctgcaaccctggctacaccctgcacggcagcagcctgctgaagtgcatgactggagagcggcgggcctgggactaccccctgcccagctgcatcgcagaatgtggcggccgcttcaagggggagagcagcggccgcatcctgagccctggctaccccttcccctatgacaacaacctgcgctgcatgtggatgattgaggtggaccccggcaacatcgtgtccctgcagttcctggcctttgacacagaggccagccatgacatcctgcgggtgtgggatggccccccagaaaatgacatgctgctgaaggagatcagcggcagcctcatccctgagggcatccacagcaccctgaacatcgtgaccatccagtttgacacagacttctacatcagcaagagcggctttgccatccagttcagcagctctgtggccacagcctgccgggaccccggggtgcccatgaatggcaccagaaatggagatggccgggagcccggggacacagtggtgttccagtgtgaccccggctatgagctgcagggcgaggagcgcatcacctgcatccaggtggagaaccgctacttctggcagcccagcccccctgtgtgcatcgccccctgtggcggcaacctgaccggcagcagcggcttcatcctgagccccaacttcccccacccctacccccacagccgggactgtgactggaccatcaccgtgaatgctgactatgtgatcagcctggccttcatctccttcagcattgagcccaactatgacttcctgtacatctatgatggccctgacagcaacagccccctgattggcagcttccaggacagcaagctgcctgagagaattgagagcagcagcaacaccatgcacctggccttcagaagtgatggctctgtgtcctacacaggcttccacctggagtacaaggccaagctgcgggagagctgctttgaccccggcaacatcatgaatggcacccggctgggcatggactacaagctgggcagcacagtgacctactactgtgatgctggctacgtgctgcagggctacagcaccctgacctgcatcatgggagatgatggccggcccggctggaacagagccctgcccagctgccacgccccctgtggcagccgcagcactggaagtgagggcaccgtgctgagccccaactaccccaagaactacagcgtgggccacaactgtgtgtacagcattgctgtgcccaaggagtttgtggtgtttggccagtttgtgttcttccagaccagcctgcatgatgtggtggaggtgtatgatggccccacccagcagagcagcctgctgagcagcctgagcggcagccacagcggggagagcctgcccctgagcagcggcaaccagatcaccatccgcttcacctctgtgggccccatcacagccaagggcttccactttgtgtaccaggccgtgcccaggaccagcagcacccagtgcagctctgtgcctgagccccgcttcggcagaagaattggaaatgaatttgctgtgggcagctctgtgctgtttgactgcaaccctggctacatcctgcacggcagcatcgccatccgctgtgagaccgtgcccaacagcctggcccagtggaatgacagcctgcccacctgcatcgtgccctgtggcggcatcctgaccaagaggaagggcaccatcctgagccctggctacccagagccctatgacaacaacctgaactgtgtgtggaagatcaccgtgcctgagggcgccggcatccaggtgcaggtggtgtcctttgccacagagcacaactgggacagcctggacttctatgatggaggagacaacaatgccccccggctgggcagctacagcggcaccaccatcccccacctgctgaacagcaccagcaacaacctgtacctgaacttccagagcgacatctctgtgtctgctgctggcttccacctggagtacacagccatcggcctggacagctgcccagagccccagacccccagcagcggcatcaagatcggggaccgctacatggtgggagatgtggtgtccttccagtgtgaccagggctacagcctgcagggccacagccacatcacctgcatgcctggccctgtgcggcgctggaactaccccatccccatctgcctggcccagtgtggcggggccatgtctgacttctctggagtcatcctgagccctggcttccctggcaactaccccagcagcctggactgcacctggaccatcaacctgcccatcggctttggagtgcacctgcagtttgtgaacttcagcacagagaccatccatgactacctggaggtgcgcagcggcagcagcgagaccagcaccgtcatcggccgcctgagcggcccccagatccccagcagcctcttcagcaccacccatgagaccagcctgtacttccacagcgactacagccagaacaagcagggcttccacatcgtgtaccaggcctaccagctgcagagctgcccagacccccggcccttcagaaatggatttgtgattggaaatgacttcaccgtgggccagaccatcagctttgagtgcttccctggctacaccctgattggcaacagcgccctgacctgcctgcacggcgtgtccaggaactggaaccaccccctgccccgctgtgaggccctgtgtggcggcaacatcacagccatgaatggcaccatctacagccctggctacccagatgagtaccccaacttccaggactgcttctggctggtgcgggtgcccccaggaaatggcatctacatcaacttcaccgtgctgcagacagagcccatctatgacttcatcaccgtgtgggatggccctgaccagaacagcccccagatcggccagttcagcggcaacacagccctggagagcgtgtacagcaccagcaaccagatcctgatcaagttccacagcgacttcaccaccagcggcttctttgtgctgagctaccacgcctaccagctgcgggtgtgccagcccccacctcctgtgcccaatgctgagatcctgacagaagatgatgaatttgaaattggagacatcatccgctaccagtgcctgcccggcttcaccctggtgggcaatgccatcctgacctgccgcctgggggagcggctgcagatggatggagcccctcctgtgtgccaggtgctgtgcccagccaatgagctgcggctggacagcactggagtcatcctgagccctggctacccagacagctaccccaacctgcagatgtgtgcctggagcatctctgtggagaagggctacaacatcaccatgtttgtggagttcttccagacagagaaggagtttgatgtgctgcaggtgtatgatggccccaacatccagagccctgtgctgatcagcctgagcggggactacagcagcgccttcaacatcaccagcaatggacatgaggtgttcctgcagtggagcgctgaccacggcaacaacaagaagggcttccgcatccgctacatcgccttctactgcagcaccccagagagcccccctcatggctacatcatcagccagacaggaggccagctgaacagcgtggtgcgctgggcctgtgaccggggcttccggctggtgggcaagagcagcgctgtgtgcaggaagagcagctatggctaccacgcctgggatgcccctgtgcctgcctgccaggccatcagctgtggcatccccaaggcccccaccaacggcggcatcctgaccacagactacctggtgggcaccagggtgacctacttctgcaatgatggctaccgcctgagcagcaaggagctgaccacagctgtgtgccagagtgatggcacctggagcaaccacaacaagaccccccgctgtgtggtggtgacctgccccagcatcaacagcttcatcctggagcacggccgctggagaattgtgaatggcagccactatgagtacaagaccaaggtggtgttcagctgtgaccccggctaccacggcctgggccctgccagcattgagtgcctgcccaacggcacctggagctggagaaatgaaagaccctactgccagatcatcagctgtggggagctgcccaccccaccaaatggaaacaagattggcacccagaccagctatggcagcacagccatcttcacctgtgacctgggcttcatgctggtgggcagcgctgtgcgggagtgcctgagcagcggcctgtggagcgagagcgagacccgctgcctggccggccactgcggcatccctgagctgattgtgaatggccaggtgattggagaaaattatggctacagagacacagtggtgtaccagtgcaaccctggcttccgcctcatcggcagctctgtgcgcatctgccagcaggaccacaactggagcggccagctgcccagctgtgtgcctgtgtcctgtggccaccctggcagccccatctacggccgcaccagcggaaatggcttcaacttcaatgatgtggtgaccttcagctgcaacatcggctacctgatgcagggccccaccaaggcccagtgccaggccaaccggcagtggagccaccccccacccatgtgcaaggtggtgaactgcagcgaccccggcatcccagccaacagcaagcgggagagcaagattgagcacggcaacttcacctatggaacagtggtgttctatgactgcaaccctggctacttcctgtttggcagctctgtgctgatctgccagcccaacggccagtgggacaagcccctgcctgagtgcatcatgattgactgtggccaccctggggtgcccccaaatgctgtgctgtctggagagaagtacaccttcggcagcacagtgcactacagctgcaccgggaagaggagcctgctgggccagagcagcaggacctgccagctgaatggccactggagcggcagccagccccactgcagcggagatgccaccggcacctgtggggaccccggcaccccaggccacggcagccggcaggagagcaacttccgcaccaagagcacagtgcgctatgcctgtgacaccggctacatcctgcacggcagcgaggagaggacctgcctggccaacggctcctggacaggccggcagcctgagtgcaaggctgtgcagtgtggcaaccctggcaccacagccaacgggaaggtgttcagaattgatggcaccaccttcagcagcagcgtcatctacagctgcatggagggctacatcctgagcggccccagcgtgcggcagtgcacagccaacggcacctggagcggcaccctgcccaactgcaccatcatcagctgtggggaccccggcatcccagccaacggcctgcgctatggagatgattatgtggtgggccagaatgtgtcctacatgtgccagcccggctacaccatggagctgaatggcagccgcatccgcacctgcaccatcaatggcacctggagcggcgtgatgcccacctgcagagctgtgacctgccccaccccaccccagatcagcaatggccgcctggagggcaccaactttgactggggcttcagcatctcctacatctgcagccctggctatgagctgtccttccctgctgtgctgacctgtgtgggcaatggcacctggagcggggaggtgccccagtgcctgcccaagttctgtggggaccccggcatcccagcccagggcaagcgggagggcaagagcttcatctaccagagcgaggtgtccttcagctgcaacttccccttcatcctggtgggcagcagcacccgcatctgccaggctgatggcacctggagcggcagcagcccccactgcatcgagcccacccagaccagctgtgaaaatcctggggtgcccaggcatggcagccagaacaacaccttcggcttccaggtgggctctgtggtgcagttccactgcaagaagggccacctgctgcagggcagcaccaccaggacctgcctgcctgacctgacctggagcggcatccagcctgagtgcatcccccacagctgcaagcagcctgagaccccagcccacgccaacgtggtgggcatggacctgcccagccacggctacaccctcatctacacctgccagcccggcttcttcctggccggcggcacagagcaccgggtgtgccgcagtgacaacacctggacaggcaaggtgcccatctgtgaggccggcagcaagatcctggtgaaggaccccaggcctgccctgggcacccccagccccaagctgtctgtgcctgatgatgtgtttgcccagaactacatctggaagggcagctacaacttcaagggcaggaagcagcccatgaccctgactgtgaccagcttcaatgccagcacaggccgggtgaatgccaccctgagcaacagcaacatggagctgctgctgagcggcgtgtacaagagccaggaggcccggctgatgctgcgcatctacctgatcaaggtgcctgcccacgcctctgtgaagaagatgaaggaggagaactgggccatggatggctttgtgtctgctgagccagatggagccacctacgtgttccagggcttcatccagggcaaggactatggccagtttggcctgcagaggctgggcctgaacatgtctgagggcagcaacagcagcaaccagccccacggcaccaacagcagctctgtggccatcgccatcctggtgcccttctttgccctgatctttgctggcttcggcttctacctgtacaagcagaggacagcccccaagacccagtacacaggctgcagcgtgcatgagaacaacaacggccaggccgcctttgagaaccccatgtatgacaccaatgccaagtctgtggagggcaaggctgtgcgctttgaccccaacctgaacacagtgtgcaccatggtgtag

SEQ ID NO: 148717 - DNA, 10914 bp, synthetic construct
  misc_feature 1..10914: note = Description of Artificial Sequence: Synthetic coding sequence
  source 1..10914: mol_type = other DNA
atgaagggcatcaggaagggggagagccgggccaaggagagcaagccctgggagcccgggaagaggcgctgtgccaagtgtggccgcctggacttcatcctgatgaagaagatgggcatcaagagcggcttcaccttctggaacctggtgttcctgctgactgtgtcctgtgtgaagggcttcatctacacctgtggcggcaccctgaagggcctgaatggcaccatcgagagccctggcttcccctacggctacccaaatggagccaactgcacctgggtgatcatcgccgaggagaggaaccgcatccagatcgtgttccagagctttgccctggaggaggagtatgactacctgagcctgtatgatggccacccccaccccaccaacttccgcacccggctgaccggcttccacctgcccccacctgtgaccagcaccaagtctgtgttcagcctgcggctgaccagtgactttgctgtgtctgcccacggcttcaaggtgtactatgaggagctgcagagcagcagctgtggcaaccctggggtgccccccaagggcgtgctgtatggcaccaggtttgatgtgggggacaagatccgctacagctgtgtgacaggctacatcctggatggccacccccagctgacctgcatcgccaacagcgtgaacacagcctcctgggacttccctgtgcccatctgcagagcagaagatgcctgtggcggcaccatgaggggcagcagcggcatcatcagcagccccagcttccccaatgagtaccacaacaatgctgactgcacctggaccatcgtggccgagcccggggacaccatcagcctcatcttcacagacttccagatggaggagaagtatgactacctggagattgagggcagcgagccccccaccatctggctgagcggcatgaacatccccccacccatcatcagcaacaagaactggctgcggctgcactttgtgacagacagcaaccaccgctaccggggcttcagcgccccctaccagggcagcagcaccctgacccacaccaccagcactggagagctggaggagcacaacagaaccaccactggagccatcgctgtggccagcaccccagcagatgtgacagtgtcctctgtgacagctgtgaccatccaccggctgtctgaggagcagagggtgcaggtgaccagcctgaggaacagcggcctggaccccaacaccagcaaggatggcctgagcccccaccctgctgacacccagagcaccaggagaagacccaggcatgctgagcagattgaaagaaccaaggagctggccgtggtgacccaccgggtgaagaaggccatcgacttcaagagccggggcttcaagctgtttcctgggaaggacaacagcaacaagttcagcatcctgaatgaaggaggcatcaagacagccagcaacctgtgcccagaccctggagagccagaaaatggcaagagaattggaagtgacttcagcctgggcagcacagtgcagttcagctgtgatgaggactatgtgctgcagggcgccaagagcatcacctgccagagaattgctgaggtgtttgctgcctggagcgaccacaggcctgtgtgcaaggtgaagacctgtggcagcaacctgcagggccccagcggcaccttcaccagccccaacttccccttccagtatgacagcaatgcccagtgtgtgtgggtgatcacagctgtgaacaccaacaaggtgatccagatcaactttgaggagtttgacctggagatcggctatgacaccctgaccatcggagatggaggagaggtgggggaccccaggacagtgctgcaggtgctgaccggcagctttgtgcctgacctgattgtgtccatgagcagccagatgtggctgcacctgcagacagatgagagcgtgggctctgtgggcttcaaggtgaactacaaggagattgagaaggagagctgtggggaccccggcacccccctgtatggcatccgggagggagatggcttcagcaacagagatgtgctgcgctttgagtgccagtttggatttgagctgattggagagaagagcatcgtgtgccaggagaacaaccagtggagcgccaacatccccatctgcatcttcccctgcctgagcaacttcaccgcccccatgggcaccgtgctgagcccagactacccagagggctacggcaacaacctgaactgcatctggaccatcatcagtgaccccggcagccgcatccacctgtccttcaatgactttgacctggagagccagtttgacttcctggccgtgaaggatggagacagccctgagagccccatcctgggcaccttcaccggggctgaggtgcccagccacctgaccagcaacagccacatcctgcggctggagttccaggccgaccacagcatgagcggccggggcttcaacatcacctacaacaccttcggccacaatgaatgtcctgaccccggcatccccatcaatgccaggagatttggagacaacttccagctgggcagcagcatcagcgtcatctgtgaggagggcttcatcaagacccagggcacagagaccatcacctgcatcctgatggatggcaaggtgatgtggagcggcctcatccccaagtgtggggccccctgtggcggccacttcagcgcccccagcggggtcatcctgagccctggctggccaggctactacaaggacagcctgaactgtgagtgggtgattgaagctgagcccggccacagcatcaagatcacctttgagcgcttccagacagagctgaactatgatgtgctggaggtgcatgatggccccaacctgctgagccccctgctgggcagctacaacggcacccaggtgccccagttcctgttcagcagcagcaacttcatctacctgctcttcaccacagacaacagccgcagcaacaacggcttcaagatccactatgagagcgtgacagtgaacacctacagctgcctggaccccggcatccctgtgcacggccgccgctatggccatgacttcagcatcggcagcacagtgtccttcagctgtgacagcggctaccgcctgagccatgaggagcccctgctgtgtgagaagaaccactggtggagccaccccctgcccacctgtgatgccctgtgtggaggagatgtgcggggccccagcggcaccatcctgagccctggctacccagagttctaccccaacagcctgaactgcacctggacagtggatgtgacccatggaaaaggagtgcagttcaacttccacaccttccacctggaggaccaccacgactacctgctgatcacagaaaatggcagcttcacccagcccctggcccggctgactggaagtgacctgccccccaccatcaatgccggcctgtatggcaacttccgggcccagctgcgcttcatcagtgacttcagcatctcctatgagggcttcaacatcaccttcagcgagtacaacctggagccctgtgaagatcctggcatcccccagtatggcagccgcatcggcttcaactttggcatcggggacaccctgaccttcagctgcagcagcggctaccgcctggagggcaccagcgagatcatctgcctgggcggcggcagaagagtgtggagcgcccccctgccccgctgtgtggccgagtgtggggccagcgccaccaacaatgaaggcatcctgctgagccccaactaccccctgaactatgagaacaaccacgagtgcatctacagcatccaggtgcaggccggcaagggcatcaacatcagcgcccggaccttccacctggcccagggagatgtgctgaagatctatgatggcaaggacaagaccacccacctgctgggcgccttcaccggggcctccatgaggggcctgaccctgagcagcaccagcaaccagctgtggctggagttcaacagcgacacagagggcacagatgagggcttccagctggtgtacaccagctttgagctgagccactgtgaagatcctggcatcccccagtttggctacaagatcagtgaccagggccactttgctggcagcaccatcatctacggctgcaaccctggctacaccctgcacggcagcagcctgctgaagtgcatgactggagagcggcgggcctgggactaccccctgcccagctgcatcgcagaatgtggcggccgcttcaagggggagagcagcggccgcatcctgagccctggctaccccttcccctatgacaacaacctgcgctgcatgtggatgattgaggtggaccccggcaacatcgtgtccctgcagttcctggcctttgacacagaggccagccatgacatcctgcgggtgtgggatggccccccagaaaatgacatgctgctgaaggagatcagcggcagcctcatccctgagggcatccacagcaccctgaacatcgtgaccatccagtttgacacagacttctacatcagcaagagcggctttgccatccagttcagcagctctgtggccacagcctgccgggaccccggggtgcccatgaatggcaccagaaatggagatggccgggagcccggggacacagtggtgttccagtgtgaccccggctatgagctgcagggcgaggagcgcatcacctgcatccaggtggagaaccgctacttctggcagcccagcccccctgtgtgcatcgccccctgtggcggcaacctgaccggcagcagcggcttcatcctgagccccaacttcccccacccctacccccacagccgggactgtgactggaccatcaccgtgaatgctgactatgtgatcagcctggccttcatctccttcagcattgagcccaactatgacttcctgtacatctatgatggccctgacagcaacagccccctgattggcagcttccaggacagcaagctgcctgagagaattgagagcagcagcaacaccatgcacctggccttcagaagtgatggctctgtgtcctacacaggcttccacctggagtacaaggccaagctgcgggagagctgctttgaccccggcaacatcatgaatggcacccggctgggcatggactacaagctgggcagcacagtgacctactactgtgatgctggctacgtgctgcagggctacagcaccctgacctgcatcatgggagatgatggccggcccggctggaacagagccctgcccagctgccacgccccctgtggcagccgcagcactggaagtgagggcaccgtgctgagccccaactaccccaagaactacagcgtgggccacaactgtgtgtacagcattgctgtgcccaaggagtttgctgtgcccaggaccagcagcacccagtgcagctctgtgcctgagccccgcttcggcagaagaattggaaatgaatttgctgtgggcagctctgtgctgtttgactgcaaccctggctacatcctgcacggcagcatcgccatccgctgtgagaccgtgcccaacagcctggcccagtggaatgacagcctgcccacctgcatcgtgccctgtggcggcatcctgaccaagaggaagggcaccatcctgagccctggctacccagagccctatgacaacaacctgaactgtgtgtggaagatcaccgtgcctgagggcgccggcatccaggtgcaggtggtgtcctttgccacagagcacaactgggacagcctggacttctatgatggaggagacaacaatgccccccggctgggcagctacagcggcaccaccatcccccacctgctgaacagcaccagcaacaacctgtacctgaacttccagagcgacatctctgtgtctgctgctggcttccacctggagtacacagccatcggcctggacagctgcccagagccccagacccccagcagcggcatcaagatcggggaccgctacatggtgggagatgtggtgtccttccagtgtgaccagggctacagcctgcagggccacagccacatcacctgcatgcctggccctgtgcggcgctggaactaccccatccccatctgcctggcccagtgtggcggggccatgtctgacttctctggagtcatcctgagccctggcttccctggcaactaccccagcagcctggactgcacctggaccatcaacctgcccatcggctttggagtgcacctgcagtttgtgaacttcagcacagagaccatccatgactacctggaggtgcgcagcggcagcagcgagaccagcaccgtcatcggccgcctgagcggcccccagatccccagcagcctcttcagcaccacccatgagaccagcctgtacttccacagcgactacagccagaacaagcagggcttccacatcgtgtaccaggcctaccagctgcagagctgcccagacccccggcccttcagaaatggatttgtgattggaaatgacttcaccgtgggccagaccatcagctttgagtgcttccctggctacaccctgattggcaacagcgccctgacctgcctgcacggcgtgtccaggaactggaaccaccccctgccccgctgtgaggccctgtgtggcggcaacatcacagccatgaatggcaccatctacagccctggctacccagatgagtaccccaacttccaggactgcttctggctggtgcgggtgcccccaggaaatggcatctacatcaacttcaccgtgctgcagacagagcccatctatgacttcatcaccgtgtgggatggccctgaccagaacagcccccagatcggccagttcagcggcaacacagccctggagagcgtgtacagcaccagcaaccagatcctgatcaagttccacagcgacttcaccaccagcggcttctttgtgctgagctaccacgcctaccagctgcgggtgtgccagcccccacctcctgtgcccaatgctgagatcctgacagaagatgatgaatttgaaattggagacatcatccgctaccagtgcctgcccggcttcaccctggtgggcaatgccatcctgacctgccgcctgggggagcggctgcagatggatggagcccctcctgtgtgccaggtgctgtgcccagccaatgagctgcggctggacagcactggagtcatcctgagccctggctacccagacagctaccccaacctgcagatgtgtgcctggagcatctctgtggagaagggctacaacatcaccatgtttgtggagttcttccagacagagaaggagtttgatgtgctgcaggtgtatgatggccccaacatccagagccctgtgctgatcagcctgagcggggactacagcagcgccttcaacatcaccagcaatggacatgaggtgttcctgcagtggagcgctgaccacggcaacaacaagaagggcttccgcatccgctacatcgccttctactgcagcaccccagagagcccccctcatggctacatcatcagccagacaggaggccagctgaacagcgtggtgcgctgggcctgtgaccggggcttccggctggtgggcaagagcagcgctgtgtgcaggaagagcagctatggctaccacgcctgggatgcccctgtgcctgcctgccaggccatcagctgtggcatccccaaggcccccaccaacggcggcatcctgaccacagactacctggtgggcaccagggtgacctacttctgcaatgatggctaccgcctgagcagcaaggagctgaccacagctgtgtgccagagtgatggcacctggagcaaccacaacaagaccccccgctgtgtggtggtgacctgccccagcatcaacagcttcatcctggagcacggccgctggagaattgtgaatggcagccactatgagtacaagaccaaggtggtgttcagctgtgaccccggctaccacggcctgggccctgccagcattgagtgcctgcccaacggcacctggagctggagaaatgaaagaccctactgccagatcatcagctgtggggagctgcccaccccaccaaatggaaacaagattggcacccagaccagctatggcagcacagccatcttcacctgtgacctgggcttcatgctggtgggcagcgctgtgcgggagtgcctgagcagcggcctgtggagcgagagcgagacccgctgcctggccggccactgcggcatccctgagctgattgtgaatggccaggtgattggagaaaattatggctacagagacacagtggtgtaccagtgcaaccctggcttccgcctcatcggcagctctgtgcgcatctgccagcaggaccacaactggagcggccagctgcccagctgtgtgcctgtgtcctgtggccaccctggcagccccatctacggccgcaccagcggaaatggcttcaacttcaatgatgtggtgaccttcagctgcaacatcggctacctgatgcagggccccaccaaggcccagtgccaggccaaccggcagtggagccaccccccacccatgtgcaaggtggtgaactgcagcgaccccggcatcccagccaacagcaagcgggagagcaagattgagcacggcaacttcacctatggaacagtggtgttctatgactgcaaccctggctacttcctgtttggcagctctgtgctgatctgccagcccaacggccagtgggacaagcccctgcctgagtgcatcatgattgactgtggccaccctggggtgcccccaaatgctgtgctgtctggagagaagtacaccttcggcagcacagtgcactacagctgcaccgggaagaggagcctgctgggccagagcagcaggacctgccagctgaatggccactggagcggcagccagccccactgcagcggagatgccaccggcacctgtggggaccccggcaccccaggccacggcagccggcaggagagcaacttccgcaccaagagcacagtgcgctatgcctgtgacaccggctacatcctgcacggcagcgaggagaggacctgcctggccaacggctcctggacaggccggcagcctgagtgcaaggctgtgcagtgtggcaaccctggcaccacagccaacgggaaggtgttcagaattgatggcaccaccttcagcagcagcgtcatctacagctgcatggagggctacatcctgagcggccccagcgtgcggcagtgcacagccaacggcacctggagcggcaccctgcccaactgcaccatcatcagctgtggggaccccggcatcccagccaacggcctgcgctatggagatgattatgtggtgggccagaatgtgtcctacatgtgccagcccggctacaccatggagctgaatggcagccgcatccgcacctgcaccatcaatggcacctggagcggcgtgatgcccacctgcagagctgtgacctgccccaccccaccccagatcagcaatggccgcctggagggcaccaactttgactggggcttcagcatctcctacatctgcagccctggctatgagctgtccttccctgctgtgctgacctgtgtgggcaatggcacctggagcggggaggtgccccagtgcctgcccaagttctgtggggaccccggcatcccagcccagggcaagcgggagggcaagagcttcatctaccagagcgaggtgtccttcagctgcaacttccccttcatcctggtgggcagcagcacccgcatctgccaggctgatggcacctggagcggcagcagcccccactgcatcgagcccacccagaccagctgtgaaaatcctggggtgcccaggcatggcagccagaacaacaccttcggcttccaggtgggctctgtggtgcagttccactgcaagaagggccacctgctgcagggcagcaccaccaggacctgcctgcctgacctgacctggagcggcatccagcctgagtgcatcccccacagctgcaagcagcctgagaccccagcccacgccaacgtggtgggcatggacctgcccagccacggctacaccctcatctacacctgccagcccggcttcttcctggccggcggcacagagcaccgggtgtgccgcagtgacaacacctggacaggcaaggtgcccatctgtgaggccggcagcaagatcctggtgaaggaccccaggcctgccctgggcacccccagccccaagctgtctgtgcctgatgatgtgtttgcccagaactacatctggaagggcagctacaacttcaagggcaggaagcagcccatgaccctgactgtgaccagcttcaatgccagcacaggccgggtgaatgccaccctgagcaacagcaacatggagctgctgctgagcggcgtgtacaagagccaggaggcccggctgatgctgcgcatctacctgatcaaggtgcctgcccacgcctctgtgaagaagatgaaggaggagaactgggccatggatggctttgtgtctgctgagccagatggagccacctacgtgttccagggcttcatccagggcaaggactatggccagtttggcctgcagaggctgggcctgaacatgtctgagggcagcaacagcagcaaccagccccacggcaccaacagcagctctgtggccatcgccatcctggtgcccttctttgccctgatctttgctggcttcggcttctacctgtacaagcagaggacagcccccaagacccagtacacaggctgcagcgtgcatgagaacaacaacggccaggccgcctttgagaaccccatgtatgacaccaatgccaagtctgtggagggcaaggctgtgcgctttgaccccaacctgaacacagtgtgcaccatggtgtag

SEQ ID NO: 148718 - DNA, 10617 bp, synthetic construct
  misc_feature 1..10617: note = Description of Artificial Sequence: Synthetic coding sequence
  source 1..10617: mol_type = other DNA
atgaagggcatcaggaagggggagagccgggccaaggagagcaagccctgggagcccgggaagaggcgctgtgccaagtgtggccgcctggacttcatcctgatgaagaagatgggcatcaagagcggcttcaccttctggaacctggtgttcctgctgactgtgtcctgtgtgaagggcttcatctacacctgtggcggcaccctgaagggcctgaatggcaccatcgagagccctggcttcccctacggctacccaaatggagccaactgcacctgggtgatcatcgccgaggagaggaaccgcatccagatcgtgttccagagctttgccctggaggaggagtatgactacctgagcctgtatgatggccacccccaccccaccaacttccgcacccggctgaccggcttccacctgcccccacctgtgaccagcaccaagtctgtgttcagcctgcggctgaccagtgactttgctgtgtctgcccacggcttcaaggtgtactatgaggagctgcagagcagcagctgtggcaaccctggggtgccccccaagggcgtgctgtatggcaccaggtttgatgtgggggacaagatccgctacagctgtgtgacaggctacatcctggatggccacccccagctgacctgcatcgccaacagcgtgaacacagcctcctgggacttccctgtgcccatctgcagagcagaagatgcctgtggcggcaccatgaggggcagcagcggcatcatcagcagccccagcttccccaatgagtaccacaacaatgctgactgcacctggaccatcgtggccgagcccggggacaccatcagcctcatcttcacagacttccagatggaggagaagtatgactacctggagattgagggcagcgagccccccaccatctggctgagcggcatgaacatccccccacccatcatcagcaacaagaactggctgcggctgcactttgtgacagacagcaaccaccgctaccggggcttcagcgccccctaccaggtgaagaaggccatcgacttcaagagccggggcttcaagctgtttcctgggaaggacaacagcaacaagttcagcatcctgaatgaaggaggcatcaagacagccagcaacctgtgcccagaccctggagagccagaaaatggcaagagaattggaagtgacttcagcctgggcagcacagtgcagttcagctgtgatgaggactatgtgctgcagggcgccaagagcatcacctgccagagaattgctgaggtgtttgctgcctggagcgaccacaggcctgtgtgcaaggtgaagacctgtggcagcaacctgcagggccccagcggcaccttcaccagccccaacttccccttccagtatgacagcaatgcccagtgtgtgtgggtgatcacagctgtgaacaccaacaaggtgatccagatcaactttgaggagtttgacctggagatcggctatgacaccctgaccatcggagatggaggagaggtgggggaccccaggacagtgctgcaggtgctgaccggcagctttgtgcctgacctgattgtgtccatgagcagccagatgtggctgcacctgcagacagatgagagcgtgggctctgtgggcttcaaggtgaactacaaggagattgagaaggagagctgtggggaccccggcacccccctgtatggcatccgggagggagatggcttcagcaacagagatgtgctgcgctttgagtgccagtttggatttgagctgattggagagaagagcatcgtgtgccaggagaacaaccagtggagcgccaacatccccatctgcatcttcccctgcctgagcaacttcaccgcccccatgggcaccgtgctgagcccagactacccagagggctacggcaacaacctgaactgcatctggaccatcatcagtgaccccggcagccgcatccacctgtccttcaatgactttgacctggagagccagtttgacttcctggccgtgaaggatggagacagccctgagagccccatcctgggcaccttcaccggggctgaggtgcccagccacctgaccagcaacagccacatcctgcggctggagttccaggccgaccacagcatgagcggccggggcttcaacatcacctacaacaccttcggccacaatgaatgtcctgaccccggcatccccatcaatgccaggagatttggagacaacttccagctgggcagcagcatcagcgtcatctgtgaggagggcttcatcaagacccagggcacagagaccatcacctgcatcctgatggatggcaaggtgatgtggagcggcctcatccccaagtgtggggccccctgtggcggccacttcagcgcccccagcggggtcatcctgagccctggctggccaggctactacaaggacagcctgaactgtgagtgggtgattgaagctgagcccggccacagcatcaagatcacctttgagcgcttccagacagagctgaactatgatgtgctggaggtgcatgatggccccaacctgctgagccccctgctgggcagctacaacggcacccaggtgccccagttcctgttcagcagcagcaacttcatctacctgctcttcaccacagacaacagccgcagcaacaacggcttcaagatccactatgagagcgtgacagtgaacacctacagctgcctggaccccggcatccctgtgcacggccgccgctatggccatgacttcagcatcggcagcacagtgtccttcagctgtgacagcggctaccgcctgagccatgaggagcccctgctgtgtgagaagaaccactggtggagccaccccctgcccacctgtgatgccctgtgtggaggagatgtgcggggccccagcggcaccatcctgagccctggctacccagagttctaccccaacagcctgaactgcacctggacagtggatgtgacccatggaaaaggagtgcagttcaacttccacaccttccacctggaggaccaccacgactacctgctgatcacagaaaatggcagcttcacccagcccctggcccggctgactggaagtgacctgccccccaccatcaatgccggcctgtatggcaacttccgggcccagctgcgcttcatcagtgacttcagcatctcctatgagggcttcaacatcaccttcagcgagtacaacctggagccctgtgaagatcctggcatcccccagtatggcagccgcatcggcttcaactttggcatcggggacaccctgaccttcagctgcagcagcggctaccgcctggagggcaccagcgagatcatctgcctgggcggcggcagaagagtgtggagcgcccccctgccccgctgtgtggccgagtgtggggccagcgccaccaacaatgaaggcatcctgctgagccccaactaccccctgaactatgagaacaaccacgagtgcatctacagcatccaggtgcaggccggcaagggcatcaacatcagcgcccggaccttccacctggcccagggagatgtgctgaagatctatgatggcaaggacaagaccacccacctgctgggcgccttcaccggggcctccatgaggggcctgaccctgagcagcaccagcaaccagctgtggctggagttcaacagcgacacagagggcacagatgagggcttccagctggtgtacaccagctttgagctgagccactgtgaagatcctggcatcccccagtttggctacaagatcagtgaccagggccactttgctggcagcaccatcatctacggctgcaaccctggctacaccctgcacggcagcagcctgctgaagtgcatgactggagagcggcgggcctgggactaccccctgcccagctgcatcgcagaatgtggcggccgcttcaagggggagagcagcggccgcatcctgagccctggctaccccttcccctatgacaacaacctgcgctgcatgtggatgattgaggtggaccccggcaacatcgtgtccctgcagttcctggcctttgacacagaggccagccatgacatcctgcgggtgtgggatggccccccagaaaatgacatgctgctgaaggagatcagcggcagcctcatccctgagggcatccacagcaccctgaacatcgtgaccatccagtttgacacagacttctacatcagcaagagcggctttgccatccagttcagcagctctgtggccacagcctgccgggaccccggggtgcccatgaatggcaccagaaatggagatggccgggagcccggggacacagtggtgttccagtgtgaccccggctatgagctgcagggcgaggagcgcatcacctgcatccaggtggagaaccgctacttctggcagcccagcccccctgtgtgcatcgccccctgtggcggcaacctgaccggcagcagcggcttcatcctgagccccaacttcccccacccctacccccacagccgggactgtgactggaccatcaccgtgaatgctgactatgtgatcagcctggccttcatctccttcagcattgagcccaactatgacttcctgtacatctatgatggccctgacagcaacagccccctgattggcagcttccaggacagcaagctgcctgagagaattgagagcagcagcaacaccatgcacctggccttcagaagtgatggctctgtgtcctacacaggcttccacctggagtacaaggccaagctgcgggagagctgctttgaccccggcaacatcatgaatggcacccggctgggcatggactacaagctgggcagcacagtgacctactactgtgatgctggctacgtgctgcagggctacagcaccctgacctgcatcatgggagatgatggccggcccggctggaacagagccctgcccagctgccacgccccctgtggcagccgcagcactggaagtgagggcaccgtgctgagccccaactaccccaagaactacagcgtgggccacaactgtgtgtacagcattgctgtgcccaaggagtttgtggtgtttggccagtttgtgttcttccagaccagcctgcatgatgtggtggaggtgtatgatggccccacccagcagagcagcctgctgagcagcctgagcggcagccacagcggggagagcctgcccctgagcagcggcaaccagatcaccatccgcttcacctctgtgggccccatcacagccaagggcttccactttgtgtaccaggccgtgcccaggaccagcagcacccagtgcagctctgtgcctgagccccgcttcggcagaagaattggaaatgaatttgctgtgggcagctctgtgctgtttgactgcaaccctggctacatcctgcacggcagcatcgccatccgctgtgagaccgtgcccaacagcctggcccagtggaatgacagcctgcccacctgcatcgtgccctgtggcggcatcctgaccaagaggaagggcaccatcctgagccctggctacccagagccctatgacaacaacctgaactgtgtgtggaagatcaccgtgcctgagggcgccggcatccaggtgcaggtggtgtcctttgccacagagcacaactgggacagcctggacttctatgatggaggagacaacaatgccccccggctgggcagctacagcggcaccaccatcccccacctgctgaacagcaccagcaacaacctgtacctgaacttccagagcgacatctctgtgtctgctgctggcttccacctggagtacacagccatcggcctggacagctgcccagagccccagacccccagcagcggcatcaagatcggggaccgctacatggtgggagatgtggtgtccttccagtgtgaccagggctacagcctgcagggccacagccacatcacctgcatgcctggccctgtgcggcgctggaactaccccatccccatctgcctggcccagtgtggcggggccatgtctgacttctctggagtcatcctgagccctggcttccctggcaactaccccagcagcctggactgcacctggaccatcaacctgcccatcggctttggagtgcacctgcagtttgtgaacttcagcacagagaccatccatgactacctggaggtgcgcagcggcagcagcgagaccagcaccgtcatcggccgcctgagcggcccccagatccccagcagcctcttcagcaccacccatgagaccagcctgtacttccacagcgactacagccagaacaagcagggcttccacatcgtgtaccaggcctaccagctgcagagctgcccagacccccggcccttcagaaatggatttgtgattggaaatgacttcaccgtgggccagaccatcagctttgagtgcttccctggctacaccctgattggcaacagcgccctgacctgcctgcacggcgtgtccaggaactggaaccaccccctgccccgctgtgaggccctgtgtggcggcaacatcacagccatgaatggcaccatctacagccctggctacccagatgagtaccccaacttccaggactgcttctggctggtgcgggtgcccccaggaaatggcatctacatcaacttcaccgtgctgcagacagagcccatctatgacttcatcaccgtgtgggatggccctgaccagaacagcccccagatcggccagttcagcggcaacacagccctggagagcgtgtacagcaccagcaaccagatcctgatcaagttccacagcgacttcaccaccagcggcttctttgtgctgagctaccacgcctaccagctgcgggtgtgccagcccccacctcctgtgcccaatgctgagatcctgacagaagatgatgaatttgaaattggagacatcatccgctaccagtgcctgcccggcttcaccctggtgggcaatgccatcctgacctgccgcctgggggagcggctgcagatggatggagcccctcctgtgtgccaggtgctgtgcccagccaatgagctgcggctggacagcactggagtcatcctgagccctggctacccagacagctaccccaacctgcagatgtgtgcctggagcatctctgtggagaagggctacaacatcaccatgtttgtggagttcttccagacagagaaggagtttgatgtgctgcaggtgtatgatggccccaacatccagagccctgtgctgatcagcctgagcggggactacagcagcgccttcaacatcaccagcaatggacatgaggtgttcctgcagtggagcgctgaccacggcaacaacaagaagggcttccgcatccgctacatcgccttctactgcagcaccccagagagcccccctcatggctacatcatcagccagacaggaggccagctgaacagcgtggtgcgctgggcctgtgaccggggcttccggctggtgggcaagagcagcgctgtgtgcaggaagagcagctatggctaccacgcctgggatgcccctgtgcctgcctgccaggccatcagctgtggcatccccaaggcccccaccaacggcggcatcctgaccacagactacctggtgggcaccagggtgacctacttctgcaatgatggctaccgcctgagcagcaaggagctgaccacagctgtgtgccagagtgatggcacctggagcaaccacaacaagaccccccgctgtgtggtgatcagctgtggggagctgcccaccccacccaacggcaacaagattggcacccagaccagctatggcagcacagccatcttcacctgtgacctgggcttcatgctggtgggcagcgctgtgagagaatgtctgagcagcggcctgtggagcgagagcgagacccgctgcctggccggccactgcggcatccctgagctgattgtgaatggccaggtgattggagagaactacggctacagagacacagtggtgtaccagtgcaaccctggcttccggctgattggcagctctgtgcgcatctgccagcaggaccacaactggagcggccagctgcccagctgtgtgcctgtgtcctgtggccaccctggcagccccatctacggccgcaccagcggaaatggcttcaacttcaatgatgtggtgaccttcagctgcaacatcggctacctgatgcagggccccaccaaggcccagtgccaggccaaccggcagtggagccaccccccacccatgtgcaaggtggtgaactgcagcgaccccggcatcccagccaacagcaagcgggagagcaagattgaacatggcaacttcacctacggcaccgtggtgttctatgactgcaaccctggctacttcctgtttggcagctctgtgctgatctgccagcccaacggccagtgggacaagcccctgcctgagtgcatcatgattgactgtggccaccctggggtgcccccaaatgctgtgctgagcggggagaagtacaccttcggcagcacagtgcactacagctgcaccgggaagaggagcctgctgggccagagcagcaggacctgccagctgaatggccactggagcggcagccagccccactgcagcggagatgccaccggcacctgtggggaccccggcaccccaggccacggcagccggcaggagagcaacttccgcaccaagagcacagtgcgctatgcctgtgacaccggctacatcctgcacggcagcgaggagaggacctgcctggccaacggctcctggacaggccggcagcctgagtgcaaggctgtgcagtgtggcaaccctggcaccacagccaacgggaaggtgttcagaattgatggcaccaccttcagcagcagcgtcatctacagctgcatggagggctacatcctgagcggccccagcgtgcggcagtgcacagccaacggcacctggagcggcaccctgcccaactgcaccatcatcagctgtggggaccccggcatcccagccaacggcctgcgctatggagatgattatgtggtgggccagaatgtgtcctacatgtgccagcccggctacaccatggagctgaatggcagccgcatccgcacctgcaccatcaatggcacctggagcggcgtgatgcccacctgcagagctgtgacctgccccaccccaccccagatcagcaatggccgcctggagggcaccaactttgactggggcttcagcatctcctacatctgcagccctggctatgagctgtccttccctgctgtgctgacctgtgtgggcaatggcacctggagcggggaggtgccccagtgcctgcccaagttctgtggggaccccggcatcccagcccagggcaagcgggagggcaagagcttcatctaccagagcgaggtgtccttcagctgcaacttccccttcatcctggtgggcagcagcacccgcatctgccaggctgatggcacctggagcggcagcagcccccactgcatcgagcccacccagaccagctgtgagaaccctggggtgcccaggcatggcagccagaacaacaccttcggcttccaggtgggctctgtggtgcagttccactgcaagaagggccacctgctgcagggcagcaccaccaggacctgcctgcctgacctgacctggagcggcatccagcctgagtgcatcccccacagctgcaagcagcctgagaccccagcccacgccaacgtggtgggcatggacctgcccagccacggctacaccctcatctacacctgccagcccggcttcttcctggccggcggcacagagcaccgggtgtgccgcagtgacaacacctggacaggcaaggtgcccatctgtgaggccggcagcaagatcctggtgaaggaccccaggcctgccctgggcacccccagccccaagctgtctgtgcctgatgatgtgtttgcccagaactacatctggaagggcagctacaacttcaagggcaggaagcagcccatgaccctgactgtgaccagcttcaatgccagcacaggccgggtgaatgccaccctgagcaacagcaacatggagctgctgctgtctggagtgtacaagagccaggaggcccggctgatgctgcgcatctacctgatcaaggtgcctgcccacgcctctgtgaagaagatgaaggaggagaactgggccatggatggctttgtgtctgctgagccagatggagccacctacgtgttccagggcttcatccagggcaaggactatggccagtttggcctgcagaggctgggcctgaacatgtctgagggcagcaacagcagcaaccagccccacggcaccaacagcagctctgtggccatcgccatcctggtgcccttctttgccctgatctttgctggcttcggcttctacctgtacaagcagaggacagcccccaagacccagtacacaggctgcagcgtgcatgagaacaacaacggccaggccgcctttgagaaccccatgtatgacaccaatgccaagtctgtggagggcaaggctgtgcgctttgaccccaacctgaacacagtgtgcaccatggtgtag

SEQ ID NO: 148719 - DNA, 2511 bp, synthetic construct
  misc_feature 1..2511: note = Description of Artificial Sequence: Synthetic coding sequence
  source 1..2511: mol_type = other DNA
atggccggcctgaactgtggggtgtccatcgccctgctgggcgtgctgctgctgggcgccgcccggctgcccagaggagctgaggcctttgagatcgccctgccccgggagagcaacatcaccgtgctgatcaagctgggcacccccaccctgctggccaagccctgctacatcgtcatcagcaagaggcacatcaccatgctgagcatcaagagcggggagcgcatcgtgttcaccttcagctgccagagccctgagaaccactttgtgattgagatccagaagaacatcgactgcatgagcggcccctgcccctttggagaggtgcagctgcagcccagcaccagcctgctgcccaccctgaacagaaccttcatctgggatgtgaaggcccacaagagcatcggcctggagctgcagttcagcatcccccggctgcggcagatcggccctggagagagctgcccagatggagtgacccacagcatcagcggcagaattgatgccaccgtggtgcgcatcggcaccttctgcagcaatggcaccgtgagccgcatcaagatgcaggagggcgtgaagatggccctgcacctgccctggttccaccccagaaatgtgtctggcttcagcatcgccaacagaagcagcatcaagaggctgtgcatcattgaatctgtgtttgaaggagagggcagcgccaccctgatgtctgccaactacccagagggcttcccagaagatgagctgatgacctggcagtttgtggtgcctgcccacctgcgggcctctgtgtccttcctgaacttcaacctgagcaactgtgagaggaaggaggagcgggtggagtactacatccctggcagcaccaccaaccctgaggtgttcaagctggaggacaagcagcccggcaacatggccggcaacttcaacctgagcctgcagggctgtgaccaggatgcccagagccctggcatcctgcggctgcagttccaggtgctggtgcagcacccccagaatgaaagcaacaagatctacgtggtggacctgagcaatgaaagagccatgagcctgaccatcgagcccaggcctgtgaagcagagcaggaagtttgtgcccggctgctttgtgtgcctggagagcaggacctgcagcagcaacctgaccctgaccagcggcagcaagcacaagatctccttcctgtgtgatgacctgacccggctgtggatgaatgtggagaagaccatcagctgcacagaccaccgctactgccagaggaagagctacagcctgcaggtgcccagcgacatcctgcacctgcctgtggagctgcatgacttctcctggaagctgctggtgcccaaggaccggctgagcctggtgctggtgcctgcccagaagctgcagcagcacacccatgagaagccctgcaacaccagcttctcctacctggtggccagcgccatccccagccaggacctgtacttcggcagcttctgccctgggggcagcatcaagcagatccaggtgaagcagaacatctctgtgaccctgcggacctttgcccccagcttccagcaggaggccagccggcagggcctgactgtgtccttcatcccctacttcaaggaggagggcgtcttcaccgtgaccccagacaccaagagcaaggtgtacctgcggacccccaactgggaccggggcctgcccagcctgacctctgtgtcctggaacatctctgtgccccgggaccaggtggcctgcctgaccttcttcaaggagaggtctggagtggtgtgccagacaggccgggccttcatgatcatccaggagcagaggaccagggctgaggagatcttcagcctggatgaagatgtgctgcccaagcccagcttccaccaccacagcttctgggtgaacatcagcaactgcagccccaccagcggcaagcagctggacctgctcttctctgtgaccctgacccccaggacagtggacctgaccgtcatcctgattgctgctgtgggcggcggcgtgctgctgctgagcgccctgggcctcatcatctgctgcgtgaagaagaagaagaagaagaccaacaagggccctgctgtgggcatctacaatgacaacatcaacacagagatgccccggcagcccaagaagttccagaagggcaggaaggacaatgacagccacgtgtatgctgtgattgaggacaccatggtgtatggccacctgctgcaggacagcagcggcagcttcctgcagcctgaggtggacacctaccggcccttccagggcaccatgggcgtgtgcccccccagcccccccaccatctgcagccgggcccccacagccaagctggccacagaggagcccccacccaggagccccccagagagcgagagcgagccctacaccttcagccaccccaacaatggagatgtgagcagcaaggacacagacatccccctgctgaacacccaggagcccatggagcctgctgagtag

SEQ ID NO: 148720 - DNA, 1032 bp, synthetic construct
  misc_feature 1..1032: note = Description of Artificial Sequence: Synthetic coding sequence
  source 1..1032: mol_type = other DNA
atggccggcctgaactgtggggtgtccatcgccctgctgggcgtgctgctgctgggcgccgcccggctgcccagaggagctgaggcctttgagatcgccctgccccgggagagcaacatcaccgtgctgatcaagctgggcacccccaccctgctggccaagccctgctacatcgtcatcagcaagaggcacatcaccatgctgagcatcaagagcggggagcgcatcgtgttcaccttcagctgccagagccctgagaaccactttgtgattgagatccagaagaacatcgactgcatgagcggcccctgcccctttggagaggtgcagctgcagcccagcaccagcctgctgcccaccctgaacagaaccttcatctgggatgtgaaggcccacaagagcatcggcctggagctgcagttcagcatcccccggctgcggcagatcggccctggagagagctgcccagatggagtgacccacagcatcagcggcagaattgatgccaccgtggtgcgcatcggcaccttctgcagcaatggcaccgtgagccgcatcaagatgcaggagggcgtgaagatggccctgcacctgccctggttccaccccagaaatgtgtctggcttcagcatcgccaacagaagcagcatcaagaggctgtgcatcattgaatctgtgtttgaaggagagggcagcgccaccctgatgtctgccaactacccagagggcttcccagaagatgagctgatgacctggcagtttgtggtgcctgcccacctgcgggcctctgtgtccttcctgaacttcaacctgagcaactgtgagaggaaggaggagcgggtggagtactacatccctggcagcaccaccaaccctgaggtgttcaagctggaggacaagcagcccggcaacatggccggcaacttcaacctgagcctgcagggctgtgaccaggatgcccagagccctggcatcctgcggctgcagttccaggtgctggtgcagcacccccagaatgaaagcagcgagtag

SEQ ID NO: 148721 - DNA, 513 bp, synthetic construct
  misc_feature 1..513: note = Description of Artificial Sequence: Synthetic coding sequence
  source 1..513: mol_type = other DNA
atgatgaacatgagcctgcccttcctgtggagcctgctgaccctgctgatctttgctgaggtgaatggagaggccggggagctggagctgcagaggcagaagaggagcatcaacctgcagcagcccaggatggccacagagcggggcaacctggtgttcctgactggaagtgcccagaacatcgagttcagaacaggcagcctgggcaagatcaagctgaatgatgaggacctgtctgagtgcctgcaccagatccagaagaacaaggaggacatcatcgagctgaagggcagcgccatcggcctgccccagaacatcagcagccagatctaccagctgaacagcaagctggtggacctggagaggaagttccagggcctgcagcagacagtggacaagaaggtgtgcagcagcaacccctgccagaatggaggcacctgcctgaacctgcatgacagcttcttctgcatctgccccccccagtggaaggtgagccacctgctgtttggatag

SEQ ID NO: 148722 - DNA, 10872 bp, synthetic construct
  misc_feature 1..10872: note = Description of Artificial Sequence: Synthetic coding sequence
  source 1..10872: mol_type = other DNA
atgatgaacatgagcctgcccttcctgtggagcctgctgaccctgctgatctttgctgaggtgaatggagaggccggggagctggagctgcagaggcagaagaggagcatcaacctgcagcagcccaggatggccacagagcggggcaacctggtgttcctgactggaagtgcccagaacatcgagttcagaacaggcagcctgggcaagatcaagctgaatgatgaggacctgtctgagtgcctgcaccagatccagaagaacaaggaggacatcatcgagctgaagggcagcgccatcggcctgccccagaacatcagcagccagatctaccagctgaacagcaagctggtggacctggagaggaagttccagggcctgcagcagacagtggacaagaaggtgtgcagcagcaacccctgccagaatggaggcacctgcctgaacctgcatgacagcttcttctgcatctgccccccccagtggaagggccccctgtgcagcgcagatgtgaatgaatgtgagatctacagcggcacccccctgagctgccagaatggaggcacctgtgtgaacaccatgggcagctacagctgccactgccccccagagacctacggcccccagtgtgccagcaaatatgatgactgtgagggcggctctgtggcccgctgtgtgcacggcatctgtgaggacctgatgagggagcaggccggggagcccaagtacagctgtgtgtgtgatgctggctggatgttcagccccaacagccctgcctgcaccctggacagagatgagtgcagcttccagcccggcccctgcagcaccctggtgcagtgcttcaacacccagggcagcttctactgtggggcctgccccaccggctggcagggcaatggctacatctgtgaggacatcaatgaatgtgagatcaacaatggaggctgcagcgtggcccctcctgtggagtgtgtgaacaccccaggcagcagccactgccaggcctgccccccaggctaccagggagatggccgggtgtgcaccctgacagacatctgcagcgtgtccaatggaggctgccacccagatgccagctgcagcagcaccctgggcagcctgcccctgtgcacctgcctgcccggctacacaggaaatggctacggccccaacggctgtgtgcagctgagcaacatctgcctgagccacccctgcctgaatggccagtgcatcgacacagtgtctggctacttctgcaagtgtgacagcggctggacaggagtgaactgcacagagaacatcaatgaatgtctgagcaacccctgcctgaatggaggcacctgtgtggatggagtggacagcttcagctgtgaatgtacccggctgtggacaggagccctgtgccaggtgccccagcaggtgtgtggggagagcctgagcggcatcaatggcagcttctcctaccgcagcccagatgtgggctacgtgcatgatgtgaactgcttctgggtgatcaagacagagatgggcaaggtgctgcgcatcaccttcaccttcttccggctggagagcatggacaactgcccccatgagttcctgcaggtgtatgatggagacagcagcagcgccttccagctgggccgcttctgtggcagcagcctgccccatgagctgctgagcagtgacaatgccctgtacttccacctgtacagcgagcacctgagaaatggccggggcttcaccgtgcgctgggagacccagcagccagaatgtggcggcatcctgaccggcccctacggcagcatcaagagccctggctacccaggcaactacccacctggccgggactgtgtgtggatcgtggtgaccagcccagacctgctggtgaccttcaccttcggcaccctgagcctggagcaccatgatgactgcaacaaggactacctggagatcagagatggccccctgtaccaggaccccctgctgggcaagttctgcaccaccttctctgtgccccccctgcagaccaccggcccctttgcccgcatccacttccacagcgacagccagatcagtgaccagggcttccacatcacctacctgaccagccccagcgacctgcgctgtggcggcaactacacagatcctgagggggagctgttcctgcctgagctgagcggccccttcacccacacccggcagtgtgtgtacatgatgaagcagccccagggcgagcagatccagatcaacttcacccacgtggagctgcagtgccagagcgacagcagccagaactacatcgaggtgagagatggagagaccctgctgggcaaggtgtgtggaaatggcaccatcagccacatcaagagcatcaccaacagcgtgtggatccgcttcaagattgatgcctctgtggagaaggccagcttccgggctgtgtaccaggtggcctgtggagatgagctgaccggggagggcgtcatccgcagccccttcttccccaacgtgtacccaggagagaggacctgccgctggaccatccaccagccccagagccaggtgatcctgctgaacttcaccgtgtttgaaattggcagcagcgcccactgtgaaacagattatgtggagatcggcagcagcagcatcctgggcagccctgagaacaagaagtactgcggcacagacatccccagcttcatcacctctgtgtacaacttcctgtatgtgacctttgtgaagagcagcagcacagaaaatcatggcttcatggccaagttctctgctgaggacctggcctgtggggagatcctgacagagagcacaggcaccatccagagccctggccaccccaacgtgtacccccacggcatcaactgcacctggcacatcctggtgcagcccaaccacctgatccacctgatgtttgagaccttccacctggagttccactacaactgcaccaatgactacctggaggtgtatgacacagattctgagaccagcctgggccgctactgcggcaagagcatcccccccagcctgaccagcagcggcaacagcctgatgctggtgtttgtgacagacagcgacctggcctatgagggcttcctgatcaactatgaggccatctctgctgccacagcctgcctgcaggactacacagatgacctgggcaccttcaccagccccaacttccccaacaactaccccaacaactgggagtgcatctaccgcatcaccgtgaggacaggccagctgattgctgtgcacttcaccaacttcagcctggaggaggccatcggcaactactacacagacttcctggagatcagagatggcggctatgagaagagccccctgctgggcatcttctacggcagcaacctgccccccaccatcatcagccacagcaacaagctgtggctgaagttcaagagtgaccagattgacaccaggagcggcttcagcgcctactgggatggcagcagcacaggctgcggcggcaacctgaccaccagcagcggcaccttcatcagccccaactaccccatgccctactaccacagcagcgagtgctactggtggctgaagagcagccacggcagcgcctttgagctggagttcaaggacttccacctggagcaccaccccaactgcaccctggactacctggccgtgtatgatggccccagcagcaacagccacctgctgacccagctgtgtggagatgagaagcccccactcatccgcagcagcggggacagcatgttcatcaagctgaggacagatgagggccagcagggccggggcttcaaggccgagtaccggcagacctgtgaaaatgtggtgattgtgaaccagacctacggcatcctggagagcatcggctaccccaacccctacagcgagaaccagcactgcaactggaccatccgggccaccaccggcaacacagtgaactacaccttcctggcctttgacctggagcaccacatcaactgcagcacagactacctggagctgtatgatggcccccggcagatgggccgctactgcggcgtggacctgcccccacctggcagcaccaccagcagcaagctgcaggtgctgctgctgacagatggagtgggcagaagagagaagggcttccagatgcagtggtttgtgtatggctgcggcggggagctgagcggggccaccggcagcttcagcagccctggcttccccaaccgctacccacccaacaaggagtgcatctggtacatcagaacagatcctggcagcagcatccagctgaccatccatgactttgatgtggagtaccacagccgctgcaactttgatgtgctggagatctacggcggccctgacttccacagcccccgcatcgcccagctgtgcacccagaggagccctgagaaccccatgcaggtgagcagcactggaaatgagctggccatccgcttcaagacagacctgagcatcaatggccggggcttcaatgcctcctggcaggccgtgactggaggctgcggcggcatcttccaggcccccagcggggagatccacagccccaactaccccagcccctaccgcagcaacacagactgctcctgggtgatccgggtggacaggaaccaccgggtgctgctgaacttcacagactttgacctggagccccaggacagctgcatcatggcctatgatggcctgagcagcaccatgagccggctggcccggacctgtggccgggagcagctggccaaccccatcgtgagcagcggcaacagcctcttcctgcgcttccagagcggccccagccggcagaacagaggcttccgggcccagttccggcaggcctgtggcggccacatcctgaccagcagctttgacacagtgagcagcccccgcttccctgccaactaccccaacaaccagaactgctcctggatcatccaggcccagccccccctgaaccacatcaccctgtccttcacccactttgagctggagaggagcaccacctgtgcccgggactttgtggagatcctggatggcggccatgaagatgcccccctgcggggccgctactgcggcacagacatgccccaccccatcaccagcttcagcagcgccctgaccctgcgctttgtgtctgacagcagcatctctgctgggggcttccacaccaccgtgacagcctctgtgtctgcctgtggcggcaccttctacatggccgagggcatcttcaacagccctggctacccagacatctaccccccaaatgtggagtgtgtgtggaacatcgtgagcagccctggcaaccggctgcagctgtccttcatctccttccagctggaggacagccaggactgcagccgggactttgtggagatccgggagggcaatgccaccggccacctggtgggccgctactgcggcaacagcttccccctgaactacagcagcatcgtgggccacaccctgtgggtgcgcttcatcagtgatggcagcggcagcggcaccggcttccaggccaccttcatgaagatctttggaaatgacaacatcgtgggcacccacggcaaggtggccagccccttctggccagagaactacccccacaacagcaactaccagtggacagtgaatgtgaatgccagccacgtggtgcacggccgcatcctggagatggacatcgaggagatccagaactgctactatgacaagctgcgcatctatgatggccccagcatccacgcccggctgattggagcctactgcggcacccagacagagagcttcagcagcactggaaacagcctgaccttccacttctacagcgacagcagcatcagcggcaagggcttcctgctggagtggtttgctgtggatgccccagatggagtgctgcccaccatcgcccctggggcctgtggcggcttcctgaggactggagatgcccctgtgttcctgttcagccctggctggccagacagctacagcaacagagtggactgcacctggctgatccaggccccagacagcacagtggagctgaacatcctgagcctggacatcgagagccacaggacctgtgcctatgacagcctggtgatcagagatggagacaacaacctggcccagcagctggccgtgctgtgtggccgggagatccctggccccatccgcagcactggagagtacatgttcatccgcttcaccagtgacagctctgtgacccgggccggcttcaatgccagcttccacaagagctgtggcggctacctgcacgccgaccggggcatcatcaccagccccaagtacccagagacctaccccagcaacctgaactgctcctggcacgtgctggtgcagagcggcctgaccatcgctgtgcactttgagcagcccttccagatccccaacggggacagcagctgcaaccagggcgactacctggtgctgagaaatggaccagacatctgcagcccccccctgggccccccaggcggcaatggccacttctgtggcagccacgccagcagcaccctcttcaccagtgacaaccagatgtttgtgcagttcatcagtgaccacagcaatgaaggccagggcttcaagatcaagtatgaggccaagagcctggcctgtggcggcaatgtgtacatccatgatgctgacagcgctggctacgtgaccagccccaaccacccccacaactacccacctcatgctgactgcatctggatcctggccgcccctcctgagacccgcatccagctgcagtttgaggacagatttgatattgaggtgacccccaactgcaccagcaactacctggagctgagagatggagtggacagtgatgcccccatcctgagcaagttctgtggcaccagcctgcccagcagccagtggagcagcggggaggtgatgtacctgcgcttcagaagtgacaacagccccacccacgtgggcttcaaggccaagtacagcatcgcccagtgtggcggccgggtgcccggccagagcggcgtggtggagagcatcggccaccccaccctgccctacagagacaacctcttctgtgagtggcacctgcagggcctgagcggccactacctgaccatcagctttgaggacttcaacctgcagaacagcagcggctgtgagaaggactttgtggagatctgggacaaccacaccagcggcaacatcctgggccgctactgcggcaacaccatcccagacagcattgacaccagcagcaacacagctgtggtgcgctttgtgacagatggctctgtgacagccagcggcttccggctgcgctttgagagctccatggaggagtgtggcggggacctgcagggcagcatcggcaccttcaccagccccaactaccccaaccccaacccccacggccgcatctgtgagtggaggatcacagcccctgagggccgccgcatcaccctgatgttcaacaacctgcggctggccacccaccccagctgcaacaatgaacatgtgattgtgttcaacggcatccgcagcaacagcccccagctggagaagctgtgcagctctgtgaatgtgtccaatgagatcaagagcagcggcaacaccatgaaggtgatcttcttcacagatggcagccggccctatggaggcttcaccgccagctacaccagcagtgaagatgctgtgtgtggcggcagcctgcccaacaccccagagggcaacttcaccagccctggctatgatggagtgaggaactacagcaggaacctgaactgtgagtggaccctgagcaaccccaaccagggcaacagcagcatcagcatccactttgaggacttctacctggagagccaccaggactgccagtttgatgtgctggagttccgggtgggagatgctgatggccccctgatgtggaggctgtgtggccccagcaagcccaccctgcccctggtgatcccctacagccaggtgtggatccactttgtgaccaatgaaagagtggagcacatcggcttccacgccaagtacagcttcacagactgtggcggcatccagatcggggacagcggggtcatcaccagccccaactacccaaatgcctatgacagcctgacccactgcagcagcctgctggaggccccccagggccacaccatcaccctgaccttcagtgactttgacatcgagccccacaccacctgtgcctgggacagcgtgacagtgagaaatggaggcagccctgagagccccatcatcggccagtactgcggcaacagcaaccccaggaccatccagagcggcagcaaccagctggtggtgaccttcaacagcgaccacagcctgcagggcggcggcttctacgccacctggaacacccagaccctgggctgcggcggcatcttccacagcgacaatggcaccatccgcagcccccactggccccagaacttccctgagaacagccgctgctcctggacagccatcacccacaagagcaagcacctggagatcagctttgacaacaacttcctgatccccagcggagatggccagtgccagaacagctttgtgaaggtgtgggccggcacagaggaggtggacaaggccctgctggccaccggctgtggaaatgtggcccctggccctgtgatcacccccagcaacaccttcaccgctgtgttccagagccaggaggccccagcccagggcttcagcgccagctttgtgagccgctgtggcagcaacttcaccggccccagcggctacatcatcagccccaactaccccaagcagtatgacaacaacatgaactgcacctacgtgattgaggccaaccccctgtctgtggtgctgctgacctttgtgtccttccacctggaggcccggtctgctgtgacaggcagctgtgtgaatgatggagtgcacatcatccggggctacagcgtgatgagcaccccatttgccaccgtgtgtggagatgagatgcctgcccccctgaccatcgccggccctgtgctgctgaacttctacagcaatgagcagatcacagactttggcttcaagttctcctaccgcatcatcagctgtggcggcgtcttcaacttcagcagcggcatcatcaccagccctgcctacagctatgctgactacccaaatgacatgcactgcctgtacaccatcaccgtgtctgatgacaaggtgattgagctgaagttcagtgactttgatgtggtgcccagcaccagctgcagccatgactacctggccatctatgatggagccaacaccagtgaccccctgctgggcaagttctgtggcagcaagaggcctcccaacgtgaagagcagcaacaacagcatgctgctggtgttcaagacagacagcttccagacagccaagggctggaagatgtccttccggcagaccctgggcccccagcagggctgcggcggctacctgaccggcagcaacaacacctttgccagcccagacagcgacagcaatggcatgtatgacaagaacctgaactgtgtgtggatcatcatcgcccctgtgaacaaggtgatccacctgaccttcaacacctttgccctggaggccgccagcacccggcagcgctgcctgtatgactatgtgaagctgtatgatggagacagtgaaaatgccaacctggccggcaccttctgtggcagcacagtgcctgcccccttcatcagcagcggcaacttcctgactgtgcagttcatcagtgacctgaccctggagcgggagggcttcaatgccacctacaccatcatggacatgccctgtggcggcacctacaatgccacctggaccccccagaacatcagcagccccaacagcagtgaccctgatgtgcccttcagcatctgcacctgggtgattgacagccccccccaccagcaggtgaagatcaccgtgtgggccctgcagctgaccagccaggactgcacccagaactacctgcagctgcaggacagcccccagggccacggcaacagccgcttccagttctgtggcagaaatgccagcgctgtgcctgtgttctacagctccatgagcacagccatggtgatcttcaagtctggagtggtgaacagaaacagcaggatgtccttcacctaccagattgctgactgcaacagagactaccacaaggcctttggaaacctgcggagccctggctggccagacaactatgacaatgacaaggactgcaccgtgaccctgacagccccccagaaccacaccatcagcctcttcttccacagcctgggcattgaaaattctgtggagtgcagaaatgacttcctggaggtgagaaatggcagcaacagcaacagccccctgctgggcaagtactgcggcaccctgctgcccaaccctgtgttcagccagaacaatgagctgtacctgcgcttcaagagtgacagcgtgaccagtgaccggggctatgagatcatctggaccagcagccccagcggctgcggcggcaccctgtatggagaccggggcagcttcaccagccctggctacccaggcacctaccccaacaacacctactgtgagtgggtgctggtggccccagctggccgcctggtgaccatcaacttctacttcatcagcattgatgatcctggggactgtgtgcagaactacctgaccctgtatgatggccccaatgccagcagccccagcagcggcccctactgcggcggggacaccagcatcgccccctttgtggccagcagcaaccaggtgttcatcaagttccacgccgactatgcccggcggcccagcgccttccggctgacctgggacagctag

SEQ ID NO: 148723 - DNA, 318 bp, synthetic construct
  misc_feature 1..318: note = Description of Artificial Sequence: Synthetic coding sequence
  source 1..318: mol_type = other DNA
aacagcaagctggtggacctggagaggaagttccagggcctgcagcagacagtggacaagaaggtgtgcagcagcaacccctgccagaatggaggcacctgcctgaacctgcatgacagcttcttctgcatctgccccccccagtggaagggccccctgtgcagcgcagatgtgaatgaatgtgagatctacagcggcacccccctgagctgccagaatggaggcacctgtgtgaacaccatgggcagctacagaaacccctgcagcaacatccccaaggagcctgaggagggcagccgggactggcaccgggagtag

SEQ ID NO: 148724 - DNA, 267 bp, synthetic construct
  misc_feature 1..267: note = Description of Artificial Sequence: Synthetic coding sequence
  source 1..267: mol_type = other DNA
agcactggaaatgagctggccatccgcttcaagacagacctgagcatcaatggccggggcttcaatgcctcctggcaggccgtgactggaggctgcggcggcatcttccaggcccccagcggggagatccacagccccaactaccccagcccctaccgcagcaacacagactgctcctgggtgatccgggtggacaggaaccaccgggtgctgctgaacttcacagactttgacctggagccccaggacagctgcatcatggtgtag

SEQ ID NO: 148725 - DNA, 1395 bp, synthetic construct
  misc_feature 1..1395: note = Description of Artificial Sequence: Synthetic coding sequence
  source 1..1395: mol_type = other DNA
atgagccacagctggaatgtgctgtggctgaccttctgcagcgacagcaatggcatgtatgacaagaacctgaactgtgtgtggatcatcatcgcccctgtgaacaaggtgatccacctgaccttcaacacctttgccctggaggccgccagcacccggcagcgctgcctgtatgactatgtgaagctgtatgatggagacagtgaaaatgccaacctggccggcaccttctgtggcagcacagtgcctgcccccttcatcagcagcggcaacttcctgactgtgcagttcatcagtgacctgaccctggagcgggagggcttcaatgccacctacaccatcatggacatgccctgtggcggcacctacaatgccacctggaccccccagaacatcagcagccccaacagcagtgaccctgatgtgcccttcagcatctgcacctgggtgattgacagccccccccaccagcaggtgaagatcaccgtgtgggccctgcagctgaccagccaggactgcacccagaactacctgcagctgcaggacagcccccagggccacggcaacagccgcttccagttctgtggcagaaatgccagcgctgtgcctgtgttctacagctccatgagcacagccatggtgatcttcaagagcggcgtggtgaacagaaacagcaggatgtccttcacctaccagattgctgactgcaacagagactaccacaaggccttcggcaacctgcggagccctggctggccagacaactatgacaatgacaaggactgcaccgtgaccctgacagccccccagaaccacaccatcagcctcttcttccacagcctgggcatcgagaacagcgtggagtgcagaaatgacttcctggaggtgagaaatggcagcaacagcaacagccccctgctgggcaagtactgcggcaccctgctgcccaaccctgtgttcagccagaacaatgagctgtacctgcgcttcaagagtgacagcgtgaccagtgaccggggctatgagatcatctggaccagcagccccagcggctgcggcggcaccctgtatggagaccggggcagcttcaccagccctggctacccaggcacctaccccaacaacacctactgtgagtgggtgctggtggccccagctggccgcctggtgaccatcaacttctacttcatcagcattgatgaccccggggactgtgtgcagaactacctgaccctgtatgatggccccaatgccagcagccccagcagcggcccctactgcggcggggacaccagcatcgccccctttgtggccagcagcaaccaggtgttcatcaagttccacgccgactatgcccggcggcccagcgccttccggctgacctgggacagctag

SEQ ID NO: 148726 - DNA, 864 bp, synthetic construct
  misc_feature 1..864: note = Description of Artificial Sequence: Synthetic coding sequence
  source 1..864: mol_type = other DNA
atggagctggagcgcatcgtgtctgctgccctgctggcctttgtgcagacccacctgcctgaggccgacctgagcggcctggatgaggtgatcttctcctatgtgctgggcgtgctggaggacctgggccccagcggccccagcgaggagaactttgacatggaggccttcacagagatgatggaggcctacgtgcccggctttgcccacatcccccggggcaccatcggggacatgatgcagaagctgagcggccagctgagtgatgccaggaacaaggagaacctgcagccccagagcagtggagtgcagggccaggtgcccatcagccctgagcccctgcagaggcctgagatgctgaaggaggagaccaggagcagcgctgctgctgctgctgacacccaggatgaggccactggagctgaggaggagctgctgcccggggtggatgtgctgctggaggtgttccccacctgcagcgtggagcaggcccagtgggtgctggccaaggcccggggggacctggaggaggccgtgcagatgctggtggagggcaaggaggagggccctgctgcctgggagggccccaaccaggacctgccccggcggctgcggggcccccagaaggatgagctgaagagcttcatcctgcagaagtacatgatggtggacagcgctgaggaccagaagatccaccggcccatggcccccaaggaggcccccaagaagctgatccgctacatcgacaaccaggtggtgtccaccaagggggagcgcttcaaggatgtgaggaaccctgaggccgaggagatgaaggccacctacatcaacctgaagccagccaggaagtaccgcttccactag

SEQ ID NO: 148727 - DNA, 1365 bp, synthetic construct
  misc_feature 1..1365: note = Description of Artificial Sequence: Synthetic coding sequence
  source 1..1365: mol_type = other DNA
atggctgctgcccctgggggcagcgcccagcctgctggccctggcccccggctgggcttcagcacagctgacagcggcgtgggcatgagcggcctgaaccctggccctgctgtgcccatgaaggaccatgatgccatcaagctgtttgtgggccagatcccccggggcctggatgagcaggacctgaagcccctgtttgaggagtttggccgcatctatgagctgactgtgctgaaggaccggctgaccggcctgcacaagggctgtgccttcctgacctactgtgcccgggacagcgccctgaaggcccagagcgccctgcacgagcagaagaccctgcccggcatgaaccggcccatccaggtgaagccagctgccagcgagggccgcggggaggacaggaagctgtttgtgggcatgctgggcaagcagcagggcgaggaggatgtgagaagactcttccagcccttcggccacatcgaggagtgcaccgtgctgcggagcccagatggcaccagcaagggctgtgcctttgtgaagtttggcagccagggcgaggcccaggccgccatccggggcctgcacggcagcaggaccatggccggggccagcagcagcctggtggtgaagctggccgacacagaccgggagcgggccctgcggaggatgcagcagatggccggccacctgggcgccttccacccagcccccctgcccctgggcgcctgtggggcctacaccacagccatcctgcagcaccaggccgccctgctggccgccgcccagggccctggcctgggccctgtggccgctgtggccgcccagatgcagcacgtggccgccttcagcctggtggccgcccccctgctgcctgctgctgctgccaacagccccccaggcagcggccctggcaccctgcccggcctgcctgcccccatcggcgtgaatggcttcggccccctgaccccccagaccaacggccagcccggcagtgacaccctgtacaacaacggcctgagcccctacccagcccagagccctggggtggccgaccccctgcagcaggcctatgccggcatgcaccactacgccggccctgagggctgcaacctcttcatctaccacctgccccaggagtttggagatgctgagctgatccagaccttcctgccctttggagctgtggtgtctgccaaggtgtttgtggaccgggccaccaaccagagcaagtgcttcggctttgtgtcctttgacaaccccaccagcgcccagacagccatccaggccatgaatggcttccagatcggcatgaagaggctgaaggtgcagctgaagaggcccaaggatgccaaccggccctactag

SEQ ID NO: 148728 - DNA, 1398 bp, synthetic construct
  misc_feature 1..1398: note = Description of Artificial Sequence: Synthetic coding sequence
  source 1..1398: mol_type = other DNA
atgaaggagccagatgccatcaagctgtttgtgggccagatccccaggcacctggaggagaaggacctgaagcccatctttgagcagtttggccgcatctttgagctgaccgtcatcaaggacaagtacacaggcctgcacaagggctgtgccttcctgacctactgtgcccgggacagcgccctgaaggcccagagcgccctgcacgagcagaagaccctgcccggcatgaaccggcccatccaggtgaagccagctgacagcgagagcagaggagaggacaggaagctgtttgtgggcatgctgggcaagcagcagacagatgaagatgtgaggaagatgtttgagcccttcggcaccattgatgaatgtactgtgctgcggggcccagatggcaccagcaagggctgtgcctttgtgaagttccagacccacgccgaggcccaggccgccatcaacaccctgcacagcagcaggaccctgcccggggccagcagcagcctggtggtgaagtttgctgacacagagaaggagcggggcctgcggaggatgcagcaggtggccacccagctgggcatgttcagccccatcgccctgcagtttggagcctacagcgcctacacccaggccctgatgcagcagcaggccgccctggtggccgcccacagcgcctacctgagccccatggccaccatggctgctgtgcagatgcagcacatggccgccatcaatgccaacggcctgattgccacccccatcacccccagcagcggcaccagcaccccaccagccatcgccgccacccctgtgtctgccatcccagctgccctgggcgtgaatggctacagccctgtgcccacccagcccaccggccagcctgccccagatgccctgtacccaaatggagtgcacccctacccagcccagagccctgctgcccctgtggaccccctgcagcaggcctatgccggcatgcagcactacacagctgcctacccagctgcctacagcctggtggccccagccttcccccagcccccagccctggtggcccagcagcccccacctccaccccagcagcagcagcagcagcagcagcagcagcagcagcagcagcagcgggagggcccagatggctgcaacatcttcatctaccacctgccccaggagttcacagacagcgagatcctgcagatgtttgtgccctttggacatgtgatcagcgccaaggtgtttgtggaccgggccaccaaccagagcaaatgttttggatttgtgtcctttgacaacccagccagcgcccaggccgccatccaggccatgaatggcttccagatcggcatgaagaggctgaaggtgcagctgaagaggcccaaggatgccaaccggccctactag

SEQ ID NO: 148729 - DNA, 1248 bp, synthetic construct
  misc_feature 1..1248: note = Description of Artificial Sequence: Synthetic coding sequence
  source 1..1248: mol_type = other DNA
atgaaggagccagatgccatcaagctgtttgtgggccagatccccaggcacctggaggagaaggacctgaagcccatctttgagcagtttggccgcatctttgagctgaccgtcatcaaggacaagtacacaggcctgcacaagggctgtgccttcctgacctactgtgcccgggacagcgccctgaaggcccagagcgccctgcacgagcagaagaccctgcccggcatgaaccggcccatccaggtgaagccagctgacagcgagagcagaggagaggacaggaagctgtttgtgggcatgctgggcaagcagcagacagatgaagatgtgaggaagatgtttgagcccttcggcaccattgatgaatgtactgtgctgcggggcccagatggcaccagcaagggctgtgcctttgtgaagttccagacccacgccgaggcccaggccgccatcaacaccctgcacagcagcaggaccctgcccggggccagcagcagcctggtggtgaagtttgctgacacagagaaggagcggggcctgcggaggatgcagcaggtggccacccagctgggcatgttcagccccatcgccctgcagtttggagcctacagcgcctacacccaggccctgatgcagcagcaggccgccctggtggccgcccacagcgcctacctgagccccatggccaccatggctgctgtgcagatgcagcacatggccgccatcaatgccaacggcctgattgccacccccatcacccccagcagcgcccagagccctgctgcccctgtggaccccctgcagcaggcctatgccggcatgcagcactacacagctgcctacccagctgcctacagcctggtggccccagccttcccccagcccccagccctggtggcccagcagcccccacctccaccccagcagcagcagcagcagcagcagcagcagcagcagcagcagcagcgggagggcccagatggctgcaacatcttcatctaccacctgccccaggagttcacagacagcgagatcctgcagatgtttgtgccctttggacatgtgatcagcgccaaggtgtttgtggaccgggccaccaaccagagcaaatgttttggatttgtgtcctttgacaacccagccagcgcccaggccgccatccaggccatgaatggcttccagatcggcatgaagaggctgaaggtgcagctgaagaggcccaaggatgccaaccggccctactag

SEQ ID NO: 148730 - DNA, 900 bp, synthetic construct
  misc_feature 1..900: note = Description of Artificial Sequence: Synthetic coding sequence
  source 1..900: mol_type = other DNA
atgaaggagccagatgccatcaagctgtttgtgggccagatccccaggcacctggaggagaaggacctgaagcccatctttgagcagtttggccgcatctttgagctgaccgtcatcaaggacaagtacacaggcctgcacaagggctgtgccttcctgacctactgtgcccgggacagcgccctgaaggcccagagcgccctgcacgagcagaagaccctgcccggcatgaaccggcccatccaggtgaagccagctgacagcgagagcagaggagacaggaagctgtttgtgggcatgctgggcaagcagcagacagatgaagatgtgaggaagatgtttgagcccttcggcaccattgatgagtgcaccgtgctgcggggcccagatggcaccagcaagggctgtgcctttgtgaagttccagacccatgctgaggcccaggccgccatcaacaccctgcacagcagcaggaccctgcccggggccagcagcagcctggtggtgaagtttgctgacacagagaaggagcggggcctgcggaggatgcagcaggtggccacccagctgggcatgttcagccccatcgccctgcagtttggagcctacagcgcctacacccaggccctgatgcagcagcaggccgccctggtggccgcccacagcgcctacctgagccccatggccaccatggctgctgtgcagatgcagcacatggccgccatcaatgccaacggcctcatcgccacccccatcacccccagcagcgccaagggccacggctacgccagcctggccccccgggcccacttcctgctggatgccctgctggcctttgtgcgggagcggggcaccggcagcaaggcccctggctacctgcccagcgctggcctgctgtag

SEQ ID NO: 148731 - DNA, 783 bp, synthetic construct
  misc_feature 1..783: note = Description of Artificial Sequence: Synthetic coding sequence
  source 1..783: mol_type = other DNA
atgcagcaggtggccacccagctgggcatgttcagccccatcgccctgcagtttggagcctacagcgcctacacccaggccctgatgcagcagcaggccgccctggtggccgcccacagcgcctacctgagccccatggccaccatggctgctgtgcagatgcagcacatggccgccatcaatgccaacggcctcatcgccacccccatcacccccagcagcggcaccagcaccccaccagccatcgccgccacccctgtgtctgccatcccagctgccctgggcgtgaatggctacagccctgtgcccacccagcccaccggccagcctgccccagatgccctgtaccccaacggggtgcacccctacccagctgcctacccagctgcctacagcctggtggccccagccttcccccagcccccagccctggtggcccagcagcccccacctccaccccagcagcagcagcagcagcagcagcagcagcagcagcagcagcagcgggagggcccagatggctgcaacatcttcatctaccacctgccccaggagttcacagattctgagatcctgcagatgtttgtgcccttcggccacgtgatcagcgccaaggtgtttgtggaccgggccaccaaccagagcaagtgcttcggctttgtgtcctttgacaacccagccagcgcccaggccgccatccaggccatgaatggcttccagatcggcatgaagaggctgaaggtgcagctgaagaggcccaaggatgccaaccggccctactag

SEQ ID NO: 148732 - DNA, 1401 bp, synthetic construct
  misc_feature 1..1401: note = Description of Artificial Sequence: Synthetic coding sequence
  source 1..1401: mol_type = other DNA
tgagtggaggagagcgctgctggggagcagagcagcggcacccagatccccaggcacctggaggagaaggacctgaagcccatctttgagcagtttggccgcatctttgagctgaccgtcatcaaggacaagtacacaggcctgcacaagggctgtgccttcctgacctactgtgcccgggacagcgccctgaaggcccagagcgccctgcacgagcagaagaccctgcccggcatgaaccggcccatccaggtgaagccagctgacagcgagagcagaggagacaggaagctgtttgtgggcatgctgggcaagcagcagacagatgaagatgtgaggaagatgtttgagcccttcggcaccattgatgagtgcaccgtgctgcggggcccagatggcaccagcaagggctgtgcctttgtgaagttccagacccatgctgaggcccaggccgccatcaacaccctgcacagcagcaggaccctgcccggggccagcagcagcctggtggtgaagtttgctgacacagagaaggagcggggcctgcggaggatgcagcaggtggccacccagctgggcatgttcagccccatcgccctgcagtttggagcctacagcgcctacacccaggccctgatgcagcagcaggccgccctggtggccgcccacagcgcctacctgagccccatggccaccatggctgctgtgcagatgcagcacatggccgccatcaatgccaacggcctcatcgccacccccatcacccccagcagcggcaccagcaccccaccagccatcgccgccacccctgtgtctgccatcccagctgccctgggcgtgaatggctacagccctgtgcccacccagcccaccggccagcctgccccagatgccctgtaccccaacggggtgcacccctacccagcccagagccctgctgcccctgtggaccccctgcagcaggcctatgccggcatgcagcactacacagctgcctacccagctgcctacagcctggtggccccagccttcccccagcccccagccctggtggcccagcagcccccacctccaccccagcagcagcagcagcagcagcagcagcagcagcagcagcagcagcgggagggcccagatggctgcaacatcttcatctaccacctgccccaggagttcacagattctgagatcctgcagatgtttgtgcccttcggccacgtgatcagcgccaaggtgtttgtggaccgggccaccaaccagagcaagtgcttcggctttgtgtcctttgacaacccagccagcgcccaggccgccatccaggccatgaatggcttccagatcggcatgaagaggctgaaggtgcagctgaagaggcccaaggatgccaaccggccctactag

SEQ ID NO: 148733 - DNA, 1347 bp, synthetic construct
  misc_feature 1..1347: note = Description of Artificial Sequence: Synthetic coding sequence
  source 1..1347: mol_type = other DNA
atgtacatcaagatggccaccctggccaacggccaggccgacaatgccagcctgagcaccaacggcctgggcagcagccctggcagcgctggccacatgaatggcctgagccacagccctggcaaccccagcaccatccccatgaaggaccatgatgccatcaagctgttcatcggccagatccccaggaacctggatgagaaggacctgaagcccctgtttgaggagtttgggaagatctatgagctgactgtgctgaaggaccgcttcaccggcatgcacaagggctgtgccttcctgacctactgtgagcgggagagcgccctgaaggcccagagcgccctgcacgagcagaagaccctgcccggcatgaaccggcccatccaggtgaagccagctgacagcgagagcagaggagaggacaggaagctgtttgtgggcatgctgaacaagcagcagagtgaagatgatgtgagaagactctttgaggcctttggaaacatcgaggagtgcaccatcctgcggggcccagatggcaacagcaagggctgtgcctttgtgaagtacagcagccatgctgaggcccaggccgccatcaatgccctgcacggcagccagaccatgcctggggccagcagcagcctggtggtgaagtttgctgacacagacaaggagaggaccatgaggaggatgcagcagatggccggccagatgggcatgttcaaccccatggccatcccctttggagcctatggagcctatgcccaggccctgatgcagcagcaggccgccctgatggcctctgtggcccagggcggctacctgaaccccatggccgcctttgctgctgcccagatgcagcagatggccgccctgaacatgaatggcctggccgccgcccccatgacccccaccagcggcggcagcaccccacctggcatcacagccccagctgtgcccagcatccccagccccatcggcgtgaatggcttcaccggcctgcccccccaggccaacggccagcctgctgctgaggccgtgtttgccaacggcatccacccctacccagcccagagccccacagctgctgaccccctgcagcaggcctatgccggcgtgcagcagtatgccggccctgctgcctacccagctgcctacggccagatcagccaggccttcccccagcccccacccatgatcccccagcagcagcgggagggctttgtgtcctttgacaacccagccagcgcccagacagccatccaggccatgaatggcttccagatcggcatgaagaggctgaaggtgcagctgaagaggcccaaggatgccaaccggccctactag

SEQ ID NO: 148734 - DNA, 639 bp, synthetic construct
  misc_feature 1..639: note = Description of Artificial Sequence: Synthetic coding sequence
  source 1..639: mol_type = other DNA
gtgtctgctgagggccctgagagagctgcccgggcagaagattctgccagagatgagcctgctgaccctggagaggcctgtggccagcgggagcccaaggacaggaagctgtttgtgggcatgctgaacaagcagcagagtgaagatgatgtgcggcggctgtttgaggccttcggcaacattgaagaatgtaccatcctgcggggcccagatggcaacagcaagggctgtgcctttgtgaagtacagcagccacgccgaggcccaggccgccatcaatgccctgcacggcagccagaccatgcctggggccagcagcagcctggtggtgaagtttgctgacacagacaaggagaggaccatgaggaggatgcagcagatggccggccagatgggcatgttcaaccccatggccatcccctttggagcctacggggcctatgcccaggccctgatgcagcagcaggccgccctgatggcctctgtggcccagggcggctacctgaaccccatggccgcctttgctgctgcccagatgcagcagatggccgccctgaacatgtggccaggcggccgcacctatgaccccaacctgcgctggcagcaccccagcggccaccactgcaccagccgggcctag

SEQ ID NO: 148735 - DNA, 1461 bp, synthetic construct
  misc_feature 1..1461: note = Description of Artificial Sequence: Synthetic coding sequence
  source 1..1461: mol_type = other DNA
atgtacatcaagatggccaccctggccaacggccaggccgacaatgccagcctgagcaccaacggcctgggcagcagccctggcagcgctggccacatgaatggcctgagccacagccctggcaaccccagcaccatccccatgaaggaccatgatgccatcaagctgttcatcggccagatccccaggaacctggatgagaaggacctgaagcccctgtttgaggagtttgggaagatctatgagctgactgtgctgaaggaccgcttcaccggcatgcacaagggctgtgccttcctgacctactgtgagcgggagagcgccctgaaggcccagagcgccctgcacgagcagaagaccctgcccggcatgaaccggcccatccaggtgaagccagctgacagcgagagcagaggaggcagcagctgcctgcggcagccccccagccaggacaggaagctgtttgtgggcatgctgaacaagcagcagagtgaagatgatgtgagaagactctttgaggcctttggaaacatcgaggagtgcaccatcctgcggggcccagatggcaacagcaagggctgtgcctttgtgaagtacagcagccatgctgaggcccaggccgccatcaatgccctgcacggcagccagaccatgcctggggccagcagcagcctggtggtgaagtttgctgacacagacaaggagaggaccatgaggaggatgcagcagatggccggccagatgggcatgttcaaccccatggccatcccctttggagcctatggagcctatgcccaggccctgatgcagcagcaggccgccctgatggcctctgtggcccagggcggctacctgaaccccatggccgcctttgctgctgcccagatgcagcagatggccgccctgaacatgaatggcctggccgccgcccccatgacccccaccagcggcggcagcaccccacctggcatcacagccccagctgtgcccagcatccccagccccatcggcgtgaatggcttcaccggcctgcccccccaggccaacggccagcctgctgctgaggccgtgtttgccaacggcatccacccctacccagcccagagccccacagctgctgaccccctgcagcaggcctatgccggcgtgcagcagtatgccggccctgctgcctacccagctgcctacggccagatcagccaggccttcccccagcccccacccatgatcccccagcagcagcgggagggccctgagggctgcaacctcttcatctaccacctgccccaggagtttggagatgctgagctgatgcagatgttcctgcccttcggctttgtgtcctttgacaacccagccagcgcccagacagccatccaggccatgaatggcttccagatcggcatgaagaggctgaaggtgcagctgaagaggcccaaggatgccaaccggccctactag

SEQ ID NO: 148736 - DNA, 1458 bp, synthetic construct
  misc_feature 1..1458: note = Description of Artificial Sequence: Synthetic coding sequence
  source 1..1458: mol_type = other DNA
atgtacatcaagatggccaccctggccaacggccaggccgacaatgccagcctgagcaccaacggcctgggcagcagccctggcagcgctggccacatgaatggcctgagccacagccctggcaaccccagcaccatccccatgaaggaccatgatgccatcaagctgttcatcggccagatccccaggaacctggatgagaaggacctgaagcccctgtttgaggagtttgggaagatctatgagctgactgtgctgaaggaccgcttcaccggcatgcacaagggctgtgccttcctgacctactgtgagcgggagagcgccctgaaggcccagagcgccctgcacgagcagaagaccctgcccggcatgaaccggcccatccaggtgaagccagctgacagcgagagcagaggaggcagcagctgcctgcggcagccccccagccaggacaggaagctgtttgtgggcatgctgaacaagcagcagagtgaagatgatgtgagaagactctttgaggcctttggaaacatcgaggagtgcaccatcctgcggggcccagatggcaacagcaagggctgtgcctttgtgaagtacagcagccatgctgaggcccaggccgccatcaatgccctgcacggcagccagaccatgcctggggccagcagcagcctggtggtgaagtttgctgacacagacaaggagaggaccatgaggaggatgcagcagatggccggccagatgggcatgttcaaccccatggccatcccctttggagcctatggagcctatgcccaggccatgcagcagcaggccgccctgatggcctctgtggcccagggcggctacctgaaccccatggccgcctttgctgctgcccagatgcagcagatggccgccctgaacatgaatggcctggccgccgcccccatgacccccaccagcggcggcagcaccccacctggcatcacagccccagctgtgcccagcatccccagccccatcggcgtgaatggcttcaccggcctgcccccccaggccaacggccagcctgctgctgaggccgtgtttgccaacggcatccacccctacccagcccagagccccacagctgctgaccccctgcagcaggcctatgctggggtgcagcagtatgccggccctgctgcctacccagctgcctacggccagatcagccaggccttcccccagcccccacccatgatcccccagcagcagcgggagggccctgagggctgcaacctcttcatctaccacctgccccaggagtttggagatgctgagctgatgcagatgttcctgccctttggatttgtgtcctttgacaacccagccagcgcccagacagccatccaggccatgaatggcttccagatcggcatgaagaggctgaaggtgcagctgaagaggcccaaggatgccaaccggccctactag

SEQ ID NO: 148737 - DNA, 1455 bp, synthetic construct
  misc_feature 1..1455: note = Description of Artificial Sequence: Synthetic coding sequence
  source 1..1455: mol_type = other DNA
atgtacatcaagatggccaccctggccaacggccaggccgacaatgccagcctgagcaccaacggcctgggcagcagccctggcagcgctggccacatgaatggcctgagccacagccctggcaaccccagcaccatccccatgaaggaccatgatgccatcaagctgttcatcggccagatccccaggaacctggatgagaaggacctgaagcccctgtttgaggagtttgggaagatctatgagctgactgtgctgaaggaccgcttcaccggcatgcacaagggctgtgccttcctgacctactgtgagcgggagagcgccctgaaggcccagagcgccctgcacgagcagaagaccctgcccggcatgaaccggcccatccaggtgaagccagctgacagcgagagcagaggaggcagcagctgcctgcggcagccccccagccacaggaagctgtttgtgggcatgctgaacaagcagcagagtgaagatgatgtgcggcggctgtttgaggccttcggcaacattgaagaatgtaccatcctgcggggcccagatggcaacagcaagggctgtgcctttgtgaagtacagcagccacgccgaggcccaggccgccatcaatgccctgcacggcagccagaccatgcctggggccagcagcagcctggtggtgaagtttgctgacacagacaaggagaggaccatgaggaggatgcagcagatggccggccagatgggcatgttcaaccccatggccatcccctttggagcctacggggcctatgcccaggccatgcagcagcaggccgccctgatggcctctgtggcccagggcggctacctgaaccccatggccgcctttgctgctgcccagatgcagcagatggccgccctgaacatgaatggcctggccgccgcccccatgacccccaccagcggcggcagcaccccacctggcatcacagccccagctgtgcccagcatccccagccccatcggcgtgaatggcttcaccggcctgcccccccaggccaacggccagcctgctgctgaggccgtgtttgccaacggcatccacccctacccagcccagagccccacagctgctgaccccctgcagcaggcctatgccggcgtgcagcagtatgccggccctgctgcctacccagctgcctacggccagatcagccaggccttcccccagcccccacccatgatcccccagcagcagcgggagggccctgagggctgcaacctcttcatctaccacctgccccaggagtttggagatgctgagctgatgcagatgttcctgcccttcggctttgtgtcctttgacaacccagccagcgcccagacagccatccaggccatgaatggcttccagatcggcatgaagaggctgaaggtgcagctgaagaggcccaaggatgccaaccggccctactag

SEQ ID NO: 148738 - DNA, 1458 bp, synthetic construct
  misc_feature 1..1458: note = Description of Artificial Sequence: Synthetic coding sequence
  source 1..1458: mol_type = other DNA
atggcccggctgacagaaagtgaggcccggcggcagcagcagcagctgctgcagccccggcccagccctgtgggcagcagcggccctgagcccccaggcggccagccagatggcatgaaggacctggatgccatcaagctgtttgtgggccagatccccaggcacctggatgagaaggacctgaagcccctgtttgagcagtttggccgcatctatgagctgactgtgctgaaggacccctacacaggcatgcacaagggctgtgccttcctgacctactgtgcccgggacagcgccatcaaggcccagacagccctgcacgagcagaagaccctgcccggcatggcccggcccatccaggtgaagccagctgacagcgagagccggggcggccgggacaggaagctgtttgtgggcatgctgaacaagcagcagagcgaggaggatgtgctgcggctcttccagccctttggagtgattgatgagtgcaccgtgctgcggggcccagatggcagcagcaagggctgtgcctttgtgaagttcagcagccacacagaggcccaggccgccatccacgccctgcacggcagccagaccatgcctggggccagcagcagcctggtggtgaagtttgctgacacagacaaggagaggaccctgcggaggatgcagcagatggtgggccagctgggcatcctgacccccagcctgaccctgcccttcagcccctacagcgcctatgcccaggccctgatgcagcagcagaccaccgtgctgagcaccagcggcagctacctgagccctggggtggccttcagcccctgccacatccagcagatcggggctgtgtccctgaatggcctgcctgccacccccatcgccccagccagcggcctgcacagcccccccctgctgggcaccacagctgtgcccggcctggtggcccccatcaccaatggatttgctggggtggtgcccttccctgggggccacccagccctggagaccgtgtatgccaacggcctggtgccctacccagcccagagccccaccgtggccgagaccctgcacccagccttctctggagtgcagcagtacacagccatgtaccccacagctgccatcacccccatcgcccacagcgtgccccagcccccacccctgctgcagcagcagcagcgggagggccctgagggctgcaacctcttcatctaccacctgccccaggagtttggagacacagagctgacccagatgttcctgccctttggaaacatcatcagcagcaaggtgttcatggaccgggccaccaaccagagcaaatgttttggatttgtgtcctttgacaacccagccagcgcccaggccgccatccaggccatgaatggcttccagatcggcatgaagaggctgaaggtgcagctgaagaggcccaaggaccccggccacccctactag

SEQ ID NO: 148739 - DNA, 963 bp, synthetic construct
  misc_feature 1..963: note = Description of Artificial Sequence: Synthetic coding sequence
  source 1..963: mol_type = other DNA
atggcccggcccatccaggtgaagccagctgacagcgagagccggggcggccgggacaggaagctgtttgtgggcatgctgaacaagcagcagagcgaggaggatgtgctgcggctcttccagccctttggagtgattgatgagtgcaccgtgctgcggggcccagatggcagcagcaagggctgtgcctttgtgaagttcagcagccacacagaggcccaggccgccatccacgccctgcacggcagccagaccatgcctggggccagcagcagcctggtggtgaagtttgctgacacagacaaggagaggaccctgcggaggatgcagcagatggtgggccagctgggcatcctgacccccagcctgaccctgcccttcagcccctacagcgcctatgcccaggccctgatgcagcagcagaccaccgtgctgagcaccagcggcagctacctgagccctggggtggccttcagcccctgccacatccagcagatcggggctgtgtccctgaatggcctgcctgccacccccatcgccccagccagcggcctgcacagcccccccctgctgggcaccacagctgtgcccggcctggtggcccccatcaccaatggatttgctggggtggtgcccttccctgggggccacccagccctggagaccgtgtatgccaacggcctggtgccctacccagcccagagccccaccgtggccgagaccctgcacccagccttctctggagtgcagcagtacacagccatgtaccccacagctgccatcacccccatcgcccacagcgtgccccagcccccacccctgctgcagcagcagcagcgggagggcgtgtggaggcatggagcagatgctgatgtgcccaccctgcggcagtaccacttcctgcagggcgtgtatggcagcagctaccagcctgagcaggtgttccggctgcgggagctgtag

SEQ ID NO: 148740 - DNA, 1230 bp, synthetic construct
  misc_feature 1..1230: note = Description of Artificial Sequence: Synthetic coding sequence
  source 1..1230: mol_type = other DNA
atggcccggctgacagaaagtgaggcccggcggcagcagcagcagctgctgcagccccggcccagccctgtgggcagcagcggccctgagcccccaggcggccagccagatggcatgaaggacctggatgccatcaagctgtttgtgggccagatccccaggcacctggatgagaaggacctgaagcccctgtttgagcagtttggccgcatctatgagctgactgtgctgaaggacccctacacaggcatgcacaagggctgtgccttcctgacctactgtgcccgggacagcgccatcaaggcccagacagccctgcacgagcagaagaccctgcccggcatggcccggcccatccaggtgaagccagctgacagcgagagccggggcggccgggacaggaagctgtttgtgggcatgctgaacaagcagcagagcgaggaggatgtgctgcggctcttccagccctttggagtgattgatgagtgcaccgtgctgcggggcccagatggcagcagcaagggctgtgcctttgtgaagttcagcagccacacagaggcccaggccgccatccacgccctgcacggcagccagaccatgcctggggccagcagcagcctggtggtgaagtttgctgacacagacaaggagaggaccctgcggaggatgcagcagatggtgggccagctgggcatcctgacccccagcctgaccctgcccttcagcccctacagcgcctatgcccaggccctgatgcagcagcagaccaccgtgctgagcaccagcggcagctacctgagccctggggtggccttcagcccctgccacatccagcagatcggggctgtgtccctgaatggcctgcctgccacccccatcgccccagccagcggcgtggtgcccttccctgggggccacccagccctggagaccgtgtatgccaacggcctggtgccctacccagcccagagccccaccgtggccgagaccctgcacccagccttcagcggcgtgcagcagtacacagccatgtaccccacagctgccatcacccccatcgcccacagcgtgccccagcccccacccctgctgcagcagcagcagcgggagggcgtgtggaggcatggagcagatgctgatgtgcccaccctgcggcagtaccacttcctgcagggcgtgtatggcagcagctaccagcctgagcaggtgttccggctgcgggagctgtag

SEQ ID NO: 148741 - DNA, 1446 bp, synthetic construct
  misc_feature 1..1446: note = Description of Artificial Sequence: Synthetic coding sequence
  source 1..1446: mol_type = other DNA
atggctgctgcccctgggggcagcgcccagcctgctggccctggcccccggctgggcttcagcacagctgacagcggcgtgggcatgagcggcctgaaccctggccctgctgtgcccatgaaggaccatgatgccatcaagctgtttgtgggccagatcccccggggcctggatgagcaggacctgaagcccctgtttgaggagtttggccgcatctatgagctgactgtgctgaaggaccggctgaccggcctgcacaagggctgtgccttcctgacctactgtgcccgggacagcgccctgaaggcccagagcgccctgcacgagcagaagaccctgcccggcatgaaccggcccatccaggtgaagccagctgccagcgagggccgcggggaggacaggaagctgtttgtgggcatgctgggcaagcagcagggcgaggaggatgtgagaagactcttccagcccttcggccacatcgaggagtgcaccgtgctgcggagcccagatggcaccagcaagggctgtgcctttgtgaagtttggcagccagggcgaggcccaggccgccatccggggcctgcacggcagcaggaccatggccggggccagcagcagcctggtggtgaagctggccgacacagaccgggagcgggccctgcggaggatgcagcagatggccggccacctgggcgccttccacccagcccccctgcccctgggcgcctgtggggcctacaccacagccatcctgcagcaccaggccgccctgctggccgccgcccagggccctggcctgggccctgtggccgctgtggccgcccagatgcagcacgtggccgccttcagcctggtggccgcccccctgctgcctgctgctgctgccaacagccccccaggcagcggccctggcaccctgcccggcctgcctgcccccatcggcgtgaatggcttcggccccctgaccccccagaccaacggccagcccggcagtgacaccctgtacaacaacggcctgagcccctacccagcccagagccctggggtggccgaccccctgcagcaggcctatgccggcatgcaccactacgccgccgcctaccccagcgcctatgcccctgtgtccacagccttcccccagcagcccagcgccctgccccagcagcagcgggagggccctgagggctgcaacctcttcatctaccacctgccccaggagtttggagatgctgagctgatccagaccttcctgccctttggagctgtggtgtctgccaaggtgtttgtggaccgggccaccaaccagagcaaatgttttggatttgtgtcctttgacaaccccaccagcgcccagacagccatccaggccatgaatggcttccagatcggcatgaagaggctgaaggtgcagctgaagaggcccaaggatgccaaccggccctactag

SEQ ID NO: 148742 - DNA, 1107 bp, synthetic construct
  misc_feature 1..1107: note = Description of Artificial Sequence: Synthetic coding sequence
  source 1..1107: mol_type = other DNA
atgatcagtgacccccccagcaacaacagctggaacagcgtgctgtacctgctggaggacaggaagctgtttgtgggcatgctgggcaagcagcagggcgaggaggatgtgcggcggctcttccagcccttcggccacattgaagaatgtactgtgctgcggagcccagatggcaccagcaagggctgtgcctttgtgaagtttggcagccagggcgaggcccaggccgccatccggggcctgcacggcagcaggaccatggccggggccagcagcagcctggtggtgaagctggccgacacagaccgggagcgggccctgcggaggatgcagcagatggccggccacctgggcgccttccacccagcccccctgcccctgggcgcctgtggggcctacaccacagccatcctgcagcaccaggccgccctgctggccgccgcccagggccctggcctgggccctgtggccgctgtggccgcccagatgcagcacgtggccgccttcagcctggtggccgcccccctgctgcctgctgctgctgccaacagccccccaggcagcggccctggcaccctgcccggcctgcctgcccccatcggcgtgaatggatttggccccctgaccccccagaccaacggccagcccggcagtgacaccctgtacaacaacggcctgagcccctacccagcccagagccctggggtggccgaccccctgcagcaggcctatgccggcatgcaccactatgctgctgcctaccccagcgcctatgcccctgtgtccacagccttcccccagcagcccagcgccctgccccagcagcagcgggagggccctgagggctgcaacctcttcatctaccacctgccccaggagtttggagatgctgagctgatccagaccttcctgccctttggagctgtggtgtctgccaaggtgtttgtggaccgggccaccaaccagagcaagtgcttcggctttgtgtcctttgacaaccccaccagcgcccagacagccatccaggccatgaatggcttccagatcggcatgaagaggctgaaggtgcagctgaagaggcccaaggatgccaaccggccctactag

SEQ ID NO: 148743 - DNA, 1365 bp, synthetic construct; identical to SEQ ID NO: 148727
  misc_feature 1..1365: note = Description of Artificial Sequence: Synthetic coding sequence
  source 1..1365: mol_type = other DNA

SEQ ID NO: 148744 - DNA, 1029 bp, synthetic construct
  misc_feature 1..1029: note = Description of Artificial Sequence: Synthetic coding sequence
  source 1..1029: mol_type = other DNA
atgctgggcaagcagcagggcgaggaggatgtgcggcggctcttccagcccttcggccacattgaagaatgtactgtgctgcggagcccagatggcaccagcaagggctgtgcctttgtgaagtttggcagccagggcgaggcccaggccgccatccggggcctgcacggcagcaggaccatggccggggccagcagcagcctggtggtgaagctggccgacacagaccgggagcgggccctgcggaggatgcagcagatggccggccacctgggcgccttccacccagcccccctgcccctgggcgcctgtggggcctacaccacagccatcctgcagcaccaggccgccctgctggccgccgcccagggccctggcctgggccctgtggccgctgtggccgcccagatgcagcacgtggccgccttcagcctggtggccgcccccctgctgcctgctgctgctgccaacagccccccaggcagcggccctggcaccctgcccggcctgcctgcccccatcggcgtgaatggatttggccccctgaccccccagaccaacggccagcccggcagtgacaccctgtacaacaacggcctgagcccctacccagcccagagccctggggtggccgaccccctgcagcaggcctatgccggcatgcaccactatgctgctgcctaccccagcgcctatgcccctgtgtccacagccttcccccagcagcccagcgccctgccccagcagcagcgggagggccctgagggctgcaacctcttcatctaccacctgccccaggagtttggagatgctgagctgatccagaccttcctgccctttggagctgtggtgtctgccaaggtgtttgtggaccgggccaccaaccagagcaagtgcttcggctttgtgtcctttgacaaccccaccagcgcccagacagccatccaggccatgaatggcttccagatcggcatgaagaggctgaaggtgcagctgaagaggcccaaggatgccaaccggccctactag

SEQ ID NO: 148745 - DNA, 1035 bp, synthetic construct
  misc_feature 1..1035: note = Description of Artificial Sequence: Synthetic coding sequence
  source 1..1035: mol_type = other DNA
atgaaccggcccatccaggtgaagccagctgccagcgagggcagaggagaggacaggaagctgtttgtgggcatgctgggcaagcagcagggcgaggaggatgtgcggcggctcttccagcccttcggccacattgaagaatgtactgtgctgcggagcccagatggcaccagcaagggctgtgcctttgtgaagtttggcagccagggcgaggcccaggccgccatccggggcctgcacggcagcaggaccatggccggggccagcagcagcctggtggtgaagctggccgacacagaccgggagcgggccctgcggaggatgcagcagatggccggccacctgggcgccttccacccagcccccctgcccctgggcgcctgtggggcctacaccacagccatcctgcagcaccaggccgccctgctggccgccgcccagggccctggcctgggccctgtggccgctgtggccgcccagatgcagcacgtggccgccttcagcctggtggccgcccccctgctgcctgctgctgccaacagccccccaggcagcggccctggcaccctgcccggcctgcctgcccccatcggcgtgaatggcttcggccccctgaccccccagaccaacggccagcccggcagtgacaccctgtacaacaacggcctgagcccctacccagctgcctaccccagcgcctatgcccctgtgtccacagccttcccccagcagcccagcgccctgccccagcagcagcgggagggccctgagggctgcaacctcttcatctaccacctgccccaggagtttggagatgctgagctgatccagaccttcctgccctttggagctgtggtgtctgccaaggtgtttgtggaccgggccaccaaccagagcaagtgcttcggctttgtgtcctttgacaaccccaccagcgcccagacagccatccaggccatgaatggcttccagatcggcatgaagaggctgaaggtgcagctgaagaggcccaaggatgccaaccggccctactag

SEQ ID NO: 148746 - DNA, 1980 bp, synthetic construct
  misc_feature 1..1980: note = Description of Artificial Sequence: Synthetic coding sequence
  source 1..1980: mol_type = other DNA
atgctgtacaagcagctgcggcaggcctgtgaagatcatgtgcaggcccagatcctgcccttccgggaggacagcctggacagcgtgctcttcctgaagaagatcaacacctgctggcaggaccactgccggcagatgatcatgatccgcagcatcttcctgttcctggacaggacctacgtgctgcagaacagcaccctgcccagcatctgggacatgggcctggagctgttccgcacccacatcatcagtgacaagatggtgcagagcaagaccattgatggcatcctgctgctgattgaaagagagaggtctggagaggccgtggacaggagcctgctgcggagcctgctgggcatgctgagtgacctgcaggtgtacaaggacagctttgagctgaagttcctggaggagaccaactgcctgtatgctgctgagggccagaggctgatgcaggagcgggaggtgcctgagtacctgaaccacgtgtccaagaggctggaggaggagggggacagagtcatcacctacctggaccacagcacccagaagcccctgattgcctgtgtggagaagcagctgctgggggagcacctgacagccatcctgcagaagggcctggaccacctgctggatgaaaatagagtgcctgacctggcccagatgtaccagctgttcagccgggtgcggggcggccagcaggccctgctgcagcactggagcgagtacatcaagacctttggaacagccatcgtcatcaaccctgagaaggacaaggacatggtgcaggacctgctggacttcaaggacaaggtggaccacgtgattgaggtgtgcttccagaagaatgaaagatttgtgaacctgatgaaggagagctttgagaccttcatcaacaagaggcccaacaagccagctgagctgattgccaagcacgtggacagcaagctgcgggccggcaacaaggaggccacagatgaggagctggagaggaccctggacaagatcatgatcctcttccgcttcatccacggcaaggatgtgtttgaggccttctacaagaaggacctggccaagaggctgctggtgggcaagagcgcctctgtggatgctgagaagtccatgctgagcaagctgaagcatgaatgtggggccgccttcaccagcaagctggagggcatgttcaaggacatggagctgagcaaggacatcatggtgcacttcaagcagcacatgcagaaccagagcgacagcggccccatcgacctgactgtgaacatcctgaccatgggctactggcccacctacacccccatggaggtgcacctgaccccagagatgatcaagctgcaggaggtgttcaaggccttctacctgggcaagcacagcggcaggaagctgcagtggcagaccaccctgggccatgctgtgctgaaggccgagttcaaggagggcaagaaggagttccaggtgtccctcttccagaccctggtgctgctgatgtttaatgaaggagatggcttctcctttgaggagatcaagatggccactggaattgaggacagcgagctgcggaggaccctgcagagcctggcctgtgggaaggcccgggtgctgatcaagagccccaagggcaaggaggtggaggatggagacaagttcatcttcaatggagagttcaagcacaagctgttccgcatcaagatcaaccagatccagatgaaggagaccgtggaggagcaggtgtccaccacagagagggtcttccaggaccggcagtaccagattgatgctgccatcgtgcgcatcatgaagatgaggaagaccctgggccacaacctgctggtgtctgagctgtacaaccagctgaagtttcctgtgaagccaggggacctgaagaagagaattgagagcctgattgaccgggactacatggagcgggacaaggacaaccccaaccagtaccactacgtggcctag

SEQ ID NO: 148747 - DNA, 2280 bp, synthetic construct
  misc_feature 1..2280: note = Description of Artificial Sequence: Synthetic coding sequence
  source 1..2280: mol_type = other DNA
atggctgatgaggcccccaggaagggcagcttcagcgccctggtgggccgcaccaacggcctgaccaagccagctgccctggccgccgccccagccaagccaggaggagctgggggcagcaagaagctggtgatcaagaacttccgggaccggccccggctgcctgacaactacacccaggacacctggaggaagctgcatgaagctgtgcgggctgtgcagagcagcaccagcatccgctacaacctggaggagctgtaccaggccgtggagaacctgtgcagccacaaggtgagccccatgctgtacaagcagctgcggcaggcctgtgaagatcatgtgcaggcccagatcctgcccttccgggaggacagcctggacagcgtgctcttcctgaagaagatcaacacctgctggcaggaccactgccggcagatgatcatgatccgcagcatcttcctgttcctggacaggacctacgtgctgcagaacagcaccctgcccagcatctgggacatgggcctggagctgttccgcacccacatcatcagtgacaagatggtgcagagcaagaccattgatggcatcctgctgctgattgaaagagagaggtctggagaggccgtggacaggagcctgctgcggagcctgctgggcatgctgagtgacctgcaggtgtacaaggacagctttgagctgaagttcctggaggagaccaactgcctgtatgctgctgagggccagaggctgatgcaggagcgggaggtgcctgagtacctgaaccacgtgtccaagaggctggaggaggagggggacagagtcatcacctacctggaccacagcacccagaagcccctgattgcctgtgtggagaagcagctgctgggggagcacctgacagccatcctgcagaagggcctggaccacctgctggatgaaaatagagtgcctgacctggcccagatgtaccagctgttcagccgggtgcggggcggccagcaggccctgctgcagcactggagcgagtacatcaagacctttggaacagccatcgtcatcaaccctgagaaggacaaggacatggtgcaggacctgctggacttcaaggacaaggtggaccacgtgattgaggtgtgcttccagaagaatgaaagatttgtgaacctgatgaaggagagctttgagaccttcatcaacaagaggcccaacaagccagctgagctgattgccaagcacgtggacagcaagctgcgggccggcaacaaggaggccacagatgaggagctggagaggaccctggacaagatcatgatcctcttccgcttcatccacggcaaggatgtgtttgaggccttctacaagaaggacctggccaagaggctgctggtgggcaagagcgcctctgtggatgctgagaagtccatgctgagcaagctgaagcatgaatgtggggccgccttcaccagcaagctggagggcatgttcaaggacatggagctgagcaaggacatcatggtgcacttcaagcagcacatgcagaaccagagcgacagcggccccatcgacctgactgtgaacatcctgaccatgggctactggcccacctacacccccatggaggtgcacctgaccccagagatgatcaagctgcaggaggtgttcaaggccttctacctgggcaagcacagcggcaggaagctgcagtggcagaccaccctgggccatgctgtgctgaaggccgagttcaaggagggcaagaaggagttccaggtgtccctcttccagaccctggtgctgctgatgtttaatgaaggagatggcttctcctttgaggagatcaagatggccactggaattgaggacagcgagctgcggaggaccctgcagagcctggcctgtgggaaggcccgggtgctgatcaagagccccaagggcaaggaggtggaggatggagacaagttcatcttcaatggagagttcaagcacaagctgttccgcatcaagatcaaccagatccagatgaaggagaccgtggaggagcaggtgtccaccacagagagggtcttccaggaccggcagtaccagattgatgctgccatcgtgcgcatcatgaagatgaggaagaccctgggccacaacctgctggtgtctgagctgtacaaccagctgaagtttcctgtgaagccaggggacctgaagaagagaattgagagcctgattgaccgggactacatggagcgggacaaggacaaccccaaccagtaccactacgtggcctag

SEQ ID NO: 148748 - DNA, 1980 bp, synthetic construct; identical to SEQ ID NO: 148746
  misc_feature 1..1980: note = Description of Artificial Sequence: Synthetic coding sequence
  source 1..1980: mol_type = other DNA

SEQ ID NO: 148749 - DNA, 1980 bp, synthetic construct; identical to SEQ ID NO: 148746
  misc_feature 1..1980: note = Description of Artificial Sequence: Synthetic coding sequence
  source 1..1980: mol_type = other DNA

SEQ ID NO: 148750 - DNA, 2703 bp, synthetic construct
  misc_feature 1..2703: note = Description of Artificial Sequence: Synthetic coding sequence
  source 1..2703: mol_type = other DNA
atgaagtctgtgtgccctgtgaccagcggcttcagcagccccagccccagcgctgctgctgctgcccaggaggtgcgcagcgccacagatggcaacaccagcaccaccccacccaccagcgccaagaagaggaagctgaacagcagcagcagcagcagcagcaacagcagcaatgaaagagaagattttgacagcaccagcagcagcagcagcaccccacccctgcagccccgggacagcgccagccccagcaccagcagcttctgcctgggcgtgtctgtggccgccagcagccacgtgcccatccagaagaagctgcgctttgaggacaccctggagtttgtgggctttgatgccaagatggccgaggagagcagcagcagcagcagcagcagcagccccacagctgccaccagccagcagcagcagctgaagaacaagagcatcctgatcagctctgtggcctctgtgcaccacgccaacggcctggccaagagcagcaccaccgtgagcagctttgccaacagcaagccaggcagcgccaagaagctggtgatcaagaacttcaaggacaagcccaagctgcctgagaactacacagatgagacctggcagaagctgaaggaggccgtggaggccatccagaacagcaccagcatcaagtacaacctggaggagctgtaccaggccgtggagaacctgtgcagctacaagatcagcgccaacctgtacaagcagctgcggcagatctgtgaggaccacatcaaggcccagatccaccagttccgggaggacagcctggacagcgtgctcttcctgaagaagattgaccgctgctggcagaaccactgccggcagatgatcatgatccgcagcatcttcctgttcctggacaggacctacgtgctgcagaacagcatgctgcccagcatctgggacatgggcctggagctgttccgggcccacatcatcagtgaccagaaggtgcagaacaagaccattgatggcatcctgctgctgattgagcgggagagaaatggagaggccatcgacaggagcctgctgcggagcctgctgtccatgctgagtgacctgcagatctaccaggacagctttgagcagcgcttcctggaggagaccaaccggctgtatgctgctgagggccagaagctgatgcaggagcgggaggtgcctgagtacctgcaccacgtgaacaagaggctggaggaggaggccgacaggctcatcacctacctggaccagaccacccagaagagcctcatcgccaccgtggagaagcagctgctgggggagcacctgacagccatcctgcagaagggcctgaacaacctgctggatgagaaccgcatccaggacctgagcctgctgtaccagctgttcagccgggtgcggggcggcgtgcaggtgctgctgcagcagtggattgagtacatcaaggccttcggcagcaccatcgtcatcaaccctgagaaggacaagaccatggtgcaggagctgctggacttcaaggacaaggtggaccacatcatcgacatctgcttcctgaagaatgagaagttcatcaatgccatgaaggaggcctttgagaccttcatcaacaagaggcccaacaagccagctgagctgattgccaagtatgtggacagcaagctgcgggccggcaacaaggaggccacagatgaggagctggagaagatgctggacaagatcatgatcatcttccgcttcatctacggcaaggatgtgtttgaggccttctacaagaaggacctggccaagaggctgctggtgggcaagagcgcctctgtggatgctgagaagtccatgctgagcaagctgaagcatgaatgtggggccgccttcaccagcaagctggagggcatgttcaaggacatggagctgagcaaggacatcatgatccagttcaagcagtacatgcagaaccagaatgtgcccggcaacatcgagctgactgtgaacatcctgaccatgggctactggcccacctacgtgcccatggaggtgcacctgcccccagagatggtgaagctgcaggagatcttcaagaccttctacctgggcaagcacagcggcaggaagctgcagtggcagagcaccctgggccactgtgtgctgaaggccgagttcaaggagggcaagaaggagctgcaggtgtccctcttccagaccctggtgctgctgatgtttaatgaaggagaggagttcagcctggaggagatcaagcaggccaccggcattgaagatggagagctgcggaggaccctgcagagcctggcctgtgggaaggcccgggtgctggccaagaaccccaagggcaaggacattgaagatggagacaagttcatctgcaatgatgacttcaagcacaagctgttccgcatcaagatcaaccagatccagatgaaggagaccgtggaggagcaggccagcaccacagagagggtcttccaggaccggcagtaccagattgatgctgccatcgtgcgcatcatgaagatgaggaagaccctgagccacaacctgctggtgtctgaggtgtacaaccagctgaagtttcctgtgaagccagctgacctgaagaagagaattgagagcctgattgaccgggactacatggagcgggacaaggagaaccccaaccagtacaactacatcgcctag

SEQ ID NO: 148751 - DNA, 2688 bp, synthetic construct
  misc_feature 1..2688: note = Description of Artificial Sequence: Synthetic coding sequence
  source 1..2688: mol_type = other DNA
atgttccccaccggcttcagcagccccagccccagcgctgctgctgctgcccaggaggtgcgcagcgccacagatggcaacaccagcaccaccccacccaccagcgccaagaagaggaagctgaacagcagcagcagcagcagcagcaacagcagcaatgaaagagaggactttgacagcaccagcagcagcagcagcaccccacccctgcagccccgggacagcgccagccccagcaccagcagcttctgcctgggcgtgtctgtggccgccagcagccacgtgcccatccagaagaagctgcgctttgaggacaccctggagtttgtgggctttgatgccaagatggccgaggagagcagcagcagcagcagcagcagcagccccacagctgccaccagccagcagcagcagctgaagaacaagagcatcctgatcagctctgtggcctctgtgcaccacgccaacggcctggccaagagcagcaccaccgtgtcctcctttgccaacagcaagccaggcagcgccaagaagctggtgatcaagaacttcaaggacaagcccaagctgcctgagaactacacagatgagacctggcagaagctgaaggaggccgtggaggccatccagaacagcaccagcatcaagtacaacctggaggagctgtaccaggccgtggagaacctgtgcagctacaagatcagcgccaacctgtacaagcagctgcggcagatctgtgaggaccacatcaaggcccagatccaccagttccgggaggacagcctggacagcgtgctcttcctgaagaagattgaccgctgctggcagaaccactgccggcagatgatcatgatccgcagcatcttcctgttcctggacaggacctacgtgctgcagaacagcatgctgcccagcatctgggacatgggcctggagctgttccgggcccacatcatcagtgaccagaaggtgcagaacaagaccattgatggcatcctgctgctgattgaaagagaaagaaatggagaggccatcgacaggagcctgctgcggagcctgctgtccatgctgagtgacctgcagatctaccaggacagctttgagcagcgcttcctggaggagaccaaccggctgtatgctgctgagggccagaagctgatgcaggagcgggaggtgcctgagtacctgcaccacgtgaacaagaggctggaggaggaggccgacaggctcatcacctacctggaccagaccacccagaagagcctgattgccaccgtggagaagcagctgctgggggagcacctgacagccatcctgcagaagggcctgaacaacctgctggatgaaaatcgcatccaggacctgagcctgctgtaccagctgttcagccgggtgcggggcggcgtgcaggtgctgctgcagcagtggattgagtacatcaaggccttcggcagcaccatcgtcatcaaccctgagaaggacaagaccatggtgcaggagctgctggacttcaaggacaaggtggaccacatcatcgacatctgcttcctgaagaatgagaagttcatcaatgccatgaaggaggcctttgagaccttcatcaacaagaggcccaacaagccagctgagctgattgccaagtatgtggacagcaagctgcgggccggcaacaaggaggccacagatgaggagctggagaagatgctggacaagatcatgatcatcttccgcttcatctacggcaaggatgtgtttgaggccttctacaagaaggacctggccaagaggctgctggtgggcaagagcgcctctgtggatgctgagaagtccatgctgagcaagctgaagcatgaatgtggggccgccttcaccagcaagctggagggcatgttcaaggacatggagctgagcaaggacatcatgatccagttcaagcagtacatgcagaaccagaatgtgcccggcaacatcgagctgactgtgaacatcctgaccatgggctactggcccacctacgtgcccatggaggtgcacctgcccccagagatggtgaagctgcaggagatcttcaagaccttctacctgggcaagcacagcggcaggaagctgcagtggcagagcaccctgggccactgtgtgctgaaggccgagttcaaggagggcaagaaggagctgcaggtgtccctcttccagaccctggtgctgctgatgtttaatgaaggagaggagttcagcctggaggagatcaagcaggccactggaattgaagatggagagctgcggaggaccctgcagagcctggcctgtgggaaggcccgggtgctggccaagaaccccaagggcaaggacattgaagatggagacaagttcatctgcaatgatgacttcaagcacaagctgttccgcatcaagatcaaccagatccagatgaaggagaccgtggaggagcaggccagcaccacagagagggtcttccaggaccggcagtaccagattgatgctgccatcgtgcgcatcatgaagatgaggaagaccctgagccacaacctgctggtgtctgaggtgtacaaccagctgaagtttcctgtgaagccagctgacctgaagaagagaattgagagcctgattgaccgggactacatggagcgggacaaggagaaccccaaccagtacaactacatcgcctag

SEQ ID NO: 148752 - DNA, 705 bp, synthetic construct
  misc_feature 1..705: note = Description of Artificial Sequence: Synthetic coding sequence
  source 1..705: mol_type = other DNA
atgattgatcctgactttgctgacaagcccaagctgcctgagaactacacagatgagacctggcagaagctgaaggaggccgtggaggccatccagaacagcaccagcatcaagtacaacctggaggagctgtaccaggccgtggagaacctgtgcagctacaagatcagcgccaacctgtacaagcagctgcggcagatctgtgaggaccacatcaaggcccagatccaccagttccgggaggacagcctggacagcgtgctcttcctgaagaagattgaccgctgctggcagaaccactgccggcagatgatcatgatccgcagcatcttcctgttcctggacaggacctacgtgctgcagaacagcatgctgcccagcatctgggacatgggcctggagctgttccgggcccacatcatcagtgaccagaaggtgcagaacaagaccattgatggcatcctgctgctgattgaaagagaaagaaatggagaggccatcgacaggagcctgctgcggagcctgctgtccatgctgagtgacctgcagatctaccaggacagctttgagcagcgcttcctggaggagaccaaccggctgtatgctgctgagggccagaagctgatgcaggagcgggaggtgcctgagtacctgcaccacgtgaacaagaggctggaggaggaggccgacaggctcatcacctag

SEQ ID NO: 148753 - DNA, 2742 bp, synthetic construct
  misc_feature 1..2742: note = Description of Artificial Sequence: Synthetic coding sequence
  source 1..2742: mol_type = other DNA
atgatgagccagagcagcggcagcggagatggaaatgatgatgaggccaccaccagcaaggatggcggcttcagcagccccagccccagcgctgctgctgctgcccaggaggtgcgcagcgccacagatggcaacaccagcaccaccccacccaccagcgccaagaagaggaagctgaacagcagcagcagcagcagcagcaacagcagcaatgaaagagaggactttgacagcaccagcagcagcagcagcaccccacccctgcagccccgggacagcgccagccccagcaccagcagcttctgcctgggcgtgtctgtggccgccagcagccacgtgcccatccagaagaagctgcgctttgaggacaccctggagtttgtgggctttgatgccaagatggccgaggagagcagcagcagcagcagcagcagcagccccacagctgccaccagccagcagcagcagctgaagaacaagagcatcctgatcagctctgtggcctctgtgcaccacgccaacggcctggccaagagcagcaccaccgtgtcctcctttgccaacagcaagccaggcagcgccaagaagctggtgatcaagaacttcaaggacaagcccaagctgcctgagaactacacagatgagacctggcagaagctgaaggaggccgtggaggccatccagaacagcaccagcatcaagtacaacctggaggagctgtaccaggccgtggagaacctgtgcagctacaagatcagcgccaacctgtacaagcagctgcggcagatctgtgaggaccacatcaaggcccagatccaccagttccgggaggacagcctggacagcgtgctcttcctgaagaagattgaccgctgctggcagaaccactgccggcagatgatcatgatccgcagcatcttcctgttcctggacaggacctacgtgctgcagaacagcatgctgcccagcatctgggacatgggcctggagctgttccgggcccacatcatcagtgaccagaaggtgcagaacaagaccattgatggcatcctgctgctgattgaaagagaaagaaatggagaggccatcgacaggagcctgctgcggagcctgctgtccatgctgagtgacctgcagatctaccaggacagctttgagcagcgcttcctggaggagaccaaccggctgtatgctgctgagggccagaagctgatgcaggagcgggaggtgcctgagtacctgcaccacgtgaacaagaggctggaggaggaggccgacaggctcatcacctacctggaccagaccacccagaagagcctgattgccaccgtggagaagcagctgctgggggagcacctgacagccatcctgcagaagggcctgaacaacctgctggatgaaaatcgcatccaggacctgagcctgctgtaccagctgttcagccgggtgcggggcggcgtgcaggtgctgctgcagcagtggattgagtacatcaaggccttcggcagcaccatcgtcatcaaccctgagaaggacaagaccatggtgcaggagctgctggacttcaaggacaaggtggaccacatcatcgacatctgcttcctgaagaatgagaagttcatcaatgccatgaaggaggcctttgagaccttcatcaacaagaggcccaacaagccagctgagctgattgccaagtatgtggacagcaagctgcgggccggcaacaaggaggccacagatgaggagctggagaagatgctggacaagatcatgatcatcttccgcttcatctacggcaaggatgtgtttgaggccttctacaagaaggacctggccaagaggctgctggtgggcaagagcgcctctgtggatgctgagaagtccatgctgagcaagctgaagcatgaatgtggggccgccttcaccagcaagctggagggcatgttcaaggacatggagctgagcaaggacatcatgatccagttcaagcagtacatgcagaaccagaatgtgcccggcaacatcgagctgactgtgaacatcctgaccatgggctactggcccacctacgtgcccatggaggtgcacctgcccccagagatggtgaagctgcaggagatcttcaagaccttctacctgggcaagcacagcggcaggaagctgcagtggcagagcaccctgggccactgtgtgctgaaggccgagttcaaggagggcaagaaggagctgcaggtgtccctcttccagaccctggtgctgctgatgtttaatgaaggagaggagttcagcctggaggagatcaagcaggccactggaattgaagatggagagctgcggaggaccctgcagagcctggcctgtgggaaggcccgggtgctggccaagaaccccaagggcaaggacattgaagatggagacaagttcatctgcaatgatgacttcaagcacaagctgttccgcatcaagatcaaccagatccagatgaaggagaccgtggaggagcaggccagcaccacagagagggtcttccaggaccggcagtaccagattgatgctgccatcgtgcgcatcatgaagatgaggaagaccctgagccacaacctgctggtgtctgaggtgtacaaccagctgaagtttcctgtgaagccagctgacctgaagaagagaattgagagcctgattgaccgggactacatggagcgggacaaggagaaccccaaccagtacaactacatcgcctag

SEQ ID NO: 148754 - DNA, 2343 bp, synthetic construct
  misc_feature 1..2343: note = Description of Artificial Sequence: Synthetic coding sequence
  source 1..2343: mol_type = other DNA
atggccaccagcaacctgctgaagaacaagggcagcctgcagtttgaggacaagtgggacttcatgaggcccatcgtgctgaagctgctgcggcaggagagcgtgaccaagcagcagtggtttgacctcttcagtgatgtgcatgctgtgtgcctgtgggatgacaagggccctgccaagatccaccaggccctgaaggaggacatcctggagttcatcaagcaggcccaggcccgggtgctgagccaccaggatgacacagccctgctgaaggcctacatcgtggagtggaggaagttcttcacccagtgtgacatcctgcccaagcccttctgccagctggagatcaccctgatgggcaagcagggcagcaacaagaagagcaatgtggaggacagcatcgtgaggaagctgatgctggacacctggaatgaaagcatcttcagcaacatcaagaaccggctgcaggacagcgccatgaagctggtgcatgctgagcggctgggggaggcctttgacagccagctggtgattggagtgcgggagagctatgtgaacctgtgcagcaaccctgaggacaagctgcagatctacagagacaactttgagaaggcctacctggacagcacagagcgcttctaccgcacccaggcccccagctacctgcagcagaatggagtgcagaactacatgaagtatgcagatgccaagctgaaggaggaggagaagagggccctgcgctacctggagacccggcgggagtgcaacagcgtggaggccctgatggagtgctgcgtgaatgccctggtgaccagcttcaaggagaccatcctggccgagtgccagggcatgatcaagagaaatgaaacagagaagctgcacctgatgttcagcctgatggacaaggtgcccaatggaattgagcccatgctgaaggacctggaggagcacatcatctctgctggcctggccgacatggtggccgctgctgagaccatcaccacagattctgagaagtatgtggagcagctgctgaccctcttcaaccgcttcagcaagctggtgaaggaggccttccaggatgacccccgcttcctgacagcccgggacaaggcctacaaggctgtggtgaatgatgccaccatcttcaagctggagctgcccctgaagcagaagggcgtgggcctgaagacccagcctgagagcaaatgtcctgagctgctggccaactactgtgacatgctgctgaggaagacccccctgagcaagaagctgaccagcgaggagattgaggccaagctgaaggaggtgctgctggtgctgaagtatgtgcagaacaaggatgtgttcatgagataccacaaggcccacctgacccggcggctcatcctggacatctctgctgacagcgagattgaggagaacatggtggagtggctgcgggaggtgggcatgcctgctgactatgtgaacaagctggccaggatgttccaggacatcaaggtgtctgaggacctgaaccaggccttcaaggagatgcacaagaacaacaagctggccctgcctgctgacagcgtgaacatcaagatcctgaatgctggggcctggagccgcagcagcgagaaggtgtttgtgtccctgcccacagagctggaggacctgatccctgaggtggaggagttctacaagaagaaccacagcggcaggaagctgcactggcaccacctgatgagcaatggcatcatcaccttcaagaatgaggtgggccagtatgacctggaggtgaccaccttccagctggccgtgctgtttgcctggaaccagaggccccgggagaagatcagctttgagaacctgaagctggccacagagctgcctgatgctgagctgcggaggaccctgtggagcctggtggccttccccaagctgaagaggcaggtgctgctgtatgagccccaggtgaacagccccaaggacttcacagagggcaccctcttctctgtgaaccaggagttcagcctcatcaagaatgccaaggtgcagaagaggggcaagatcaacctgattggccgcctgcagctgaccacagagaggatgagggaggaggagaatgaaggaattgtgcagctgcgcatcctgcggacccaggaggccatcatccagatcatgaagatgaggaagaagatcagcaatgcccagctgcagacagagctggtggagatcctgaagaacatgttcctgccccagaagaagatgatcaaggagcagatcgagtggctgattgagcacaagtacatcagaagagatgaaagtgacatcaacaccttcatctacatggcctag

SEQ ID NO: 148755 - DNA, 2343 bp, synthetic construct; identical to SEQ ID NO: 148754
  misc_feature 1..2343: note = Description of Artificial Sequence: Synthetic coding sequence
  source 1..2343: mol_type = other DNA

SEQ ID NO: 148756 - DNA, 5097 bp, synthetic construct
  misc_feature 1..5097: note = Description of Artificial Sequence: Synthetic coding sequence
  source 1..5097: mol_type = other DNA
atggtgggggagctgcgctaccgggagttccgggtgcccctgggccctggcctgcacgcctacccagatgagctgatccggcagagggtgggccatgatggccaccctgagtaccagatccgctggctgatcctgcggagaggagatgaaggagatggcggcagcggccaggtggactgcaaggccgagcacatcctgctgtggatgagcaaggatgagatctatgccaactgccacaagatgctgggggaggatggccaggtgattggccccagccaggagagcgctggggaggtgggcgccctggacaagtctgtgctggaggagatggagacagatgtgaagagcctcatccagagggccctgcggcagctggaggagtgtgtgggcaccatccccccagcccccctgctgcacacagtgcacgtgctgagcgcctatgccagcattgagcccctgactggagtcttcaaggacccccgggtgctggacctgctgatgcacatgctgagcagcccagactaccagatccgctggagcgctggccgcatgatccaggccctgagcagccatgatgctggcaccaggacccagatcctgctgagcctgagccagcaggaggccatcgagaagcacctggactttgacagccgctgtgccctgctggccctgtttgcccaggccaccctgtctgagcaccccatgagctttgagggcatccagctgccccaggtgcccggccgggtgctcttcagcctggtgaagcgctacctgcacgtgaccagcctgctggaccagctgaatgacagcgctgctgagcccggggcccagaacaccagcgcccctgaggagctgagcggggagcggggccagctggagctggagttctccatggccatgggcaccctcatcagcgagctggtgcaggccatgcgctgggaccaggccagtgaccggcccaggagcagcgcccggagccctggcagcatcttccagccccagctggctgatgtgtccccaggcctgcctgctgcccaggcccagcccagcttccgccgcagccgccgcttccggcccaggagtgaatttgccagcggcaacacctacgccctgtatgtgcgggacaccctgcagcccggcatgagggtgaggatgctggatgattatgaggagatctctgctggagatgaaggagagttccggcagagcaacaatggagtgccccctgtgcaggtgttctgggagagcactggaagaacctactgggtgcactggcacatgctggagatcctgggctttgaagaagatattgaggacatggtggaggctgatgagtaccagggcgctgtggccagccgggtgctgggccgggccctgcctgcctggcgctggaggcccatgacagagctgtatgctgtgccctacgtgctgcctgaagatgaggacacagaagaatgtgagcacctgaccctggccgagtggtgggagctgctcttcttcatcaagaagctggatggccctgaccaccaggaggtgctgcagatcctgcaggagaacctggatggagagatcctggatgatgagatcctggccgagctggccgtgcccatcgagctggcccaggacctgctgctgaccctgccccagaggctgaatgacagcgccctgcgggacctgatcaactgccacgtgtacaagaagtatggccctgaggccctggccggcaaccaggcctaccccagcctgctggaggcccaggaggatgtgctgctgctggatgcccaggcccaggccaaggacagtgaagatgctgccaaggtggaggccaaggagccccccagccagagccccaacacccccctgcagaggctggtggagggctacggccctgctgggaagatcctgctggacctggagcaggccctgagcagcgagggcacccaggagaacaaggtgaagcccctgctgctgcagctgcagaggcagccccagcccttcctggccctgatgcagagcctggacaccccagagaccaacagaaccctgcacctgactgtgctgcgcatcctgaagcagctggtggacttccctgaggccctgctgctgccctggcatgaagctgtggatgcctgcatggcctgcctgcggagccccaacacagaccgggaggtgctgcaggagctgatcttcttcctgcaccggctgacctctgtgtcccgggactatgctgtggtgctgaaccagctgggcgccagagatgccatcagcaaggccctggagaagcacctgggcaagctggagctggcccaggagctgcgggacatggtgttcaagtgtgagaagcacgcccacctgtacaggaagctgatcaccaacatcctgggcggctgcatccagatggtgctgggccagatcgaggaccacaggaggacccaccagcccatcaacatccccttctttgatgtgttcctgcgctacctgtgccagggcagctctgtggaggtgaaggaggacaagtgctgggagaaggtggaggtgagcagcaacccccaccgggccagcaagctgacagaccacaaccccaagacctactgggagagcaatggcagcgctggcagccactacatcaccctgcacatgagaagaggcatcctgatccggcagctgaccctgctggtggccagcgaggacagcagctacatgcctgcccgggtggtggtgtgtggcggggacagcaccagcagcctgcacacagagctgaacagcgtgaatgtgatgcccagcgccagcagggtcatcctgctggagaacctgacccgcttctggcccatcatccagatccgcatcaagcgctgccagcagggcggcatcgacacccgcatccggggcctggagatcctgggccccaagcccaccttctggcctgtgttccgggagcagctgtgccgccacaccaggctcttctacatggtgcgggcccaggcctggagccaggacatggccgaggaccggcgcagcctgctgcacctgagcagccggctgaatggagccctgcggcaggagcagaactttgctgaccgcttcctgcctgatgatgaggccgcccaggccctgggcaagacctgctgggaggccctggtgtcccctgtggtgcagaacatcaccagcccagatgaagatggcatcagccccctgggctggctgctggaccagtacctggagtgccaggaggccgtgttcaacccccagagccggggccctgccttcttcagccgggtgcggcggctgacccacctgctggtgcacgtggagccctgtgaggcccctcctcctgtggtggccaccccccggcccaagggcaggaacagaagccatgactggagcagcctggccacccggggcctgcccagcagcatcatgaggaacctgacccgctgctggagggctgtggtggagaagcaggtgaacaacttcctgaccagctcctggagagatgatgactttgtgccccgctactgtgagcacttcaacatcctgcagaacagcagcagcgagctgtttggccccagggctgccttcctgctggccctgcagaatggctgtgccggggccctgctgaagctgcccttcctgaaggccgcccacgtgtctgagcagtttgcccggcacatcgaccagcagatccagggcagcagaattggaggagcccaggagatggagcggctggcccagctgcagcagtgcctgcaggccgtgctgatcttcagcggcctggagatcgccaccacctttgagcactactaccagcactacatggctgaccggctgctgggcgtggtgtcctcctggctggagggcgctgtgctggagcagatcggcccctgcttccccaaccggctgccccagcagatgctgcagagcctgagcaccagcaaggagctgcagaggcagttccacgtgtaccagctgcagcagctggaccaggagctgctgaagctggaggacacagagaagaagatccaggtgggcctgggcgccagcggcaaggagcacaagtctgagaaggaggaggaggccggggctgctgctgtggtggatgtggccgagggggaggaggaggaggaggagaatgaagacctgtactatgagggcgccatgcctgaggtgtctgtgctggtgctgagccgccacagctggcctgtggccagcatctgccacaccctgaaccccaggacctgcctgcccagctacctgcggggcaccctgaaccgctacagcaacttctacaacaagagccagagccacccagccctggagcggggcagccagaggcggctgcagtggacctggctgggctgggccgagctgcagtttggaaaccagaccctgcacgtgtccacagtgcagatgtggctgctgctgtacctgaatgacctgaaggctgtgtctgtggagagcctgctggccttcagcggcctgtctgctgacatgctgaaccaggccatcggccccctgaccagcagccggggccccctggacctgcacgagcagaaggacatccctggaggagtgctgaagatcagagatggcagcaaggagcccaggagccgctgggacatcgtgcggctcatccccccccagacctacctgcaggccgagggagaagatggccagaacctggagaagagaagaaacctgctgaactgcctgattgtgcgcatcctgaaggcccatggagatgagggcctgcacatcgaccagctggtgtgcctggtgctggaggcctggcagaagggcccctgccccccccggggcctggtgagcagcctgggcaagggcagcgcctgcagcagcacagatgtgctgagctgcatcctgcacctgctgggcaagggcaccctgcggagacatgatgaccggccccaggtgctgtcctatgctgtgcctgtgacagtgatggagccccacacagagagcctgaaccctggcagcagcggccccaacccccccctgaccttccacaccctgcagatccgcagccggggcgtgccctatgccagctgcacagccacccagagcttcagcaccttcagatag

SEQ ID NO: 148757 - DNA, 5349 bp, synthetic construct
  misc_feature 1..5349: note = Description of Artificial Sequence: Synthetic coding sequence
  source 1..5349: mol_type = other DNA
atgagccggggcttctggctggccgagcccctggccggcaccggcccccacccagcccctgtggccgctgacagccggggctgcagctctgtgcccaggagacatgcccccagccggctgtctgtgtccacccccagccggggccctggggccaggatggtgggggagctgcgctaccgggagttccgggtgcccctgggccctggcctgcacgcctacccagatgagctgatccggcagagggtgggccatgatggccaccctgagtaccagatccgctggctgatcctgcggagaggagatgaaggagatggcggcagcggccaggtggactgcaaggccgagcacatcctgctgtggatgagcaaggatgagatctatgccaactgccacaagatgctgggggaggatggccaggtgattggccccagccaggagagcgctggggaggtgggcgccctggacaagtctgtgctggaggagatggagacagatgtgaagagcctcatccagagggccctgcggcagctggaggagtgtgtgggcaccatccccccagcccccctgctgcacacagtgcacgtgctgagcgcctatgccagcattgagcccctgactggagtcttcaaggacccccgggtgctggacctgctgatgcacatgctgagcagcccagactaccagatccgctggagcgctggccgcatgatccaggccctgagcagccatgatgctggggagggccagtgtggggaggagggcaaggccggggagggcctgggccgcctgcgggacagccaggacacagtggccggggccagtgacctgatccgcaccaggacccagatcctgctgagcctgagccagcaggaggccatcgagaagcacctggactttgacagccgctgtgccctgctggccctgtttgcccaggccaccctgtctgagcaccccatgagctttgagggcatccagctgccccaggtgcccggccgggtgctcttcagcctggtgaagcgctacctgcacgtgaccagcctgctggaccagctgaatgacagcgctgctgagcccggggcccagaacaccagcgcccctgaggagctgagcggggagcggggccagctggagctggagttctccatggccatgggcaccctcatcagcgagctggtgcaggccatgcgctgggaccaggccagtgaccggcccaggagcagcgcccggagccctggcagcatcttccagccccagctggctgatgtgtccccaggcctgcctgctgcccaggcccagcccagcttccgccgcagccgccgcttccggcccaggagtgaatttgccagcggcaacacctacgccctgtatgtgcgggacaccctgcagcccggcatgagggtgaggatgctggatgattatgaggagatctctgctggagatgaaggagagttccggcagagcaacaatggagtgccccctgtgcaggtgttctgggagagcactggaagaacctactgggtgcactggcacatgctggagatcctgggctttgaagaagatattgaggacatggtggaggctgatgagtaccagggcgctgtggccagccgggtgctgggccgggccctgcctgcctggcgctggaggcccatgacagagctgtatgctgtgccctacgtgctgcctgaagatgaggacacagaagaatgtgagcacctgaccctggccgagtggtgggagctgctcttcttcatcaagaagctggatggccctgaccaccaggaggtgctgcagatcctgcaggagaacctggatggagagatcctggatgatgagatcctggccgagctggccgtgcccatcgagctggcccaggacctgctgctgaccctgccccagaggctgaatgacagcgccctgcgggacctgatcaactgccacgtgtacaagaagtatggccctgaggccctggccggcaaccaggcctaccccagcctgctggaggcccaggaggatgtgctgctgctggatgcccaggcccaggccaaggacagtgaagatgctgccaaggtggaggccaaggagccccccagccagagccccaacacccccctgcagaggctggtggagggctacggccctgctgggaagatcctgctggacctggagcaggccctgagcagcgagggcacccaggagaacaaggtgaagcccctgctgctgcagctgcagaggcagccccagcccttcctggccctgatgcagagcctggacaccccagagaccaacagaaccctgcacctgactgtgctgcgcatcctgaagcagctggtggacttccctgaggccctgctgctgccctggcatgaagctgtggatgcctgcatggcctgcctgcggagccccaacacagaccgggaggtgctgcaggagctgatcttcttcctgcaccggctgacctctgtgtcccgggactatgctgtggtgctgaaccagctgggcgccagagatgccatcagcaaggccctggagaagcacctgggcaagctggagctggcccaggagctgcgggacatggtgttcaagtgtgagaagcacgcccacctgtacaggaagctgatcaccaacatcctgggcggctgcatccagatggtgctgggccagatcgaggaccacaggaggacccaccagcccatcaacatccccttctttgatgtgttcctgcgctacctgtgccagggcagctctgtggaggtgaaggaggacaagtgctgggagaaggtggaggtgagcagcaacccccaccgggccagcaagctgacagaccacaaccccaagacctactgggagagcaatggcagcgctggcagccactacatcaccctgcacatgagaagaggcatcctgatccggcagctgaccctgctggtggccagcgaggacagcagctacatgcctgcccgggtggtggtgtgtggcggggacagcaccagcagcctgcacacagagctgaacagcgtgaatgtgatgcccagcgccagcagggtcatcctgctggagaacctgacccgcttctggcccatcatccagatccgcatcaagcgctgccagcagggcggcatcgacacccgcatccggggcctggagatcctgggccccaagcccaccttctggcctgtgttccgggagcagctgtgccgccacaccaggctcttctacatggtgcgggcccaggcctggagccaggacatggccgaggaccggcgcagcctgctgcacctgagcagccggctgaatggagccctgcggcaggagcagaactttgctgaccgcttcctgcctgatgatgaggccgcccaggccctgggcaagacctgctgggaggccctggtgtcccctgtggtgcagaacatcaccagcccagatgaagatggcatcagccccctgggctggctgctggaccagtacctggagtgccaggaggccgtgttcaacccccagagccggggccctgccttcttcagccgggtgcggcggctgacccacctgctggtgcacgtggagccctgtgaggcccctcctcctgtggtggccaccccccggcccaagggcaggaacagaagccatgactggagcagcctggccacccggggcctgcccagcagcatcatgaggaacctgacccgctgctggagggctgtggtggagaagcaggtgaacaacttcctgaccagctcctggagagatgatgactttgtgccccgctactgtgagcacttcaacatcctgcagaacagcagcagcgagctgtttggccccagggctgccttcctgctggccctgcagaatggctgtgccggggccctgctgaagctgcccttcctgaaggccgcccacgtgtctgagcagtttgcccggcacatcgaccagcagatccagggcagcagaattggaggagcccaggagatggagcggctggcccagctgcagcagtgcctgcaggccgtgctgatcttcagcggcctggagatcgccaccacctttgagcactactaccagcactacatggctgaccggctgctgggcgtggtgtcctcctggctggagggcgctgtgctggagcagatcggcccctgcttccccaaccggctgccccagcagatgctgcagagcctgagcaccagcaaggagctgcagaggcagttccacgtgtaccagctgcagcagctggaccaggagctgctgaagctggaggacacagagaagaagatccaggtgggcctgggcgccagcggcaaggagcacaagtctgagaaggaggaggaggccggggctgctgctgtggtggatgtggccgagggggaggaggaggaggaggagaatgaagacctgtactatgagggcgccatgcctgaggtgtctgtgctggtgctgagccgccacagctggcctgtggccagcatctgccacaccctgaaccccaggacctgcctgcccagctacctgcggggcaccctgaaccgctacagcaacttctacaacaagagccagagccacccagccctggagcggggcagccagaggcggctgcagtggacctggctgggctgggccgagctgcagtttggaaaccagaccctgcacgtgtccacagtgcagatgtggctgctgctgtacctgaatgacctgaaggctgtgtctgtggagagcctgctggccttcagcggcctgtctgctgacatgctgaaccaggccatcggccccctgaccagcagccggggccccctggacctgcacgagcagaaggacatccctggaggagtgctgaagatcagagatggcagcaaggagcccaggagccgctgggacatcgtgcggctcatccccccccagacctacctgcaggccgagggagaagatggccagaacctggagaagagaagaaacctgctgaactgcctgattgtgcgcatcctgaaggcccatggagatgagggcctgcacatcgaccagctggtgtgcctggtgctggaggcctggcagaagggcccctgccccccccggggcctggtgagcagcctgggcaagggcagcgcctgcagcagcacagatgtgctgagctgcatcctgcacctgctgggcaagggcaccctgcggagacatgatgaccggccccaggtgctgtcctatgctgtgcctgtgacagtgatggagccccacacagagagcctgaaccctggcagcagcggccccaacccccccctgaccttccacaccctgcagatccgcagccggggcgtgccctatgccagctgcacagccacccagagcttcagcaccttcagatag

SEQ ID NO: 148758 - DNA, 435 bp, synthetic construct
  misc_feature 1..435: note = Description of Artificial Sequence: Synthetic coding sequence
  source 1..435: mol_type = other DNA
atgggcgtgctgcaggtggtgaagcagagcgtgcagatccctgtgtttgtgatgatccggccccggggcggggacttcctgtacagcgaccgggagattgaggtgatgaaggctgacatccggctggccaagctgtatggagcagatggcctggtgtttggagccctgacagaagatggccacatcgacaaggagctgtgcatgagcctgatggccatctgccggcccctgcctgtgaccttccaccgggcctttgacatggtgcatgaccccatggccgccctggagaccctgctgaccctgggctttgagcgggtgctgaccagcggctgtgacagcagcgccctggagggcctgcccctcatcaagaggctcatcgagcaggccaagggcagaattgtggtgatgcctgggggcggcatcacagacagatag

SEQ ID NO: 148759 - DNA, 822 bp, synthetic construct
  misc_feature 1..822: note = Description of Artificial Sequence: Synthetic coding sequence
  source 1..822: mol_type = other DNA
atgaagaggcagggcgccagcagcgagaggaagagggcccgcatccccagcggcaaggccggggccgccaacggcttcctgatggaggtgtgtgtggacagcgtggagagcgctgtgaatgctgagcggggcggcgctgacagaattgagctgtgcagcggcctgtctgagggcggcaccacccccagcatgggcgtgctgcaggtggtgaagcagagcgtgcagatccctgtgtttgtgatgatccggccccggggcggggacttcctgtacagcgaccgggagattgaggtgatgaaggctgacatccggctggccaagctgtatggagcagatggcctggtgtttggagccctgacagaagatggccacatcgacaaggagctgtgcatgagcctgatggccatctgccggcccctgcctgtgaccttccaccgggcctttgacatggtgcatgaccccatggccgccctggagaccctgctgaccctgggctttgagcgggtgctgaccagcggctgtgacagcagcgccctggagggcctgcccctcatcaagaggctgattgagcaggccaagggccgcatcgtggtgatgcctgggggcggcatcacagacaggaacctgcagaggatcctggagggcagcggggccacagagttccactgcagcgcccggagcacccgggacagcggcatgaagttcaggaacagctctgtggccatgggcgccagcctgagctgcagcgagtacagcctgaaggtgacagatgtgaccaaggtgaggaccctgaatgccatcgccaagaacatcctggtgtag

SEQ ID NO: 148760 - DNA, 1122 bp, synthetic construct
  misc_feature 1..1122: note = Description of Artificial Sequence: Synthetic coding sequence
  source 1..1122: mol_type = other DNA
atgagcctgctgctgctgctgctgctggtgtcctactacgtgggcaccctgggcacccacacagagatcaagagggtggccgaggagaaggtgaccctgccctgccaccaccagctgggcctgcctgagaaggacaccctggacatcgagtggctgctgacagacaatgaaggcaaccagaaggtggtgatcacctacagcagccgccacgtgtacaacaacctgacagaggagcagaagggccgggtggcctttgccagcaacttcctggccggagatgccagcctgcagatcgagcccctgaagcccagtgatgagggccgctacacctgcaaggtgaagaacagcggccgctacgtgtggagccacgtgatcctgaaggtgctggtgcggcccagcaagcccaagtgtgagctggagggggagctgacagagggcagtgacctgaccctgcagtgtgagagcagcagcggcacagagcccatcgtgtactactggcagaggatccgggagaaggagggagaagatgagcggctgccccccaagagcagaattgactacaaccaccctggccgggtgctgctgcagaacctgaccatgagctacagcggcctgtaccagtgcacagctggaaatgaggccggcaaggagagctgtgtggtgcgggtgacagtgcagtatgtgcagagcatcggcatggtggccggggctgtgactggaattgtggccggggccctgctgatcttcctgctggtgtggctgctgatccggaggaaggacaaggagagatatgaggaggaggagcggcccaatgagatcagagaagatgctgaggcccccaaggcccggctggtgaagcccagcagcagcagcagcggcagccgcagcagccgcagcggcagcagcagcaccaggagcacagccaacagcgccagccgcagccagaggaccctgagcacagatgctgccccccagcccggcctggccacccaggcctacagcctggtgggccctgaggtgcggggcagcgagcccaagaaggtgcaccacgccaacctgaccaaggccgagaccacccccagcatgatccccagccagagccgggccttccagacagtgtag

SEQ ID NO: 148761 - DNA, 597 bp, synthetic construct
  misc_feature 1..597: note = Description of Artificial Sequence: Synthetic coding sequence
  source 1..597: mol_type = other DNA
atgcaccacagaaatgacagccagaggctgggcaaggccggctgccccccagagcccagcctgcagatggccaacaccaacttcctgagcaccctgagccctgagcactgccggcccctggccggggagtgcatgaacaagctgaagtgtggggctgctgaggccgagatcatgaacctgcctgagcgggtgggcaccttcagcgccatcccagccctgggcggcatcagcctgcccccaggagtgattgtgatgacagccctgcacagccctgctgctgccagcgctgctgtgacagattctgccttccagatcgccaacctggccgactgcccccagaaccacagcagcagcagcagcagcagcagtggaggagctgggggcgccaacccagccaagaagaagaggaagagatgtggggtgtgtgtgccctgcaagaggctcatcaactgtggggtgtgcagcagctgcaggaacaggaagacaggccaccagatctgcaagttcagaaaatgtgaggagctgaagaagaagccaggcaccagcctggagaggacccctgtgcccagcgctgaggccttccgctggttcttctag

SEQ ID NO: 148762 - DNA, 597 bp, synthetic construct; identical to SEQ ID NO: 148761
  misc_feature 1..597: note = Description of Artificial Sequence: Synthetic coding sequence
  source 1..597: mol_type = other DNA

SEQ ID NO: 148763 - DNA, 969 bp, synthetic construct
  misc_feature 1..969: note = Description of Artificial Sequence: Synthetic coding sequence
  source 1..969: mol_type = other DNA
atgagcagcctgggcggcggcagccaggatgctgggggcagcagcagcagcagcaccaacggcagcggcggcagcggcagcagcggccccaaggccggggctgctgacaagtctgctgtggtggccgccgccgccccagcctctgtggctgatgacaccccacctcctgagaggaggaacaagagcggcatcatcagcgagcccctgaacaagagcctgcggcgcagccggcccctgagccactacagcagctttggcagcagcggcggcagcggcggcggctccatgatgggcggggagagcgctgacaaggccacagctgctgctgctgctgccagcctgctggccaatggacatgacctggccgccgccatggctgtggacaagagcaaccccaccagcaagcacaagagcggggctgtggccagcctgctgagcaaggccgagcgggccacagagctggccgctgagggccagctgaccctgcagcagtttgcccagagcacagagatgctgaagagggtggtgcaggagcacctgcccctgatgtctgaggccggggccggcctgcctgacatggaggccgtggccggggctgaggccctgaatggccagagcgacttcccctacctgggcgccttccccatcaaccctggcctcttcatcatgaccccagctggggtcttcctggccgagagcgccctgcacatggccggcctggccgagtaccccatgcagggcgagctggccagcgccatcagcagcggcaagaagaagaggaagagatgtggcatgtgtgccccctgcagaagacgcatcaactgtgagcagtgcagcagctgcaggaacaggaagacaggccaccagatctgcaagttcagaaaatgtgaggagctgaagaagaagcccagcgctgccctggagaaggtgatgctgcccaccggggccgccttccgctggttccagtag

SEQ ID NO: 148764 - DNA, 210 bp, synthetic construct
  misc_feature 1..210: note = Description of Artificial Sequence: Synthetic coding sequence
  source 1..210: mol_type = other DNA
atgagcagcctgggcggcggcagccaggatgctgggggcagcagcagcagcagcaccaacggcagcggcggcagcggcagcagcggccccaaggccggggctgctgacaagtctgctgtggtggccgccgccgccccagcctctgtggctgatgacaccccacctcctgagaggaggaacaagagcggcatcatcagcgagcccctgtag

SEQ ID NO: 148765 - DNA, 243 bp, synthetic construct
  misc_feature 1..243: note = Description of Artificial Sequence: Synthetic coding sequence
  source 1..243: mol_type = other DNA
atgagcagcctgggcggcggcagccaggatgctgggggcagcagcagcagcagcaccaacggcagcggcggcagcggcagcagcggccccaaggccggggctgctgacaagtctgctgtggtggccgccgccgccccagcctctgtggctgatgacaccccacctcctgagaggaggaacaagagcggcatcatcagcgagcccctgaacaagagcctgcggcgcagccggcccctgtcctag

SEQ ID NO: 148766 - DNA, 546 bp, synthetic construct
  misc_feature 1..546: note = Description of Artificial Sequence: Synthetic coding sequence
  source 1..546: mol_type = other DNA
atgagcagcctgggcggcggcagccaggatgctgggggcagcagcagcagcagcaccaacggcagcggcggcagcggcagcagcggccccaaggccggggctgctgacaagtctgctgtggtggccgccgccgccccagcctctgtggctgatgacaccccacctcctgagaggaggaacaagagcggcatcatcagcgagcccctgaacaagagcctgcggcgcagccggcccctgagccactacagcagctttggcagcagcggcggcagcggcggcggctccatgatgggcggggagagcgctgacaaggccacagctgctgctgctgctgccagcctgctggccaatggacatgacctggccgccgccatggctgtggacaagagcaaccccaccagcaagcacaagagcggggctgtggccagcctgctgagcaaggccgagcgggccacagagctggccgctgagggccagctgaccctgcagcagtttgcccagagcacagagatgctgaagagggtggtgcaggagcacctgccctag

SEQ ID NO: 148767 - DNA, 252 bp, synthetic construct
  misc_feature 1..252: note = Description of Artificial Sequence: Synthetic coding sequence
  source 1..252: mol_type = other DNA
atgagcagcctgggcggcggcagccaggatgctgggggcagcagcagcagcagcaccaacggcagcggcggcagcggcagcagcggccccaaggccggggctgctgacaagtctgctgtggtggccgccgccgccccagcctctgtggctgatgacaccccacctcctgagaggaggaacaagagcggcatcatcagcgagcccctgaacaagagcctgcggcgcagccggcccctgagccactacagctag

SEQ ID NO: 148768 - DNA, 486 bp, synthetic construct
  misc_feature 1..486: note = Description of Artificial Sequence: Synthetic coding sequence
  source 1..486: mol_type = other DNA
atgagcagcctgggcggcggcagccaggatgctgggggcagcagcagcagcagcaccaacggcagcggcggcagcggcagcagcggccccaaggccggggctgctgacaagtctgctgtggtggccgccgccgccccagcctctgtggctgatgacaccccacctcctgagaggaggaacaagagcggcatcatcagcgagcccctgaacaagagcctgcggcgcagccggcccctgagccactacagcagctttggcagcagcggcggcagcggcggcggctccatgatgggcggggagagcgctgacaaggccacagctgctgctgctgctgccagcctgctggccaatggacatgacctggccgccgccatggctgtggacaagagcaaccccaccagcaagcacaagagcggggctgtggccagcctgctgagcaaggccgagcgggccacagagctggccgctgagggccagctgacctag

SEQ ID NO: 148769 - DNA, 309 bp, synthetic construct
  misc_feature 1..309: note = Description of Artificial Sequence: Synthetic coding sequence
  source 1..309: mol_type = other DNA
atgagcagcctgggcggcggcagccaggatgctgggggcagcagcagcagcagcaccaacggcagcggcggcagcggcagcagcggccccaaggccggggctgctgacaagtctgctgtggtggccgccgccgccccagcctctgtggctgatgacaccccacctcctgagaggaggaacaagagcggcatcatcagcgagcccctgaacaagagcctgcggcgcagccggcccctgagccactacagcagctttggcagcagcggcggcagcggcggcggctccatgatgggcggggagagcgcctag

SEQ ID NO: 148770 - DNA, 36 bp, synthetic construct
  misc_feature 1..36: note = Description of Artificial Sequence: Synthetic coding sequence
  source 1..36: mol_type = other DNA
atgagcagcctgggcggcggcagccaggatgcctag

SEQ ID NO: 148771 - DNA, 297 bp, synthetic construct
  misc_feature 1..297: note = Description of Artificial Sequence: Synthetic coding sequence
  source 1..297: mol_type = other DNA
atgagcagcctgggcggcggcagccaggatgctgggggcagcagcagcagcagcaccaacggcagcggcggcagcggcagcagcggccccaaggccggggctgctgacaagtctgctgtggtggccgccgccgccccagcctctgtggctgatgacaccccacctcctgagaggaggaacaagagcggcatcatcagcgagcccctgaacaagagcctgcggcgcagccggcccctgagccactacagcagctttggcagcagcggcggcagcggcggcggctccatgatgggctag

SEQ ID NO: 148772 - DNA, 969 bp, synthetic construct; identical to SEQ ID NO: 148763
  misc_feature 1..969: note = Description of Artificial Sequence: Synthetic coding sequence
  source 1..969: mol_type = other DNA

SEQ ID NO: 148773 - DNA, 594 bp, synthetic construct
  misc_feature 1..594: note = Description of Artificial Sequence: Synthetic coding sequence
  source 1..594: mol_type = other DNA
atgagcagcctgggcggcggcagccaggatgctgggggcagcagcagcagcagcaccaacggcagcggcggcagcggcagcagcggccccaaggccggggctgctgacaagtctgctgtggtggccgccgccgccccagcctctgtggctgatgacaccccacctcctgagaggaggaacaagagcggcatcatcagcgagcccctgaacaagagcctgcggcgcagccggcccctgagccactacagcagctttggcagcagcggcggcagcggcggcggctccatgatgggcggggagagcgctgacaaggccacagctgctgctgctgctgccagcctgctggccaatggacatgacctggccgccgccatggctgtggacaagagcaaccccaccagcaagcacaagagcggggctgtggccagcctgctgagcaaggccgagcgggccacagagctggccgctgagggccagctgaccctgcagcagtttgcccagagcacagagatgctgaagagggtggtgcaggagcacctgcccctgatgtctgaggccggggccggcctgcctgacatggaggccgtggcctag

SEQ ID NO: 148774 - DNA, 27 bp, synthetic construct
  misc_feature 1..27: note = Description of Artificial Sequence: Synthetic coding sequence
  source 1..27: mol_type = other DNA
atgagcagcctgggcggcggcagctag

SEQ ID NO: 148775 - DNA, 222 bp, synthetic construct
  misc_feature 1..222: note = Description of Artificial Sequence: Synthetic coding sequence
  source 1..222: mol_type = other DNA
atgagcagcctgggcggcggcagccaggatgctgggggcagcagcagcagcagcaccaacggcagcggcggcagcggcagcagcggccccaaggccggggctgctgacaagtctgctgtggtggccgccgccgccccagcctctgtggctgatgacaccccacctcctgagaggaggaacaagagcggcatcatcagcgagcccctgaacaagagcctgtag

SEQ ID NO: 148776 - DNA, 414 bp, synthetic construct
  misc_feature 1..414: note = Description of Artificial Sequence: Synthetic coding sequence
  source 1..414: mol_type = other DNA
atgagcagcctgggcggcggcagccaggatgctgggggcagcagcagcagcagcaccaacggcagcggcggcagcggcagcagcggccccaaggccggggctgctgacaagtctgctgtggtggccgccgccgccccagcctctgtggctgatgacaccccacctcctgagaggaggaacaagagcggcatcatcagcgagcccctgaacaagagcctgcggcgcagccggcccctgagccactacagcagctttggcagcagcggcggcagcggcggcggctccatgatgggcggggagagcgctgacaaggccacagctgctgctgctgctgccagcctgctggccaatggacatgacctggccgccgccatggctgtggacaagagcaaccccaccagcaagcacaagtag

SEQ ID NO: 148777 - DNA, 2073 bp, synthetic construct
  misc_feature 1..2073: note = Description of Artificial Sequence: Synthetic coding sequence
  source 1..2073: mol_type = other DNA
atgaagctgtccatgaagaacaacatcatcaacacccagcagagctttgtgaccatgcccaacgtgattgtgcctgacatcgagaaggagatccggaggatggagaatggagcctgcagcagcttctctgaagatgatgacagcgccagcaccagcgaggagagtgaaaatgaaaacccccacgcccggggcagcttctcctacaagagcctgaggaaaggaggccccagccagcgggagcagtacctgcccggggccatcgccctcttcaacgtgaacaacagcagcaacaaggaccaggagcctgaggagaagaagaagaagaagaaggagaagaagagcaagagtgatgacaagaatgaaaacaagaatgaccctgagaagaagaagaagaagaaggacaaggagaagaagaagaaggaggagaagagcaaggacaagaaggaggaggagaagaaggaggtggtggtgattgaccccagcggcaacacctactacaactggctgttctgcatcaccctgcctgtgatgtacaactggaccatggtgattgcccgggcctgctttgatgagctgcagagcgactacctggagtactggctgatcctggactatgtgtctgacatcgtgtacctgattgacatgtttgtgaggaccaggacaggctacctggagcagggcctgctggtgaaggaggagctgaagctgatcaacaagtacaagagcaacctgcagttcaagctggatgtgctgagcctcatccccacagacctgctgtacttcaagctgggctggaactacccagagatccggctgaaccggctgctgcgcttcagcaggatgtttgagttcttccagaggacagagaccaggaccaactaccccaacatcttccgcatcagcaacctggtgatgtacatcgtcatcatcatccactggaatgcctgtgtgttctacagcatcagcaaggccatcggctttggaaatgacacctgggtgtacccagacatcaatgaccctgagtttggccgcctggccaggaaatatgtgtacagcctgtactggagcaccctgaccctgaccaccatcggggagaccccacctcctgtgcgggacagtgaatatgtgtttgtggtggtggacttcctgattggagtgctgatctttgccaccatcgtgggcaacatcggctccatgatcagcaacatgaatgctgcccgggcagagttccaggccagaattgatgccatcaagcagtacatgcacttcagaaatgtgtccaaggacatggagaagagggtcatcaagtggtttgactacctgtggaccaacaagaagacagtggatgagaaggaggtgctgaagtacctgcctgacaagctgcgggcagaaattgccatcaacgtgcacctggacaccctgaagaaggtgcgcatctttgctgactgtgaggccggcctgctggtggagctggtgctgaagctgcagccccaggtgtacagccctggggactacatctgcaagaagggggacatcggccgggagatgtacatcatcaaggagggcaagctggccgtggtggctgatgatggagtgacccagtttgtggtgctgagtgatggcagctactttggagagatcagcatcctgaacatcaagggcagcaaggccggcaacagaagaacagccaacatcaagagcatcggctacagcgacctcttctgcctgagcaaggatgacctgatggaggccctgacagagtacccagatgccaagaccatgctggaggagaagggcaagcagatcctgatgaaggatggcctgctggacctgaacatcgccaatgccggcagtgaccccaaggacctggaggagaaggtgaccaggatggagggctctgtggacctgctgcagaccaggtttgcccgcatcctggccgagtatgagagcatgcagcagaagctgaagcagaggctgaccaaggtggagaagttcctgaagcccctgattgacacagagttcagcagcattgagggccctggagctgagagcggccccatcgacagcacctag

SEQ ID NO: 148778 - DNA, 2280 bp, synthetic construct
  misc_feature 1..2280: note = Description of Artificial Sequence: Synthetic coding sequence
  source 1..2280: mol_type = other DNA
atggagagccgcagcagcccccggctggagtgcagcggggccatcagcgcccactgcagcctgcacctgcctgacagcagtgacttccagctgatctttgtgttcctggtggagatgggcttccaccacgtgggccaggccggcctggagctgctgatcagcagtgacctgcccaccagcgccagccagagcgctggcatcacagacatgaagctgtccatgaagaacaacatcatcaacacccagcagagctttgtgaccatgcccaacgtcatcgtgcctgacatcgagaaggagatccggaggatggagaatggagcctgcagcagcttctctgaagatgatgattctgccagcaccagcgaggagagtgaaaatgaaaacccccacgcccggggcagcttctcctacaagagcctgaggaagggcggccccagccagcgggagcagtacctgcccggggccatcgccctcttcaacgtgaacaacagcagcaacaaggaccaggagcctgaggagaagaagaagaagaagaaggagaagaagagcaagagtgatgacaagaatgaaaacaagaatgaccctgagaagaagaagaagaagaaggacaaggagaagaagaagaaggaggagaagagcaaggacaagaaggaggaggagaagaaggaggtggtggtgattgaccccagcggcaacacctactacaactggctgttctgcatcaccctgcctgtgatgtacaactggaccatggtgattgcccgggcctgctttgatgagctgcagagcgactacctggagtactggctgatcctggactatgtgtctgacatcgtgtacctgattgacatgtttgtgaggaccaggacaggctacctggagcagggcctgctggtgaaggaggagctgaagctgatcaacaagtacaagagcaacctgcagttcaagctggatgtgctgagcctcatccccacagacctgctgtacttcaagctgggctggaactacccagagatccggctgaaccggctgctgcgcttcagcaggatgtttgagttcttccagaggacagagaccaggaccaactaccccaacatcttccgcatcagcaacctggtgatgtacatcgtcatcatcatccactggaatgcctgtgtgttctacagcatcagcaaggccatcggctttggaaatgacacctgggtgtacccagacatcaatgaccctgagtttggccgcctggccaggaaatatgtgtacagcctgtactggagcaccctgaccctgaccaccatcggggagaccccacctcctgtgcgggacagtgaatatgtgtttgtggtggtggacttcctgattggagtgctgatctttgccaccatcgtgggcaacatcggctccatgatcagcaacatgaatgctgcccgggcagagttccaggccagaattgatgccatcaagcagtacatgcacttcagaaatgtgtccaaggacatggagaagagggtcatcaagtggtttgactacctgtggaccaacaagaagacagtggatgagaaggaggtgctgaagtacctgcctgacaagctgcgggcagagatcgccatcaacgtgcacctggacaccctgaagaaggtgcgcatctttgctgactgtgaggccggcctgctggtggagctggtgctgaagctgcagccccaggtgtacagccctggggactacatctgcaagaagggggacatcggccgggagatgtacatcatcaaggagggcaagctggccgtggtggctgatgatggagtgacccagtttgtggtgctgagtgatggcagctactttggagagatcagcatcctgaacatcaagggcagcaaggccggcaacagaagaacagccaacatcaagagcatcggctacagcgacctcttctgcctgagcaaggatgacctgatggaggccctgacagagtacccagatgccaagaccatgctggaggagaagggcaagcagatcctgatgaaggatggcctgctggacctgaacatcgccaatgccggcagtgaccccaaggacctggaggagaaggtgaccaggatggagggctctgtggacctgctgcagaccaggtttgcccgcatcctggccgagtatgaatccatgcagcagaagctgaagcagaggctgaccaaggtggagaagttcctgaagcccctgattgacacagagttcagcagcattgagggccctggagctgagagcggccccatcgacagcacctag

SEQ ID NO: 148779 - DNA, 2073 bp, synthetic construct; identical to SEQ ID NO: 148777
  misc_feature 1..2073: note = Description of Artificial Sequence: Synthetic coding sequence
  source 1..2073: mol_type = other DNA

SEQ ID NO: 148780 - DNA, 387 bp, synthetic construct
  misc_feature 1..387: note = Description of Artificial Sequence: Synthetic coding sequence
  source 1..387: mol_type = other DNA
atgaagctgtccatgaagaacaacatcatcaacacccagcagagctttgtgaccatgcccaacgtgattgtgcctgacatcgagaaggagatccggaggatggagaatggagcctgcagcagcttctctgaagatgatgacagcgccagcaccagcgaggagagtgaaaatgaaaacccccacgcccggggcagcttctcctacaagagcctgaggaaaggaggccccagccagcgggagcagtacctgcccggggccatcgccctcttcaacgtgaacaacagcagcaacaaggaccaggagcctgaggagaagaagaagaagaagaaggagaagaagagcaagagtgatgacaagaatgaaaacaagaatgaccctgagaagtag

SEQ ID NO: 148781 - DNA, 300 bp, synthetic construct
  misc_feature 1..300: note = Description of Artificial Sequence: Synthetic coding sequence
  source 1..300: mol_type = other DNA
atgaagctgtccatgaagaacaacatcatcaacacccagcagagctttgtgaccatgcccaacgtgattgtgcctgacatcgagaaggagatccggaggatggagaatggagcctgcagcagcttctctgaagatgatgacagcgccagcaccagcgaggagagtgaaaatgaaaacccccacgcccggggcagcttctcctacaagagcctgaggaaaggaggccccagccagcgggagcagtacctgcccggggccatcgccctcttcaacgtgaacaacagcagcaacaaggactag

SEQ ID NO: 148782 - DNA, 2073 bp, synthetic construct; identical to SEQ ID NO: 148777
  misc_feature 1..2073: note = Description of Artificial Sequence: Synthetic coding sequence
  source 1..2073: mol_type = other DNA

SEQ ID NO: 148783 - DNA, 300 bp, synthetic construct; identical to SEQ ID NO: 148781
  misc_feature 1..300: note = Description of Artificial Sequence: Synthetic coding sequence
  source 1..300: mol_type = other DNA

SEQ ID NO: 148784 - DNA, 2073 bp, synthetic construct; identical to SEQ ID NO: 148777
  misc_feature 1..2073: note = Description of Artificial Sequence: Synthetic coding sequence
  source 1..2073: mol_type = other DNA

SEQ ID NO: 148785 - DNA, 1995 bp, synthetic construct
  misc_feature 1..1995: note = Description of Artificial Sequence: Synthetic coding sequence
  source 1..1995: mol_type = other DNA
atgacagagaagaccaacggggtgaagagcagccctgccaacaaccacaaccaccacgcccccccagccatcaaggccaacgggaaggatgaccacaggaccagcagccggccccacagcgctgctgatgatgacaccagcagcgagctgcagaggctggctgatgtggatgccccccagcagggccgcagcggcttcagaagaattgtgcggctggtgggcatcatccgggagtgggccaacaagaacttccgggaggaggagcccaggccagacagcttcctggagcgcttccggggccctgagctgcagacagtgaccacccaggagggagatggcaagggggacaaggatggagaggacaagggcaccaagaagaagtttgagctgtttgtgctggaccctgctggggactggtactactgctggctgtttgtgattgccatgcctgtgctgtacaactggtgcctgctggtggcccgggcctgcttcagtgacctgcagaagggctactacctggtgtggctggtgctggactatgtgtctgatgtggtgtacatcgctgacctcttcatccggctgaggacaggcttcctggagcagggcctgctggtgaaggacaccaagaagctgcgggacaactacatccacaccctgcagttcaagctggatgtggccagcatcatccccacagacctgatctactttgctgtggacatccacagccctgaggtgcgcttcaaccggctgctgcactttgccaggatgtttgagttctttgacagaacagagaccaggaccaactaccccaacatcttccgcatcagcaacctggtgctgtacatcctggtgatcatccactggaatgcctgcatctactatgccatcagcaagagcatcggcttcggcgtggacacctgggtgtaccccaacatcacagatcctgaatatggctacctggcccgggagtacatctactgcctgtactggagcaccctgaccctgaccaccatcggggagaccccacctcctgtgaaggatgaggagtacctgtttgtgatctttgacttcctgattggagtgctgatctttgccaccatcgtgggcaatgtgggctccatgatcagcaacatgaatgccaccagggctgagttccaggccaagattgatgctgtgaagcactacatgcagttcaggaaggtgtccaagggcatggaggccaaggtgatccgctggtttgactacctgtggaccaacaagaagacagtggatgagcgggagatcctgaagaacctgcctgccaagctgcgggcagagatcgccatcaacgtgcacctgagcaccctgaagaaggtgcgcatcttccatgactgtgaggccggcctgctggtggagctggtgctgaagctgcggccccaggtgttcagccctggggactacatctgcaggaagggggacatcggcaaggagatgtacatcatcaaggagggcaagctggccgtggtggctgatgatggagtgacccagtatgccctgctgtctgctggcagctgctttggagagatcagcatcctgaacatcaagggcagcaagatgggcaacagaagaacagccaacatccgcagcctgggctacagcgacctcttctgcctgagcaaggatgacctgatggaggccgtgacagagtacccagatgccaagaaggtgctggaggagcggggccgggagatcctgatgaaggagggcctgctggatgaaaatgaggtggccacctccatggaggtggatgtgcaggagaagctgggccagctggagaccaacatggagaccctgtacaccaggtttggccgcctgctggccgagtacacaggagcccagcagaagctgaagcagaggatcaccgtgctggagaccaagatgaagcagaacaatgaagatgactacctgagtgatggcatgaacagccctgagctggccgctgctgatgagccctag

SEQ ID NO: 148786 - DNA, 2085 bp, synthetic construct
  misc_feature 1..2085: note = Description of Artificial Sequence: Synthetic coding sequence
  source 1..2085: mol_type = other DNA
atggccaagatcaacacccagtacagccaccccagcaggacccacctgaaggtgaagaccagtgaccgggacctgaacagagcagaaaatggcctgagccgggcccacagcagcagcgaggagaccagctctgtgctgcagcccggcatcgccatggagacccggggcctggccgacagcggccagggcagcttcaccggccagggcatcgcccggctgagccgcctcatcttcctgctgcggcgctgggccgcccggcacgtgcaccaccaggaccagggccctgacagcttcccagaccgcttcagaggagctgagctgaaggaggtgagcagccaggagagcaatgcccaggccaacgtgggcagccaggagcctgctgaccggggccgcagcgcctggcccctggccaagtgcaacaccaacaccagcaacaacacagaggaggagaagaagaccaagaagaaggatgccatcgtggtggaccccagcagcaacctgtactaccgctggctgacagccatcgccctgcccgtcttctacaactggtacctgctgatctgccgggcctgctttgatgagctgcagagcgagtacctgatgctgtggctggtgctggactacagcgcagatgtgctgtatgtgctggatgtgctggtgcgggccaggacaggcttcctggagcagggcctgatggtgtctgacaccaaccggctgtggcagcactacaagaccaccacccagttcaagctggatgtgctgagcctggtgcccacagacctggcctacctgaaggtgggcaccaactacccagaggtgcgcttcaaccggctgctgaagttcagccggctgtttgagttctttgacagaacagagaccaggaccaactaccccaacatgttcagaattggcaacctggtgctgtacatcctgatcatcatccactggaatgcctgcatctactttgccatcagcaagttcatcggcttcggcacagacagctgggtgtaccccaacatcagcatccctgagcacggccgcctgagcaggaagtacatctacagcctgtactggagcaccctgaccctgaccaccatcggggagaccccacctcctgtgaaggatgaggagtacctgtttgtggtggtggacttcctggtgggcgtgctgatctttgccaccatcgtgggcaatgtgggctccatgatcagcaacatgaatgccagcagagctgagttccaggccaagattgacagcatcaagcagtacatgcagttcaggaaggtgaccaaggacctggagaccagggtcatccgctggtttgactacctgtgggccaacaagaagacagtggatgagaaggaggtgctgaagagcctgcctgacaagctgaaggccgagatcgccatcaacgtgcacctggacaccctgaagaaggtgcgcatcttccaggactgtgaggccggcctgctggtggagctggtgctgaagctgcggcccaccgtcttcagccctggggactacatctgcaagaagggggacatcggcaaggagatgtacatcatcaatgaaggcaagctggccgtggtggctgatgatggagtgacccagtttgtggtgctgagtgatggcagctactttggagagatcagcatcctgaacatcaagggcagcaagagcggcaacagaagaacagccaacatccgcagcatcggctacagcgacctcttctgcctgagcaaggatgacctgatggaggccctgacagagtacccagaggccaagaaggccctggaggagaagggccggcagatcctgatgaaggacaacctgattgatgaggagctggcccgggccggggctgaccccaaggacctggaggagaaggtggagcagctgggcagcagcctggacaccctgcagaccaggtttgcccggctgctggccgagtacaatgccacccagatgaagatgaagcagaggctgagccagctggagagccaggtgaagggcggcggggacaagcccctggctgatggagaggtgcctggagatgccaccaagacagaggacaagcagcagtag

SEQ ID NO: 148787 - DNA, 2085 bp, synthetic construct; identical to SEQ ID NO: 148786
  misc_feature 1..2085: note = Description of Artificial Sequence: Synthetic coding sequence
  source 1..2085: mol_type = other DNA

SEQ ID NO: 148788 - DNA, 2031 bp, synthetic construct
  misc_feature 1..2031: note = Description of Artificial Sequence: Synthetic coding sequence
  source 1..2031: mol_type = other DNA
atggccaagatcaacacccagtacagccaccccagcaggacccacctgaaggtgaagaccagtgaccgggacctgaacagagcagaaaatggcctgagccgggcccacagcagcagcgaggagaccagctctgtgctgcagcccggcatcgccatggagacccggggcctggccgacagcggccagggcagcttcaccggccagggcatcgcccggctgagccgcctcatcttcctgctgcggcgctgggccgcccggcacgtgcaccaccaggaccagggccctgacagcttcccagaccgcttcagaggagctgagctgaaggaggtgagcagccaggagagcaatgcccaggccaacgtgggcagccaggagcctgctgaccggggccgcaggaagaagaccaagaagaaggatgccatcgtggtggaccccagcagcaacctgtactaccgctggctgacagccatcgccctgcccgtcttctacaactggtacctgctgatctgccgggcctgctttgatgagctgcagagcgagtacctgatgctgtggctggtgctggactacagcgcagatgtgctgtatgtgctggatgtgctggtgcgggccaggacaggcttcctggagcagggcctgatggtgtctgacaccaaccggctgtggcagcactacaagaccaccacccagttcaagctggatgtgctgagcctggtgcccacagacctggcctacctgaaggtgggcaccaactacccagaggtgcgcttcaaccggctgctgaagttcagccggctgtttgagttctttgacagaacagagaccaggaccaactaccccaacatgttcagaattggcaacctggtgctgtacatcctgatcatcatccactggaatgcctgcatctactttgccatcagcaagttcatcggcttcggcacagacagctgggtgtaccccaacatcagcatccctgagcacggccgcctgagcaggaagtacatctacagcctgtactggagcaccctgaccctgaccaccatcggggagaccccacctcctgtgaaggatgaggagtacctgtttgtggtggtggacttcctggtgggcgtgctgatctttgccaccatcgtgggcaatgtgggctccatgatcagcaacatgaatgccagcagagctgagttccaggccaagattgacagcatcaagcagtacatgcagttcaggaaggtgaccaaggacctggagaccagggtcatccgctggtttgactacctgtgggccaacaagaagacagtggatgagaaggaggtgctgaagagcctgcctgacaagctgaaggccgagatcgccatcaacgtgcacctggacaccctgaagaaggtgcgcatcttccaggactgtgaggccggcctgctggtggagctggtgctgaagctgcggcccaccgtcttcagccctggggactacatctgcaagaagggggacatcggcaaggagatgtacatcatcaatgaaggcaagctggccgtggtggctgatgatggagtgacccagtttgtggtgctgagtgatggcagctactttggagagatcagcatcctgaacatcaagggcagcaagagcggcaacagaagaacagccaacatccgcagcatcggctacagcgacctcttctgcctgagcaaggatgacctgatggaggccctgacagagtacccagaggccaagaaggccctggaggagaagggccggcagatcctgatgaaggacaacctgattgatgaggagctggcccgggccggggctgaccccaaggacctggaggagaaggtggagcagctgggcagcagcctggacaccctgcagaccaggtttgcccggctgctggccgagtacaatgccacccagatgaagatgaagcagaggctgagccagctggagagccaggtgaagggcggcggggacaagcccctggctgatggagaggtgcctggagatgccaccaagacagaggacaagcagcagtag

SEQ ID NO: 148789 - DNA, 3756 bp, synthetic construct
  misc_feature 1..3756: note = Description of Artificial Sequence: Synthetic coding sequence
  source 1..3756: mol_type = other DNA
atgctgggctgggtgcagagggtgctgccccagcccccaggcacccccaggaagaccaagatgcaggaggaggaggaggtggagcctgagcctgagatggaggccgaggtggagcctgagcccaaccctgaggaggccgagacagagagcgagagcatgcctcctgaggagagcttcaaggaggaggaggtggccgtggccgaccccagcccccaggagaccaaggaggccgccctgaccagcaccatcagcctgcgggcccagggcgctgagatcagcgagatgaacagccccagccggcgggtgctgacctggctgatgaagggcgtggagaaggtgatcccccagcctgtgcacagcatcacagaagatcctgcccagatcctgggccacggcagcactggagacaccggctgcacagatgagcccaatgaggccctggaggcccaggacacccggcccggcctgcggctgctgctgtggctggagcagaacctggagcgggtgctgccccagccccccaagagcagcgaggtgtggagagatgagcctgctgtggccaccggggccgccagtgaccctgcccctcctggccggccccaggagatgggccccaagctgcaggcccgggagacccccagcctgcccacccccatccccctgcagcccaaggaggagcccaaggaggccccagcccctgagccccagcccggcagccaggcccagaccagcagcctgccccccacccgggaccctgcccggctggtggcctgggtgctgcaccggctggagatggccctgccccagcctgtgctgcacggcaagatcggggagcaggagccagacagccctggcatctgtgatgtgcagaccatcagcatcctgcccggcggccaggtggagccagacctggtgctggaggaggtggagcccccctgggaggatgcccaccaggatgtgtccaccagcccccagggcacagaggtggtgcctgcctatgaggaggagaacaaggctgtggagaagatgccccgggagctgagccgcatcgaggaggagaaggaggatgaggaggaggaggaggaggaggaggaggaggaggaggaggaggaggtgacagaggtgctgctggacagctgtgtggtgtcccaggtgggcgtgggccagagcgaggaggatggcacccggccccagagcaccagtgaccagaagctgtgggaggaggtgggggaggaggccaagaaggaggccgaggagaaggccaaggaggaggccgaggaggtggccgaggaggaggccgagaaggagccccaggactgggccgagaccaaggaggagcctgaggccgaggccgaggccgccagcagcggcgtgcctgccaccaagcagcaccctgaggtgcaggtggaggacacagatgctgacagctgccccctgatggccgaggagaacccccccagcacagtgctgcccccacccagccctgccaagagtgacaccctcatcgtgcccagcagcgccagcggcacccacaggaagaagctgcccagtgaagatgatgaggccgaggagctgaaggccctgagccctgctgagagccctgtggtggcctggagcgaccccaccacccccaaggacacagatggccaggacagagctgccagcacagccagcaccaacagcgccatcatcaatgaccggctgcaggagctggtgaagctgttcaaggagaggacagagaaggtgaaggagaagctgattgatcctgatgtgaccagtgatgaggagagccccaagcccagccctgccaagaaggcccctgagcccgccccagacaccaagccagctgaggccgagcctgtggaggaggagcactactgtgacatgctgtgctgcaagttcaagcaccggccctggaagaagtaccagttcccccagagcattgaccccctgaccaacctgatgtatgtgctgtggctgttctttgtggtgatggcctggaactggaactgctggctgatccctgtgcgctgggccttcccctaccagaccccagacaacatccaccactggctgctgatggactacctgtgtgacctgatctacttcctggacatcaccgtcttccagacccggctgcagtttgtgcggggcggggacatcatcacagacaagaaggacatgaggaacaactacctgaagagccgccgcttcaagatggacctgctgagcctgctgcccctggacttcctgtacctgaaggtgggcgtgaaccccctgctgcggctgccccgctgcctgaagtacatggccttctttgagttcaacagccggctggagagcatcctgagcaaggcctacgtgtacagagtcatccgcaccacagcctacctgctgtacagcctgcacctgaacagctgcctgtactactgggccagcgcctaccagggcctgggcagcacccactgggtgtatgatggagtgggcaacagctacatccgctgctactactttgctgtgaagaccctcatcaccatcggcggcctgcctgaccccaagaccctgtttgagatcgtgttccagctgctgaactacttcaccggggtgtttgccttctctgtgatgattggccagatgagagatgtggtgggcgccgccacagctggccagacctactaccgcagctgcatggacagcacagtgaagtacatgaacttctacaagatccccaagtctgtgcagaacagagtgaagacctggtatgagtacacctggcacagccagggcatgctggatgagagcgagctgatggtgcagctgcctgacaagatgaggctggacctggccattgatgtgaactacaacatcgtgtccaaggtggccctcttccagggctgtgaccggcagatgatctttgacatgctgaagaggctgcggtctgtggtgtacctgcccaatgactatgtgtgcaagaagggggagatcggccgggagatgtacatcatccaggccggccaggtgcaggtgctgggcggcccagatggcaagtctgtgctggtgaccctgaaggccggctctgtgtttggagagatcagcctgctggccgtgggcggcggcaacagaagaacagccaacgtggtggcccacggcttcaccaacctcttcatcctggacaagaaggacctgaatgagatcctggtgcactacccagagagccagaagctgctgaggaagaaggcccggaggatgctgcggagcaacaacaagcccaaggaggagaagtctgtgctgatcctgccccccagggctggcacccccaagctgttcaatgctgccctggccatgaccgggaagatgggcggcaagggggccaagggcggcaagctggcccacctgcgggcccggctgaaggagctggccgccctggaggccgccgccaagcagcaggagctggtggagcaggccaagagcagccaggatgtgaagggggaggagggcagcgctgccccagaccagcacacccaccccaaggaggccgccacagatcctccagcccccaggaccccacctgagcccccaggcagcccccccagcagccccccaccagccagcctgggccggcctgagggggaggaggagggccctgctgagcctgaggagcacagcgtgcgcatctgcatgagccctggccctgagcctggagagcagatcctgtctgtgaagatgcctgaggagcgggaggagaaggccgagtag

SEQ ID NO: 148790 - DNA, 900 bp, synthetic construct
  misc_feature 1..900: note = Description of Artificial Sequence: Synthetic coding sequence
  source 1..900: mol_type = other DNA
atgctgggctgggtgcagagggtgctgccccagcccccaggcacccccaggaagaccaagatgcaggaggaggaggaggtggagcctgagcctgagatggaggccgaggtggagcctgagcccaaccctgaggaggccgagacagagagcgagagcatgcctcctgaggagagcttcaaggaggaggaggtggccgtggccgaccccagcccccaggagaccaaggaggccgccctgaccagcaccatcagcctgcgggcccagggcgctgagatcagcgagatgaacagccccagccggcgggtgctgacctggctgatgaagggcgtggagaaggtgatcccccagcctgtgcacagcatcacagaagatcctgcccagatcctgggccacggcagcactggagacaccggctgcacagatgagcccaatgaggccctggaggcccaggacacccggcccggcctgcggctgctgctgtggctggagcagaacctggagcgggtgctgccccagccccccaagagcagcgaggtgtggagagatgagcctgctgtggccaccggggccgccagtgaccctgcccctcctggccggccccaggagatgggccccaagctgcaggcccgggagacccccagcctgcccacccccatccccctgcagcccaaggaggagcccaaggaggccccagcccctgagccccagcccggcagccaggcccagaccagcagcctgccccccacccgggaccctgcccggctggtggcctgggtgctgcaccggctggagatggccctgccccagcctgtgctgcacggcaagatcggggagcaggagccagacagccctggcatctgtgatgtgcagaccagggtgatgggcgctgggggcctgtag

SEQ ID NO: 148791 - DNA, 2430 bp, synthetic construct
  misc_feature 1..2430: note = Description of Artificial Sequence: Synthetic coding sequence
  source 1..2430: mol_type = other DNA
atgttcaagagcctgaccaaggtgaacaaggtgaagcccatcggggagaacaatgaaaatgagcagagcagcagaagaaatgaggagggcagccaccccagcaaccagagccagcagaccacagcccaggaggagaacaagggggaggagaagagcctgaagaccaagagcacccctgtgaccagcgaggagccccacaccaacatccaggacaagctgagcaagaagaacagcagcggggacctgaccaccaacccagacccccagaatgctgctgagcccactggaacagtgcctgagcagaaggagatggaccccgggaaggagggccccaacagcccccagaacaagcccccagctgcccctgtgatcaatgaatatgcagatgcccagctgcacaacctggtgaagaggatgaggcagaggacagccctgtacaagaagaagctggtggagggggacctgagcagccctgaggccagcccccagacagccaagcccacagctgtgccccctgtgaaggagagtgatgacaagcccacagagcactactaccgcctgctgtggttcaaggtgaagaagatgcccctgacagagtacctgaagaggatcaagctgcccaacagcattgacagctacacagaccggctgtacctgctgtggctgctgctggtgaccctggcctacaactggaactgctgcttcatccccctgcggctggtgttcccctaccagacagctgacaacatccactactggctgattgctgacatcatctgtgacatcatctacctgtatgacatgctgttcatccagccccggctgcagtttgtgcggggcggggacatcatcgtggacagcaatgagctgaggaagcactaccgcaccagcaccaagttccagctggatgtggccagcatcatcccctttgacatctgctacctgttcttcggcttcaaccccatgttccgggccaacaggatgctgaagtacaccagcttctttgagttcaaccaccacctggagagcatcatggacaaggcctacatctacagagtcatccgcaccaccggctacctgctcttcatcctgcacatcaatgcctgtgtgtactactgggccagcaactatgagggcatcggcaccacccgctgggtgtatgatggagagggcaatgagtacctgcgctgctactactgggccgtgaggaccctcatcaccatcggcggcctgcctgagccccagaccctgtttgagatcgtgttccagctgctgaacttcttctctggagtgtttgtgttcagcagcctcatcggccagatgagagatgtgattggagctgccacagccaaccagaactacttccgggcctgcatggatgacaccatcgcctacatgaacaactacagcatccccaagctggtgcagaagagggtgaggacctggtatgagtacacctgggacagccagaggatgctggatgaaagtgacctgctgaagaccctgcccaccaccgtgcagctggccctggccattgatgtgaacttcagcatcatcagcaaggtggacctcttcaagggctgtgacacccagatgatctatgacatgctgctgcggctgaagtctgtgctgtacctgcccggggactttgtgtgcaagaagggggagatcggcaaggagatgtacatcatcaagcacggggaggtgcaggtgctgggcggcccagatggcaccaaggtgctggtgaccctgaaggccggctctgtgtttggagagatcagcctgctggccgccggcggcggcaacagaagaacagccaacgtggtggcccacggctttgccaacctgctgaccctggacaagaagaccctgcaggagatcctggtgcactacccagacagcgagcgcatcctgatgaagaaggcccgggtgctgctgaagcagaaggccaagacagctgaggccaccccacccaggaaggacctggccctgctcttcccccccaaggaggagacccccaagctgttcaagaccctgctgggcggcaccgggaaggccagcctggcccggctgctgaagctgaagcgggagcaggccgcccagaagaaggagaacagcgagggcggggaggaggagggcaaggaaaatgaagacaagcagaaggaaaatgaagacaagcagaaggaaaatgaagataaaggcaaggaaaatgaagacaaggacaagggccgggagcctgaggagaagcccctggacagaccagaatgtacagccagccccatcgctgtggaggaggagccccacagcgtgagaagaacagtgctgccccggggcaccagccggcagagcctcatcatctccatggcccccagcgctgagggcggggaggaggtgctgaccatcgaggtgaaggagaaggccaagcagtag

SEQ ID NO: 148792 - DNA, 4188 bp, synthetic construct
  misc_feature 1..4188: note = Description of Artificial Sequence: Synthetic coding sequence
  source 1..4188: mol_type = other DNA
atgctgctgcccctgcccccccagagcagcaagcctgtgcccaagaagagccagagcagcaagatcgtgcccagccaccacgaccccagcgagaagacaggagagaactgccagaccaagatcagccccagcagcctgcaggagagccccagcagcctgcagggcgccctgaagaagaggtctgcctttgaggacctgaccaatgccagccagtgccagcctgtgcagcccaagaaggaggccaacaaggagtttgtgaaggtggtgtccaagaagatcaacagaaacacccacgccctgggcctggccaagaagaacaagaggaacctgaagtggcacaagctggaggtgacccctgtggtggccagcaccaccgtggtgcccaacatcatggagaagcccctcatcctggacatcagcaccaccagcaagacccccaacacagaggaggccagcctcttcaggaagcccctggtgctgaaggaggagcccaccattgaagatgagaccctcatcaacaagagcctgagcctgaagaagtgcagcaaccacgaggaggtgtccctgctggagaagctgcagcccctgcaggaggagagtgacagtgatgatgccttcgtcatcgagcccatgaccttcaagaagacccacaagacagaggaggccgccatcaccaagaagaccctgagcctgaagaagaagatgtgtgccagccagaggaagcagagctgccaggaggagagcctggccgtgcaggatgtgaacatggaggaggacagcttcttcatggagagcatgtccttcaagaagaagcccaagacagaggagagcatccccacccacaagctgagcagcctgaagaagaagtgcaccatctacggcaagatctgccacttcaggaagccccctgtgctgcagaccaccatctgtggggccatgagcagcatcaagaagcccaccacagagaaggagaccctcttccaggagctgtctgtgctgcaggagaagcacaccacagaacatgagatgagcatcctgaagaagagcctggccctgcagaagaccaacttcaaggaggacagcctggtgaaggagagcctggccttcaagaagaagcccagcacagaggaggccatcatgatgcctgtgatcctgaaggagcagtgcatgacagagggcaagaggagccggctgaagcccctggtgctgcaggagatcaccagcggggagaagagcctcatcatgaagcccctgagcatcaaggagaagcccagcacagagaaggagagcttcagccaggagcccagcgccctgcagaagaagcacaccacccaggaggaggtgtccatcctgaaggagcccagcagcctgctgaagagccccacagaggagagcccctttgatgaggccctggccttcaccaagaagtgcaccatcgaggaggccccacccaccaagaagcccctcatcctgaagaggaagcacgccacccagggcaccatgagccacctgaagaagcccctcatcctgcagaccaccagcggggagaagagcctcatcaaggagcccctgcccttcaaggaggagaaggtgtccctgaagaagaagtgcaccacccaggagatgatgagcatctgcccagagctgctggacttccaggacatgattggagaggacaagaacagcttcttcatggagcccatgtccttcaggaagaaccccaccacagaggagaccgtgctgaccaagaccagcctgagcctgcaggagaagaagatcacccagggcaagatgagccacctgaagaagcccctggtgctgcagaagatcaccagcgaggaggagagcttctacaagaagctgctgcccttcaagatgaagagcaccacagaggagaagttcctgagccaggagcccagcgccctgaaggagaagcacaccaccctgcaggaggtgtccctgagcaaggagagcctggccatccaggagaaggccaccacagaggaggagttcagccaggagctgttcagcctgcacgtgaagcacaccaacaagagcggcagcctcttccaggaggccctggtgctgcaggagaagacagatgctgaggaggacagcctgaagaacctgctggccctgcaggagaagagcaccatggaggaggagagcctcatcaacaagctgctggccctgaaggaggagctgtctgctgaggccgccaccaacatccagacccagctgagcctgaagaagaagagcaccagccacggcaaggtgttcttcctgaagaagcagctggccctgaatgagaccatcaatgaggaggagttcctgaacaagcagcccctggccctggagggctaccccagcattgctgagggggagaccctcttcaagaagctgctggccatgcaggaggagcccagcattgagaaggaggccgtgctgaaggagcccaccatcgacacagaggcccacttcaaggagcccctggccctgcaggaggagcccagcacagagaaggaggccgtgctgaaggagcccagcgtggacacagaggcccacttcaaggagaccctggccctgcaggagaagcccagcattgagcaggaggccctcttcaagaggcacagcgccctgtgggagaagcccagcacagagaaggagaccatcttcaaggagagcctggacctgcaggagaagcccagcatcaagaaggagaccctgctgaagaagcccctggccctgaagatgagcaccatcaatgaggccgtgctgtttgaggacatgattgccctgaatgagaagcccaccaccgggaaggagctgtccttcaaggagcccctggccctgcaggagagccccacctacaaggaggacaccttcctgaagaccctgctggtgccccaggtgggcaccagccccaacgtgagcagcacagcccctgagagcatcaccagcaagagcagcatcgccaccatgacctctgtgggcaagagcggcaccatcaatgaggccttcctgtttgaggacatgatcaccctgaatgagaagcccaccaccgggaaggagctgtccttcaaggagcccctggccctgcaggagagccccacctgcaaggaggacaccttcctggagaccttcctgatcccccagatcggcaccagcccctacgtgttcagcaccaccccagagagcatcacagagaagagcagcatcgccaccatgacctctgtgggcaagagcaggaccaccacagagagcagcgcctgtgagagcgccagtgacaagcctgtgagcccccaggccaagggcacccccaaggagatcaccccccgggaggacattgatgaggacagcagtgaccccagcttcaaccccatgtatgccaaggagatcttctcctacatgaaggagcgggaggagcagttcatcctgacagactacatgaaccggcagatcgagatcaccagtgacatgagggccatcctggtggactggctggtggaggtgcaggtgtcctttgagatgacccatgagaccctgtacctggccgtgaagctggtggacctgtacctgatgaaggctgtgtgcaagaaggacaagctgcagctgctgggcgccacagccttcatgattgctgccaagtttgaggagcacaacagcccccgggtggatgactttgtgtacatctgtgatgacaactaccagaggtctgaggtgctgtccatggagatcaacatcctgaatgtgctgaagtgtgacatcaacatccccatcgcctaccacttcctgcggcgctatgcccgctgcatccacaccaacatgaagaccctgaccctgagccgctacatctgtgagatgaccctgcaggagtaccactacgtgcaggagaaggccagcaagctggccgccgccagcctgctgctggccctgtacatgaagaagctgggctactgggtgcccttcctggagcactacagcggctacagcatcagcgagctgcaccccctggtgcggcagctgaacaagctgctgaccttcagcagctatgacagcctgaaggctgtgtactacaagtacagccaccctgtgttctttgaggtggccaagatcccagccctggacatgctgaagctggaggagatcctgaactgtgactgtgaggcccagggcctggtgctgtag

SEQ ID NO: 148793 - DNA, 876 bp, synthetic construct
  misc_feature 1..876: note = Description of Artificial Sequence: Synthetic coding sequence
  source 1..876: mol_type = other DNA
atgctgctgcccctgcccccccagagcagcaagcctgtgcccaagaagagccagagcagcaagatcgtgcccagccaccacgaccccagcgagaagacaggagagaactgccagaccaagatcagccccagcagcctgcaggagagccccagcagcctgcagggcgccctgaagaagaggtctgcctttgaggacctgaccaacgtgtcctttgagatgacccatgagaccctgtacctggccgtgaagctggtggacctgtacctgatgaaggctgtgtgcaagaaggacaagctgcagctgctgggcgccacagccttcatgattgctgccaagtttgaggagcacaacagcccccgggtggatgactttgtgtacatctgtgatgacaactaccagaggtctgaggtgctgtccatggagatcaacatcctgaatgtgctgaagtgtgacatcaacatccccatcgcctaccacttcctgcggcgctatgcccgctgcatccacaccaacatgaagaccctgaccctgagccgctacatctgtgagatgaccctgcaggagtaccactacgtgcaggagaaggccagcaagctggccgccgccagcctgctgctggccctgtacatgaagaagctgggctactgggtgcccttcctggagcactacagcggctacagcatcagcgagctgcaccccctggtgcggcagctgaacaagctgctgaccttcagcagctatgacagcctgaaggctgtgtactacaagtacagccaccctgtgttctttgaggtggccaagatcccagccctggacatgctgaagctggaggagatcctgaactgtgactgtgaggcccagggcctggtgctgtag

SEQ ID NO: 148794 - DNA, 876 bp, synthetic construct; identical to SEQ ID NO: 148793
  misc_feature 1..876: note = Description of Artificial Sequence: Synthetic coding sequence
  source 1..876: mol_type = other DNA

SEQ ID NO: 148795 - DNA, 4188 bp, synthetic construct; identical to SEQ ID NO: 148792
  misc_feature 1..4188: note = Description of Artificial Sequence: Synthetic coding sequence
  source 1..4188: mol_type = other DNA

SEQ ID NO: 148796 - DNA, 336 bp, synthetic construct
  misc_feature 1..336: note = Description of Artificial Sequence: Synthetic coding sequence
  source 1..336: mol_type = other DNA
atgctgctgcccctgcccccccagagcagcaagcctgtgcccaagaagagccagagcagcaagatcgtgcccagccaccacgaccccagcgagaagacaggagagaactgccagaccaagatcagccccagcagcctgcaggagagccccagcagcctgcagggcgccctgaagaagaggtctgcctttgaggacctgaccaatgccagccagtgccagcctgtgcagcccaagaaggaggccaacaaggagtttgtgaaggtggtgtccaagaagatcaacagaaacacccacgccctgggcctggccaagaagaacaagaggaacctgaagtag

SEQ ID NO: 148797 - DNA, 1083 bp, synthetic construct
  misc_feature 1..1083: note = Description of Artificial Sequence: Synthetic coding sequence
  source 1..1083: mol_type = other DNA
atggccagcgccacagccccagctgctgctgtgcccaccctggccagccccctggagcagctgcggcacctggccgaggagctgcggctgctgctgccccgggtgcgggtgggggaggcccaggagaccacagaggagttcaaccgggagatgttctggaggcggctgaatgaagctgctgtgacagtgtcccgggaggccaccaccctgaccatcgtgttcagccagctgcccctgcccagcccccaggagacccagaagttctgtgagcaggtgcacgccgccatcaaggccttcatcgctgtgtactacctgctgcccaaggaccagggcatcaccctgaggaagctggtgcggggggccaccctggacatcgtggatggcatggcccagctgatggaggtgctgtctgtgacccccacccagagcccagaaaataatgacctgatctcctacaacagcgtgtgggtggcctgccagcagatgccccagatcccccgggacaacaaggccgccgccctgctgatgctgaccaagaatgtggactttgtgaaggatgcccacgaggagatggagcaggccgtggaggagtgtgacccctacagcggcctgctgaatgacacagaggagaacaacagcgacaaccacaaccatgaagatgatgtgctgggcttccccagcaaccaggacctgtactggagcgaagatgaccaggagctgatcatcccctgcctggccctggtgcgggccagcaaggcctgcctgaagaagatccgcatgctggtggccgagaatggcaagaaggaccaggtggcccagctggatgacatcgtggacatcagtgatgagatcagccccagcgtggatgacctggccctgagcatctacccacccatgtgccacctgactgtgcgcatcaacagcgccaagctggtgtctgtgctgaagaaggccctggagatcaccaaggccagccacgtgaccccccagcctgaggacagctggatccccctgctgatcaatgccatcgaccactgcatgaaccgcatcaaggagctgacccagagcgagctggagctgtag

SEQ ID NO: 148798 - DNA, 600 bp, synthetic construct
  misc_feature 1..600: note = Description of Artificial Sequence: Synthetic coding sequence
  source 1..600: mol_type = other DNA
atgccccagatcccccgggacaacaaggctgctgccctgctgatgctgaccaagaatgtggactttgtgaaggatgcccacgaggagatggagcaggccgtggaggagtgtgacccctacagcggcctgctgaatgacacagaggagaacaacagcgacaaccacaaccatgaagatgatgtgctgggcttccccagcaaccaggacctgtactggagcgaagatgaccaggagctgatcatcccctgcctggccctggtgcgggccagcaaggcctgcctgaagaagatccgcatgctggtggctgaaaatggcaagaaggaccaggtggcccagctggatgacatcgtggacatcagtgatgagatcagccccagcgtggatgacctggccctgagcatctacccacccatgtgccacctgactgtgcgcatcaacagcgccaagctggtgtctgtgctgaagaaggccctggagatcaccaaggccagccacgtgaccccccagccagaagattcctggatccccctgctgatcaatgccatcgaccactgcatgaaccgcatcaaggagctgacccagagcgagctggagctgtag

SEQ ID NO: 148799 - DNA, 699 bp, synthetic construct
  misc_feature 1..699: note = Description of Artificial Sequence: Synthetic coding sequence
  source 1..699: mol_type = other DNA
atggcccagctgatggaggtgctgtctgtgacccccacccagagcccagaaaataatgacctgatctcctacaacagcgtgtgggtggcctgccagcagatgccccagatcccccgggacaacaaggccgccgccctgctgatgctgaccaagaatgtggactttgtgaaggatgcccacgaggagatggagcaggccgtggaggagtgtgacccctacagcggcctgctgaatgacacagaggagaacaacagcgacaaccacaaccatgaagatgatgtgctgggcttccccagcaaccaggacctgtactggagcgaagatgaccaggagctgatcatcccctgcctggccctggtgcgggccagcaaggcctgcctgaagaagatccgcatgctggtggccgagaatggcaagaaggaccaggtggcccagctggatgacatcgtggacatcagtgatgagatcagccccagcgtggatgacctggccctgagcatctacccacccatgtgccacctgactgtgcgcatcaacagcgccaagctggtgtctgtgctgaagaaggccctggagatcaccaaggccagccacgtgaccccccagcctgaggacagctggatccccctgctgatcaatgccatcgaccactgcatgaaccgcatcaaggagctgacccagagcgagctggagctgtag

SEQ ID NO: 148800 - DNA, 3936 bp, synthetic construct
  misc_feature 1..3936: note = Description of Artificial Sequence: Synthetic coding sequence
  source 1..3936: mol_type = other DNA
atgagcctgctgcagagcgccctggacttcctggccggccctggcagcctgggcggggccagcggccgggaccagagcgactttgtgggccagacagtggagctgggggagctgcggctgcgggtgagaagagtgctggccgagggcggctttgcctttgtgtatgaggcccaggatgtgggcagcggccgggagtatgccctgaagaggctgctgagcaatgaggaggagaagaacagagccatcatccaggaggtgtgcttcatgaagaagctgagcggccaccccaacatcgtgcagttctgcagcgctgccagcatcggcaaggaggagagtgacaccggccaggccgagttcctgctgctgacagagctgtgcaagggccagctggtggagttcctgaagaagatggagagccggggccccctgagctgtgacacagtgctgaagatcttctaccagacctgcagagctgtgcagcacatgcaccggcagaagccacccatcatccaccgggacctgaaggtggagaacctgctgctgagcaaccagggcaccatcaagctgtgtgactttggcagcgccaccaccatcagccactacccagactacagctggagcgcccagaggcgggccctggtggaggaggagatcaccaggaacaccacccccatgtaccgcaccccagagatcatcgacctgtacagcaacttccccatcggggagaagcaggacatctgggccctgggctgcatcctgtacctgctgtgcttccggcagcacccctttgaagatggagccaagctgagaattgtgaatggcaagtacagcatcccccctcatgacacccagtacaccgtcttccacagcctcatccgggccatgctgcaggtgaaccctgaggagcggctgagcattgctgaggtggtgcaccagctgcaggagattgctgctgccagaaatgtgaaccccaagagccccatcacagagctgctggagcagaatggaggctacggcagcgccaccctgagccggggccccccacctcctgtgggccctgctggcagcggctacagcggcggcctggccctggccgagtatgaccagccctatggaggcttcctggacatcctgcggggcggcacagagcggctcttcaccaacctgaaggacaccagcagcaaggtgatccagagcgtggccaactatgccaagggggacctggacatctcctacatcaccagcagaattgctgtgatgtccttccctgctgagggcgtggagagcgccctgaagaacaacattgaagatgtgcggctcttcctggacagcaagcaccctggccactatgctgtgtacaacctgagccccaggacctaccggcccagccgcttccacaacagagtgtctgaatgtggctgggccgcccggcgggccccccacctgcacaccctgtacaacatctgcaggaacatgcacgcctggctgcggcaggaccacaagaatgtgtgtgtggtgcactgcatggatggccgggccgccagcgctgtggccgtgtgcagcttcctgtgcttctgccgcctcttcagcacagctgaggccgctgtgtacatgttctccatgaagcgctgccccccaggcatctggcccagccacaagcgctacatcgagtacatgtgtgacatggtggccgaggagcccatcaccccccacagcaagcccatcctggtgcgggctgtggtgatgacccctgtgcccctcttcagcaagcagaggagcggctgccggcccttctgtgaggtgtatgtgggagatgagcgggtggccagcaccagccaggagtatgacaagatgagggacttcaagattgaagatggcaaggccgtcatccccctgggcgtgacagtgcagggagatgtgctgattgtcatctaccacgcccggagcaccctgggcggccgcctgcaggccaagatggcctccatgaagatgttccagatccagttccacactggatttgtgcccagaaatgccaccaccgtgaagtttgccaagtatgacctggatgcctgtgacatccaggagaagtacccagacctcttccaggtgaacctggaggtggaggtggagccccgggaccggcccagccgggaggccccaccctgggagaacagctccatgaggggcctgaaccccaagatcctcttcagcagccgggaggagcagcaggacatcctgagcaagtttgggaagccagagctgccccggcagcccggcagcacagcccagtatgatgctggggccggcagccctgaggccgagcccacagacagcgacagcccccccagcagcagcgcagatgccagccgcttcctgcacaccctggactggcaggaggagaaggaggccgagactggagcagaaaatgccagcagcaaggagagcgagagcgccctgatggaggacagagatgagagcgaggtgtctgatgagggcggcagccccatcagcagcgagggccaggagcccagggctgaccctgagcccccaggcctggccgccggcctggtgcagcaggacctggtgtttgaggtggagaccccagctgtgctgcctgagcctgtgccccaggaggatggagtggacctgctgggcctgcacagcgaggtgggcgccggccctgctgtgcccccccaggcctgcaaggcccccagcagcaacacagacctgctgagctgcctgctgggccccccagaggccgccagccagggccccccagaggacctgctgtctgaggaccccctgctgctggccagccctgccccacccctgtctgtgcagagcaccccccggggcggccccccagctgctgctgaccccttcggccccctgctgcccagcagcggcaacaacagccagccctgcagcaacccagacctgtttggagagttcctgaacagcgacagcgtgacagtgcccccatccttccccagcgcccacagcgcccccccacccagctgcagcgctgacttcctgcacctgggggacctgcccggggagcccagcaagatgacagccagcagcagcaacccagacctgctgggcggctgggccgcctggacagaaacagctgccagcgctgtggcccccaccccagccacagagggccccctcttcagccctgggggccagcctgccccctgtggcagccaggcctcctggaccaagagccagaacccagacccctttgctgacctgggggacctgagcagcggcctgcagggcagccctgctggcttccccccaggcggcttcatccccaagacagccaccacccccaagggcagcagctcctggcagaccagccggcccccagcccagggcgcctcctggccaccccaggccaagcccccacccaaggcctgcacccagccccggcccaactatgccagcaacttcagcgtcatcggggcccgggaggagcggggcgtgcgggcccccagctttgcccagaagcccaaggtgtctgaaaatgactttgaggacctgctgagcaaccagggcttcagcagcagaagtgacaagaagggccccaagaccatcgccgagatgaggaagcaggacctggccaaggacacagaccccctgaagctgaagctgctggactggattgagggcaaggagaggaacatccgggccctgctgagcaccctgcacacagtgctgtgggatggagagagccgctggacccctgtgggcatggctgacctggtggcccctgagcaggtgaagaagcactaccgccgggctgtgctggccgtgcacccagacaaggccgccggccagccctatgagcagcacgccaagatgatcttcatggagctgaatgatgcctggagcgagtttgagaaccagggcagccggcccctcttctag

SEQ ID NO: 148801 - DNA, 1764 bp, synthetic construct
  misc_feature 1..1764: note = Description of Artificial Sequence: Synthetic coding sequence
  source 1..1764: mol_type = other DNA
atgagcctgctgcagagcgccctggacttcctggccggccctggcagcctgggcggggccagcggccgggaccagagcgactttgtgggccagacagtggagctgggggagctgcggctgcgggtgagaagagtgctggccgagggcggctttgcctttgtgtatgaggcccaggatgtgggcagcggccgggagtatgccctgaagaggctgctgagcaatgaggaggagaagaacagagccatcatccaggaggtgtgcttcatgaagaagctgagcggccaccccaacatcgtgcagttctgcagcgctgccagcatcggcaaggaggagagtgacaccggccaggccgagttcctgctgctgacagagcccccaggcctggccgccggcctggtgcagcaggacctggtgtttgaggtggagaccccagctgtgctgcctgagcctgtgccccaggaggatggagtggacctgctgggcctgcacagcgaggtgggcgccggccctgctgtgcccccccaggcctgcaaggcccccagcagcaacacagacctgctgagctgcctgctgggccccccagaggccgccagccagggccccccagaggacctgctgtctgaggaccccctgctgctggccagccctgccccacccctgtctgtgcagagcaccccccggggcggccccccagctgctgctgaccccttcggccccctgctgcccagcagcggcaacaacagccagccctgcagcaacccagacctgtttggagagttcctgaacagcgacagcgtgacagtgcccccatccttccccagcgcccacagcgcccccccacccagctgcagcgctgacttcctgcacctgggggacctgcccggggagcccagcaagatgacagccagcagcagcaacccagacctgctgggcggctgggccgcctggacagaaacagctgccagcgctgtggcccccaccccagccacagagggccccctcttcagccctgggggccagcctgccccctgtggcagccaggcctcctggaccaagagccagaacccagacccctttgctgacctgggggacctgagcagcggcctgcagggcagccctgctggcttccccccaggcggcttcatccccaagacagccaccacccccaagggcagcagctcctggcagaccagccggcccccagcccagggcgcctcctggccaccccaggccaagcccccacccaaggcctgcacccagccccggcccaactatgccagcaacttcagcgtcatcggggcccgggaggagcggggcgtgcgggcccccagctttgcccagaagcccaaggtgtctgaaaatgactttgaggacctgctgagcaaccagggcttcagcagcagaagtgacaagaagggccccaagaccatcgccgagatgaggaagcaggacctggccaaggacacagaccccctgaagctgaagctgctggactggattgagggcaaggagaggaacatccgggccctgctgagcaccctgcacacagtgctgtgggatggagagagccgctggacccctgtgggcatggctgacctggtggcccctgagcaggtgaagaagcactaccgccgggctgtgctggccgtgcacccagacaaggccgccggccagccctatgagcagcacgccaagatgatcttcatggagctgaatgatgcctggagcgagtttgagaaccagggcagccggcccctcttctag

SEQ ID NO: 148802 - DNA, 2238 bp, synthetic construct
  misc_feature 1..2238: note = Description of Artificial Sequence: Synthetic coding sequence
  source 1..2238: mol_type = other DNA
atgcccttccctgtgaccacccagggcagccagcagacccagcccccccagaagcactacggcatcaccagccccatcagcctggccgcccccaaggagacagactgtgtgctgacccagaagctgattgagaccctgaagccctttggagtgtttgaggaggaggaggagctgcagaggcgcatcctgatcctgggcaagctgaacaacctggtgaaggagtggatccgggagatcagcgagagcaagaacctgccccagagcgtgattgaaaatgtgggcggcaagatcttcaccttcggcagctaccgcctgggcgtgcacaccaagggagctgacattgatgccctgtgtgtggcccccaggcatgtggacagaagtgacttcttcaccagcttctatgacaagctgaagctgcaggaggaggtgaaggacctgcgggctgtggaggaggcctttgtgcctgtgatcaagctgtgctttgatggcatcgagattgacatcctgtttgcccggctggccctgcagaccatccctgaggacctggacctgagagatgacagcctgctgaagaacctggacatccgctgcatccgcagcctgaatggctgccgggtgacagatgagatcctgcacctggtgcccaacatcgacaacttccggctgaccctgcgggccatcaagctgtgggccaagaggcacaacatctacagcaacatcctgggcttcctgggcggcgtgtcctgggccatgctggtggcccggacctgccagctgtacccaaatgccatcgccagcaccctggtgcacaagttcttcctggtgttcagcaagtgggagtggcccaaccctgtgctgctgaagcagcctgaggagtgcaacctgaacctgcctgtgtgggacccccgggtgaaccccagcgaccgctaccacctgatgcccatcatcaccccagcctacccccagcagaacagcacctacaacgtgtctgtgtccaccaggatggtgatggtggaggagttcaagcagggcctggccatcacagatgagatcctgctgagcaaggccgagtggagcaagctgtttgaggcccccaacttcttccagaagtacaagcactacatcgtgctgctggccagcgcccccacagagaagcagaggctggagtgggtgggcctggtggagagcaagatccgcatcctggtgggcagcctggagaagaatgagttcatcaccctggcccacgtgaacccccagagcttccctgcccccaaggagaacccagacaaggaggagttccgcaccatgtgggtgattggcctggtgttcaagaagacagaaaattctgagaacctgtctgtggacctgacctatgacatccagagcttcacagacacagtgtaccggcaggccatcaacagcaagatgtttgaggtggacatgaagattgctgccatgcacgtgaagaggaagcagctgcaccagctgctgcccaaccacgtgctgcagaagaagaagaagcacagcacagagggcgtgaagctgacagccctgaatgacagcagcctggacctgtccatggacagcgacaacagcatgtctgtgcccagccccaccagcgccaccaagaccagccccctgaacagcagcggcagcagccagggcaggaacagccctgccccagctgtgacagctgcctctgtgaccaacatccaggccacagaggtgtctgtgccccaggtgaacagcagcgagagcagcggcggcaccagcagcgagagcatcccccagacagccacccagcctgccatcagccccccacccaagcccaccgtgtcccgggtggtgagcagcacccggctggtgaaccccccacccaggagcagtggaaatgctgccaccagcggaaatgctgccaccaagatccccacccccatcgtgggcgtgaagaggaccagcagcccccacaaggaggagagccccaagaagaccaagacagaggaggatgagaccagtgaagatgccaactgcctggccctgagcggccatgacaagacagaggccaaggagcagctggacacagagaccagcaccacccagagcgagaccatccagacagctgccagcctgctggccagccagaagaccagcagcacagacctgagtgacatcccagccctgcctgccaaccccatccctgtgatcaagaacagcatcaagctgcggctgaacagatag

SEQ ID NO: 148803 - DNA, 1080 bp, synthetic construct
  misc_feature 1..1080: note = Description of Artificial Sequence: Synthetic coding sequence
  source 1..1080: mol_type = other DNA
atgaaggagaacaaggagaacagcagccccagcgtgaccagcgccaacctggaccacaccaagccctgctggtactgggacaagaaggacctggcccacacccccagccagctggagggcctggaccctgccacagaggcccgctaccgccgggagggcgcccgcttcatctttgatgtgggcacccggctgggcctgcactatgacaccctggccaccggcatcatctacttccaccgcttctacatgttccacagcttcaagcagttccccaggtatgtgactggagcctgctgcctcttcctggccggcaaggtggaggagacccccaagaagtgcaaggacatcatcaagacagcccggagcctgctgaatgatgtgcagtttggccagtttggagatgaccccaaggaggaggtgatggtgctggagcgcatcctgctgcagaccatcaagtttgacctgcaggtggagcacccctaccagttcctgctgaagtatgccaagcagctgaagggggacaagaacaagatccagaagctggtgcagatggcctggacctttgtgaatgacaggaccagcctgtgcaccaccctgagcctgcagtgggagcctgagatcatcgctgtggccgtgatgtacctggccggccgcctgtgcaagtttgagatccaggagtggaccagcaagcccatgtaccgccgctggtgggagcagtttgtgcaggatgtgcctgtggatgtgctggaggacatctgccaccagatcctggacctgtacagccagggcaagcagcagatgccccaccacaccccccaccagctgcagcagccccccagcctgcagcccaccccccaggtgccccaggtgcagcagagccagcccagccagagcagcgagcccagccagccccagcagaaggacccccagcagcctgcccagcagcagcagcctgcccagcagcccaagaagcccagcccccagcccagcagcccccggcaggtgaagagagctgtggtggtgagccccaaggaggagaacaaggccgccggcaaggccagcctgaagcacacctggtag

SEQ ID NO: 148804 - DNA, 1743 bp, synthetic construct
  misc_feature 1..1743: note = Description of Artificial Sequence: Synthetic coding sequence
  source 1..1743: mol_type = other DNA
atgaaggagaacaaggagaacagcagccccagcgtgaccagcgccaacctggaccacaccaagccctgctggtactgggacaagaaggacctggcccacacccccagccagctggagggcctggaccctgccacagaggcccgctaccgccgggagggcgcccgcttcatctttgatgtgggcacccggctgggcctgcactatgacaccctggccaccggcatcatctacttccaccgcttctacatgttccacagcttcaagcagttccccaggtatgtgactggagcctgctgcctcttcctggccggcaaggtggaggagacccccaagaagtgcaaggacatcatcaagacagcccggagcctgctgaatgatgtgcagtttggccagtttggagatgaccccaaggaggaggtgatggtgctggagcgcatcctgctgcagaccatcaagtttgacctgcaggtggagcacccctaccagttcctgctgaagtatgccaagcagctgaagggggacaagaacaagatccagaagctggtgcagatggcctggacctttgtgaatgacagcctgtgcaccaccctgagcctgcagtgggagcctgagatcatcgctgtggccgtgatgtacctggccggccgcctgtgcaagtttgagatccaggagtggaccagcaagcccatgtaccgccgctggtgggagcagtttgtgcaggatgtgcctgtggatgtgctggaggacatctgccaccagatcctggacctgtacagccagggcaagcagcagatgccccaccacaccccccaccagctgcagcagccccccagcctgcagcccaccccccaggtgccccaggtgcagcagagccagcccagccagagcagcgagcccagccagccccagcagaaggacccccagcagcctgcccagcagcagcagcctgcccagcagcccaagaagcccagcccccagcccagcagcccccggcaggtgaagagagctgtggtggtgagccccaaggaggagaacaaggctgctgagcccccaccacccaagatccccaagattgagaccacccacccccccctgcccccagcccaccccccaccagacaggaagccacccctggccgccgccctgggggaggccgagcccccaggccctgtggatgccacagacctgcccaaggtgcagatccccccaccagcccacccagcccctgtgcaccagcccccacccctgccccaccggcccccacctcctccacccagcagctacatgacaggcatgagcaccaccagcagctacatgtctggagagggctaccagagcctgcagagcatgatgaagacagagggccccagctatggagccctgcccccagcctacggccccccagcccacctgccctaccacccccacgtgtacccacccaaccccccacctcctcctgtgcccccacctccagccagcttccccccaccagccatccccccacccaccccaggctacccacctcctccacccacctacaaccccaacttccccccacctccaccccggctgccccccacccatgctgtgcccccccaccccccacctggcctgggcctgcccccagccagctacccacctcctgctgtgcccccaggcggccagccccctgtgcccccacccatccccccacctggcatgcctcctgtgggcggcctgggccgggccgcctggatgaggtag

SEQ ID NO: 148805 - DNA, 1803 bp, synthetic construct
  misc_feature 1..1803: note = Description of Artificial Sequence: Synthetic coding sequence
  source 1..1803: mol_type = other DNA
atgaaggagaacaaggagaacagcagccccagcgtgaccagcgccaacctggaccacaccaagccctgctggtactgggacaagaaggacctggcccacacccccagccagctggagggcctggaccctgccacagaggcccgctaccgccgggagggcgcccgcttcatctttgatgtgggcacccggctgggcctgcactatgacaccctggccaccggcatcatctacttccaccgcttctacatgttccacagcttcaagcagttccccaggtatgtgactggagcctgctgcctcttcctggccggcaaggtggaggagacccccaagaagtgcaaggacatcatcaagacagcccggagcctgctgaatgatgtgcagtttggccagtttggagatgaccccaaggaggaggtgatggtgctggagcgcatcctgctgcagaccatcaagtttgacctgcaggtggagcacccctaccagttcctgctgaagtatgccaagcagctgaagggggacaagaacaagatccagaagctggtgcagatggcctggacctttgtgaatgacagcctgtgcaccaccctgagcctgcagtgggagcctgagatcatcgctgtggccgtgatgtacctggccggccgcctgtgcaagtttgagatccaggagtggaccagcaagcccatgtaccgccgctggtgggagcagtttgtgcaggatgtgcctgtggatgtgctggaggacatctgccaccagatcctggacctgtacagccagggcaagcagcagatgccccaccacaccccccaccagctgcagcagccccccagcctgcagcccaccccccaggtgccccaggtgcagcagagccagcccagccagagcagcgagcccagccagccccagcagaaggacccccagcagcctgcccagcagcagcagcctgcccagcagcccaagaagcccagcccccagcccagcagcccccggcaggtgaagagagctgtggtgtctggcctgaagcaggccctgggccgggccggcttccctgggggcggcaacaccaccgtggtgagccccaaggaggagaacaaggctgctgagcccccaccacccaagatccccaagattgagaccacccacccccccctgcccccagcccaccccccaccagacaggaagccacccctggccgccgccctgggggaggccgagcccccaggccctgtggatgccacagacctgcccaaggtgcagatccccccaccagcccacccagcccctgtgcaccagcccccacccctgccccaccggcccccacctcctccacccagcagctacatgacaggcatgagcaccaccagcagctacatgtctggagagggctaccagagcctgcagagcatgatgaagacagagggccccagctatggagccctgcccccagcctacggccccccagcccacctgccctaccacccccacgtgtacccacccaaccccccacctcctcctgtgcccccacctccagccagcttccccccaccagccatccccccacccaccccaggctacccacctcctccacccacctacaaccccaacttccccccacctccaccccggctgccccccacccatgctgtgcccccccaccccccacctggcctgggcctgcccccagccagctacccacctcctgctgtgcccccaggcggccagccccctgtgcccccacccatccccccacctggcatgcctcctgtgggcggcctgggccgggccgcctggatgaggtag

SEQ ID NO: 148806 - DNA, 333 bp, synthetic construct
  misc_feature 1..333: note = Description of Artificial Sequence: Synthetic coding sequence
  source 1..333: mol_type = other DNA
atgaaggagaacaaggagaacagcagccccagcgtgaccagcgccaacctggaccacaccaagccctgctggtactgggacaagaaggacctggcccacacccccagccagctggagggcctggaccctgccacagaggcccgctaccgccgggagggcgcccgcttcatctttgatgtgggcacccggctgggcctgcactatgacaccctggccaccggcatcatctacttccaccgcttctacatgttccacagcttcaagcagttccccaggtatgtgactggagcctgctgcctcttcctggccggcaaggtggaggagaccccctag

SEQ ID NO: 148807 - DNA, 684 bp, synthetic construct
  misc_feature 1..684: note = Description of Artificial Sequence: Synthetic coding sequence
  source 1..684: mol_type = other DNA
atgaaggagaacaaggagaacagcagccccagcgtgaccagcgccaacctggaccacaccaagccctgctggtactgggacaagaaggacctggcccacacccccagccagctggagggcctggaccctgccacagaggcccgctaccgccgggagggcgcccgcttcatctttgatgtgggcacccggctgggcctgcactatgacaccctggccaccggcatcatctacttccaccgcttctacatgttccacagcttcaagcagttccccaggtatgtgactggagcctgctgcctcttcctggccggcaaggtggaggagacccccaagaagtgcaaggacatcatcaagacagcccggagcctgctgaatgatgtgcagtttggccagtttggagatgaccccaaggaggaggtgatggtgctggagcgcatcctgctgcagaccatcaagtttgacctgcaggtggagcacccctaccagttcctgctgaagtatgccaagcagctgaagggggacaagaacaagatccagaagctggtgcagatggcctggacctttgtgaatgacagcctgtgcaccaccctgagcctgcagtgggagcctgagatcatcgctgtggccgtgatgtacctggccggccgcctgtgcaagtttgagatccaggagtggaccagctag

SEQ ID NO: 148808 - DNA, 519 bp, synthetic construct
  misc_feature 1..519: note = Description of Artificial Sequence: Synthetic coding sequence
  source 1..519: mol_type = other DNA
atggccagcggcccccacagcacagccacagctgctgctgctgccagcagcgctgcccccagcgctgggggcagcagcagcggcaccaccaccaccaccaccaccaccactggaggcatcctgattggagaccggctgtacagcgaggtgtccctgaccatcgaccacagcctcatccctgaggagcggctgagccccacccccagcatgcaggacggcctggacctgcccagcgagacagacctgcgcatcctgggctgtgagctgatccaggccgccggcatcctgctgcggctgccccaggtggccatggccaccggccaggtgctcttccaccgcttcttctacagcaagagctttgtgaagcacagctttgaaattgtggccatggcctgcatcaacctggccagcaagattgaggaggccccccggcgcatcagagatgtgatcaacgtgttccaccacctgcggcagctgcggggcaagagtgaccagctgcacctgcccaagccaggatag

SEQ ID NO: 148809 - DNA, 1581 bp, synthetic construct
  misc_feature 1..1581: note = Description of Artificial Sequence: Synthetic coding sequence
  source 1..1581: mol_type = other DNA
atggccagcggcccccacagcacagccacagctgctgctgctgccagcagcgctgcccccagcgctgggggcagcagcagcggcaccaccaccaccaccaccaccaccactggaggcatcctgattggagaccggctgtacagcgaggtgtccctgaccatcgaccacagcctcatccctgaggagcggctgagccccacccccagcatgcaggacggcctggacctgcccagcgagacagacctgcgcatcctgggctgtgagctgatccaggccgccggcatcctgctgcggctgccccaggtggccatggccaccggccaggtgctcttccaccgcttcttctacagcaagagctttgtgaagcacagctttgaaattgtggccatggcctgcatcaacctggccagcaagattgaggaggccccccggcgcatcagagatgtgatcaacgtgttccaccacctgcggcagctgcggggcaagaggacccccagccccctcatcctggaccagaactacatcaacaccaagaaccaggtgatcaaggccgagcggcgggtgctgaaggagctgggcttctgtgtgcacgtgaagcacccccacaagatcatcgtgatgtacctgcaggtgctggagtgtgagaggaaccagaccctggtgcagacagcctggaactacatgaatgacagcctgcggaccaacgtgtttgtgcgcttccagcctgagaccatcgcctgtgcctgcatctacctggccgcccgggccctgcagatccccctgcccacccggccccactggttcctgctgtttggcaccacagaggaggagatccaggagatctgcatcgagaccctgcggctgtacaccaggaagaagcccaactatgagctgctggagaaggaggtggagaagaggaaggtggccctgcaggaggccaagctgaaggccaagggcctgaacccagatggcaccccagccctgagcaccctgggcggcttcagccctgccagcaagcccagcagcccccgggaggtgaaggccgaggagaagagccccatcagcatcaacgtgaagacagtgaagaaggagcctgaggaccggcagcaggccagcaagagcccctacaatggagtgaggaaggacagcaagaggagcaggaacagccgcagcgccagccgcagccgcagcaggaccaggagccgcagccgcagccacaccccaagaagacactacaacaacagaagaagccgcagcggcacctacagcagccgcagccgcagccgcagccgcagccacagcgagagcccccggcggcaccacaaccacggcagcccccacctgaaggccaagcacaccagagatgacctgaagagcagcaacagacatggccacaagaggaagaagagccgcagccgcagccagagcaagagccgggaccacagtgatgctgccaagaagcacagacatgagcggggccaccaccgggaccggcgggagaggagccgcagctttgagaggagccacaagagcaagcaccacggcggcagccgcagcggccacggccgccacagaagatag

SEQ ID NO: 148810 - DNA, 1563 bp, synthetic construct
  misc_feature 1..1563: note = Description of Artificial Sequence: Synthetic coding sequence
  source 1..1563: mol_type = other DNA
atggctgctgctgctgctgctgctggagctgctggcagcgctgccccagctgctgctgctggggcccctggcagcggcggggcccccagcggcagccagggcgtgctgattggagaccggctgtacagcggcgtgctgatcaccctggagaactgcctgctgcctgatgacaagctgcgcttcacccccagcatgagcagcggcctggacacagacacagaaacagacctgcgggtggtgggctgtgagctgatccaggccgccggcatcctgctgcggctgccccaggtggccatggccaccggccaggtgctcttccagcgcttcttctacaccaagagctttgtgaagcacagcatggagcacgtgtccatggcctgtgtgcacctggccagcaagattgaggaggccccccggcgcatcagagatgtgatcaacgtgttccaccggctgcggcagctgcgggacaagaagaagcctgtgcccctgctgctggaccaggactatgtgaacctgaagaaccagatcatcaaggccgagaggagagtgctgaaggagctgggcttctgtgtgcacgtgaagcacccccacaagatcatcgtgatgtacctgcaggtgctggagtgtgaaagaaaccagcacctggtgcagacctcctggaactacatgaatgacagcctgaggacagatgtgtttgtgcgcttccagcctgagagcatcgcctgtgcctgcatctacctggccgcccggaccctggagatccccctgcccaaccggccccactggttcctgctgtttggagccacagaggaggagatccaggagatctgcctgaagatcctgcagctgtatgccaggaagaaggtggacctgacccacctggagggggaggtggagaagaggaagcacgccatcgaggaggccaaggcccaggcccggggcctgctgcccggcggcacccaggtgctggatggcaccagcggcttctccccagcccccaagctggtggagagccccaaggagggcaagggcagcaagcccagccccctgtctgtgaagaacaccaagaggcggctggagggcgccaagaaggccaaggctgacagccctgtgaatggcctgcccaagggccgggagagccgcagccgcagccgcagccgggagcagagctacagccgcagccccagccgcagcgccagccccaagaggaggaagagtgacagcggcagcaccagcggcggcagcaagagccagagccgcagccgcagcagaagtgacagccccccccggcaggcccccaggtctgccccctacaagggcagcgagatccggggcagcaggaagagcaaggactgcaagtacccccagaagccccacaagagccgcagccgcagcagcagccgcagccgcagccgcagccgggagagagctgacaaccctgggaagtacaagaagaagagccactactacagagaccagaggcgggagaggagccgctcctatgaaagaacaggccgccgctatgaaagagaccaccctggccacagccgccacagaagatag

SEQ ID NO: 148811 - DNA, 681 bp, synthetic construct
  misc_feature 1..681: note = Description of Artificial Sequence: Synthetic coding sequence
  source 1..681: mol_type = other DNA
atggctgctgctgctgctgctgctggagctgctggcagcgctgccccagctgctgctgctggggcccctggcagcggcggggcccccagcggcagccagggcgtgctgattggagaccggctgtacagcggcgtgctgatcaccctggagaactgcctgctgcctgatgacaagctgcgcttcacccccagcatgagcagcggcctggacacagacacagaaacagacctgcgggtggtgggctgtgagctgatccaggccgccggcatcctgctgcggctgccccaggtggccatggccaccggccaggtgctcttccagcgcttcttctacaccaagagctttgtgaagcacagcatggagcacgtgtccatggcctgtgtgcacctggccagcaagattgaggaggccccccggcgcatcagagatgtgatcaacgtgttccaccggctgcggcagctgcgggacaagaagaagcctgtgcccctgctgctggaccaggactatgtgaacctgaagaaccagatcatcaaggccgagaggagagtgctgaaggagctgggcttctgtgtgcacgtgaagcacccccacaagatcatcgtgatgtacctgcaggtgctggagtgtgaaagaaaccagcacctggtgcagacctcctgggtggccagcgagggcaagtag

SEQ ID NO: 148812 - DNA, 1044 bp, synthetic construct
  misc_feature 1..1044: note = Description of Artificial Sequence: Synthetic coding sequence
  source 1..1044: mol_type = other DNA
atgaatgacagcctgaggacagatgtgtttgtgcgcttccagcctgagagcatcgcctgtgcctgcatctacctggccgcccggaccctggagatccccctgcccaaccggccccactggttcctgctgtttggagccacagaggaggagatccaggagatctgcctgaagatcctgcagctgtatgccaggaagaaggtggacctgacccacctggagggggaggtggagaagaggaagcacgccatcgaggagggccccagccctggccctgtggcctggggccacactggagctggctggtacctgggcgtgctgagctgcccccaggccggctgctgggactacagcctggagtgcagcggggccatctgggaccactgcaagctgcggctgcctgattctggggacagctgtgccagcgccagccaggtggccggcattgctggggcccaccaccacgcccagagcctggccgtgctgcctgtggagagccccaaggagggcaagggcagcaagcccagccccctgtctgtgaagaacaccaagaggcggctggagggcgccaagaaggccaaggctgacagccctgtgaatggcctgcccaagggccgggagagccgcagccgcagccgcagccgggagcagagctacagccgcagccccagccgcagcgccagccccaagaggaggaagagtgacagcggcagcaccagcggcggcagcaagagccagagccgcagccgcagcagaagtgacagccccccccggcaggcccccaggtctgccccctacaagggcagcgagatccggggcagcaggaagagcaaggactgcaagtacccccagaagccccacaagagccgcagccgcagcagcagccgcagccgcagccgcagccgggagagagctgacaaccctgggaagtacaagaagaagagccactactacagagaccagaggcgggagaggagccgctcctatgaaagaactggaagaagatatgagcgggaccaccctggccacagccgccacagaagatag

SEQ ID NO: 148813 - DNA, 2856 bp, synthetic construct
  misc_feature 1..2856: note = Description of Artificial Sequence: Synthetic coding sequence
  source 1..2856: mol_type = other DNA
atggctgctgctgctgctgctgctgctgctgtgggcgtgcggctgcgggactgctgcagcagaggagctgtgctgctgctcttcttcagcctgagccccaggcctcctgctgctgctgcctggctgctgggcctgcggcctgaggacacagctgggggccgggtgtccctggagggcggcaccctgcgggctgctgagggcaccagcttcctgctgcgggtgtacttccagcccggccccccagccacagctgcccctgtgcccagccccaccctgaacagcggggagaatggaactggagactgggccccccggctggtgttcatcgaggagcccccaggcggcggcggcgtggcccccagcgctgtgcccaccaggcctcctggcccccagcgctgccgggagcagagcgactgggccagtgatgtggaggtgctgggccccctgcggcctggaggagtggccggcagcgccctggtgcaggtgcgggtgcgggagctgaggaaaggagaggccgagcggggcggggccggcggcggcggcaagctgttcagcctgtgtgcctgggatggccgggcctggcaccaccacggggccgccggcggcttcctgctgcgggtgcggccccggctgtatggccctggaggagacctgctgcccccagcctggctgcgggccctgggcgccctgctgctgctggccctgagcgccctcttcagcggcctgcggctgagcctgctgagcctggaccctgtggagctgcgggtgctgaggaacagcggcagcgctgctgagcaggagcaggcccggcgggtgcaggccgtgcggggccggggcacccacctgctgtgcaccctgctgctgggccaggccggggccaatgctgccctggccggctggctgtacaccagcctgcccccaggctttggaggcaccggggaggactacagcgaggagggcatccacttcccctggctgcctgccctggtgtgcaccggggctgtgttcctgggcgctgagatctgcccctacagcgtgtgcagccgccacggcctggccatcgccagccacagcgtgtgcctgacccggctgctgatggccgccgccttccctgtgtgctaccccctgggccgcctgctggactgggccctgcggcaggagatcagcaccttctacacccgggagaagctgctggagaccctgcgggctgctgacccctacagcgacctggtgaaggaggagctgaacatcatccagggcgccctggagctgcggaccaaggtggtggaggaggtgctgacccccctgggggactgcttcatgctgcggagtgatgctgtgctggactttgccaccgtgtctgagatcctgcggagcggctacacccgcatccctgtgtatgaaggagaccagaggcacaacatcgtggacatcctgtttgtgaaggacctggcctttgtggaccctgatgactgcacccccctgctgactgtgacccgcttctacaaccggcccctgcactgtgtgttcaatgacacccggctggacacagtgctggaggagttcaagaagggcaagagccacctggccatcgtgcagagggtgaacaatgaaggagagggggaccccttctatgaggtgatgggcatcgtgaccctggaggacatcatcgaggagatcatcaagtctgagatcctggatgaaacagacctgtacacagacaacaggaagaagcagagggtgccccagcgggagaggaagagacatgacttcagcctcttcaagctgagtgacacagagatgagggtgaagatcagcccccagctgctgctggccacccaccgcttcatggccacagaggtggagcccttcaagagcctgtacctgtctgagaagatcctgctgcggctgctgaagcaccccaacgtcatccaggagctgaagtttgatgagaagaacaagaaggcccctgagcactacctgtaccagaggaacagacctgtggactactttgtgctgctgctgcagggcaaggtggaggtggaggtgggcaaggagggcctgcgctttgaaaatggagccttcacctactacggcgtgcctgccatcatgaccacagcctgcagcgacaatgatgtgaggaaggtgggcagcctggccggcagctctgtgttcctgaacagaagccccagccgctgcagcggcctgaacagaagtgagagccccaaccgggagaggagtgactttggaggcagcaacacccagctgtacagcagcagcaacaacctgtacatgccagactacagcgtgcacatcctgagtgatgtgcagtttgtgaagatcacccggcagcagtaccagaatgccctgacagcctgccacatggacagcagcccccagagcccagacatggaggccttcacagatggagacagcaccaaggcccccaccacccggggcaccccccagacccccaaggatgatcctgccatcaccctgctgaacaacagaaacagcctgccctgcagcagaagtgatggcctgcggagccccagcgaggtggtgtacctgaggatggaggagctggccttcacccaggaggagatgacagactttgaggagcacagcacccagcagctgaccctgagccctgctgctgtgcccaccagggctgccagtgacagcgagtgctgcaacatcaacctggacacagagaccagcccctgcagcagtgactttgaagaaaatgtgggcaagaagctgctgcggaccctgagcggccagaagaggaagaggagccctgagggggagaggaccagcgaggacaacagcaacctgacccccctcatcacctag

SEQ ID NO: 148814 - DNA, 2493 bp, synthetic construct
  misc_feature 1..2493: note = Description of Artificial Sequence: Synthetic coding sequence
  source 1..2493: mol_type = other DNA
atggctgctgctgctgctgctgctgctgctgtgggcgtgcggctgcgggactgctgcagcagaggagctgtgctgctgctcttcttcagcctgagccccaggcctcctgctgctgctgcctggctgctgggcctgcggcctgaggacacagctgggggccgggtgtccctggagggcggcaccctgcgggctgctgagggcaccagcttcctgctgcgggtgtacttccagcccggccccccacgctgccgggagcagagcgactgggccagtgatgtggaggtgctgggccccctgcggcctggaggagtggccggcagcgccctggtgcagctgttcagcctgtgtgcctgggatggccgggcctggcaccaccacggggctgctgggggcttcctgctgcgggtgcggccccggctgtatggccctggaggagacctgctgcccccagcctggctgcgggccctgggcgccctgctgctgctggccctgagcgccctcttcagcggcctgcggctgagcctgctgagcctggaccctgtggagctgcgggtgctgagaaattctggcagcgctgctgagcaggagcaggccaggagagtgcaggccgtgcggggccggggcacccacctgctgtgcaccctgctgctgggccaggccggggccaatgctgccctggccggctggctgtacaccagcctgcccccaggctttggaggcactggagaggactacagcgaggagggcatccacttcccctggctgcctgccctggtgtgcacaggagctgtgttcctgggcgctgagatctgcccctacagcgtgtgcagcagacatggcctggccatcgccagccacagcgtgtgcctgacccggctgctgatggctgctgccttccctgtgtgctaccccctgggccgcctgctggactgggccctgcggcaggagatcagcaccttctacacccgggagaagctgctggagaccctgcgggctgctgacccctacagcgacctggtgaaggaggagctgaacatcatccagggcgccctggagctgcggaccaaggtggtggaggaggtgctgacccccctgggggactgcttcatgctgcggagtgatgctgtgctggactttgccaccgtgtctgagatcctgcggagcggctacacccgcatccctgtgtatgaaggagaccagaggcacaacatcgtggacatcctgtttgtgaaggacctggcctttgtggaccctgatgactgcacccccctgctgactgtgacccgcttctacaaccggcccctgcactgtgtgttcaatgacacccggctggacacagtgctggaggagttcaagaagggcaagagccacctggccatcgtgcagagggtgaacaatgaaggagagggggaccccttctatgaggtgatgggcatcgtgaccctggaggacatcatcgaggagatcatcaagtctgagatcctggatgaaacagacctgtacacagacaacaggaagaagcagagggtgccccagcgggagaggaagagacatgacttcagcctcttcaagctgagtgacacagagatgagggtgaagatcagcccccagctgctgctggccacccaccgcttcatggccacagaggtggagcccttcaagagcctgtacctgtctgagaagatcctgctgcggctgctgaagcaccccaacgtcatccaggagctgaagtttgatgagaagaacaagaaggcccctgagcactacctgtaccagaggaacagacctgtggactactttgtgctgctgctgcagggcaaggtggaggtggaggtgggcaaggagggcctgcgctttgaaaatggagccttcacctactatggagtgcctgccatcatgaccacagcctgcagcgacaatgatgtgaggaaggtgggcagcctggccggcagcagcgtcttcctgaacagaagccccagccgctgcagcggcctgaacagaagtgagagccccaaccgggagaggagtgactttggaggcagcaacacccagctgtacagcagcagcaacaacctgtacatgccagactacagcgtgcacatcctgagtgatgtgcagtttgtgaagatcacccggcagcagtaccagaatgccctgacagcctgccacatggacagcagcccccagagcccagacatggaggccttcacagatggagacagcaccaaggcccccaccacccggggcaccccccagacccccaaggatgatcctgccatcaccctgctgaacaacagaaacagcctgcccagcagtgacagcgagtgctgcaacatcaacctggacacagagaccagcccctgcagcagtgactttgaggagaatgtgggcaagaagctgctgcggaccctgagcggccagaagaggaagaggagccctgagggggagaggaccagcgaggacaacagcaacctgacccccctcatcacctag

SEQ ID NO: 148815 - DNA, 1824 bp, synthetic construct
  misc_feature 1..1824: note = Description of Artificial Sequence: Synthetic coding sequence
  source 1..1824: mol_type = other DNA
atggctgctgccttccctgtgtgctaccccctgggccgcctgctggactgggccctgcggcaggagatcagcaccttctacacccgggagaagctgctggagaccctgcgggctgctgacccctacagcgacctggtgaaggaggagctgaacatcatccagggcgccctggagctgcggaccaaggtggtggaggaggtgctgacccccctgggggactgcttcatgctgcggagtgatgctgtgctggactttgccaccgtgtctgagatcctgcggagcggctacacccgcatccctgtgtatgaaggagaccagaggcacaacatcgtggacatcctgtttgtgaaggacctggcctttgtggaccctgatgactgcacccccctgctgactgtgacccgcttctacaaccggcccctgcactgtgtgttcaatgacacccggctggacacagtgctggaggagttcaagaagggcaagagccacctggccatcgtgcagagggtgaacaatgaaggagagggggaccccttctatgaggtgatgggcatcgtgaccctggaggacatcatcgaggagatcatcaagtctgagatcctggatgaaacagacctgtacacagacaacaggaagaagcagagggtgccccagcgggagaggaagagacatgacttcagcctcttcaagctgagtgacacagagatgagggtgaagatcagcccccagctgctgctggccacccaccgcttcatggccacagaggtggagcccttcaagagcctgtacctgtctgagaagatcctgctgcggctgctgaagcaccccaacgtcatccaggagctgaagtttgatgagaagaacaagaaggcccctgagcactacctgtaccagaggaacagacctgtggactactttgtgctgctgctgcagggcaaggtggaggtggaggtgggcaaggagggcctgcgctttgaaaatggagccttcacctactatggagtgcctgccatcatgaccacagcctgcagcgacaatgatgtgaggaaggtgggcagcctggccggcagcagcgtcttcctgcctgtgtctgtgtccaggacctttgctgtgtccagaggagacagcctggccggcagccctgtgaacagaagccccagccgctgcagcggcctgaacagaagtgagagccccaaccgggagaggagtgactttggaggcagcaacacccagctgtacagcagcagcaacaacctgtacatgccagactacagcgtgcacatcctgagtgatgtgcagtttgtgaagatcacccggcagcagtaccagaatgccctgacagcctgccacatggacagcagcccccagagcccagacatggaggccttcacagatggagacagcaccaaggcccccaccacccggggcaccccccagacccccaaggatgatcctgccatcaccctgctgaacaacagaaacagcctgccctgcagcagaagtgatggcctgcggagccccagcgaggtggtgtacctgaggatggaggagctggccttcacccaggaggagatgacagactttgaggagcacagcacccagcagctgaccctgagccctgctgctgtgcccaccagggctgccagtgacagcgagtgctgcaacatcaacctggacacagagaccagcccctgcagcagtgactttgaagaaaatgtgggcaagaagctgctgcggaccctgagcggccagaagaggaagaggagccctgagggggagaggaccagcgaggacaacagcaacctgacccccctcatcacctag

SEQ ID NO: 148816 - DNA, 2643 bp, synthetic construct
  misc_feature 1..2643: note = Description of Artificial Sequence: Synthetic coding sequence
  source 1..2643: mol_type = other DNA
atggctgctgctgctgctgctgctgctgctgtgggcgtgcggctgcgggactgctgcagcagaggagctgtgctgctgctcttcttcagcctgagccccaggcctcctgctgctgctgcctggctgctgggcctgcggcctgaggacacagctgggggccgggtgtccctggagggcggcaccctgcgggctgctgagggcaccagcttcctgctgcgggtgtacttccagcccggccccccacgctgccgggagcagagcgactgggccagtgatgtggaggtgctgggccccctgcggcctggaggagtggccggcagcgccctggtgcagctgttcagcctgtgtgcctgggatggccgggcctggcaccaccacggggctgctgggggcttcctgctgcgggtgcggccccggctgtatggccctggaggagacctgctgcccccagcctggctgcgggccctgggcgccctgctgctgctggccctgagcgccctcttcagcggcctgcggctgagcctgctgagcctggaccctgtggagctgcgggtgctgagaaattctggcagcgctgctgagcaggagcaggccaggagagtgcaggccgtgcggggccggggcacccacctgctgtgcaccctgctgctgggccaggccggggccaatgctgccctggccggctggctgtacaccagcctgcccccaggctttggaggcactggagaggactacagcgaggagggcatccacttcccctggctgcctgccctggtgtgcacaggagctgtgttcctgggcgctgagatctgcccctacagcgtgtgcagcagacatggcctggccatcgccagccacagcgtgtgcctgacccggctgctgatggctgctgccttccctgtgtgctaccccctgggccgcctgctggactgggccctgcggcaggagatcagcaccttctacacccgggagaagctgctggagaccctgcgggctgctgacccctacagcgacctggtgaaggaggagctgaacatcatccagggcgccctggagctgcggaccaaggtggtggaggaggtgctgacccccctgggggactgcttcatgctgcggagtgatgctgtgctggactttgccaccgtgtctgagatcctgcggagcggctacacccgcatccctgtgtatgaaggagaccagaggcacaacatcgtggacatcctgtttgtgaaggacctggcctttgtggaccctgatgactgcacccccctgctgactgtgacccgcttctacaaccggcccctgcactgtgtgttcaatgacacccggctggacacagtgctggaggagttcaagaagggcaagagccacctggccatcgtgcagagggtgaacaatgaaggagagggggaccccttctatgaggtgatgggcatcgtgaccctggaggacatcatcgaggagatcatcaagtctgagatcctggatgaaacagacctgtacacagacaacaggaagaagcagagggtgccccagcgggagaggaagagacatgacttcagcctcttcaagctgagtgacacagagatgagggtgaagatcagcccccagctgctgctggccacccaccgcttcatggccacagaggtggagcccttcaagagcctgtacctgtctgagaagatcctgctgcggctgctgaagcaccccaacgtcatccaggagctgaagtttgatgagaagaacaagaaggcccctgagcactacctgtaccagaggaacagacctgtggactactttgtgctgctgctgcagggcaaggtggaggtggaggtgggcaaggagggcctgcgctttgaaaatggagccttcacctactatggagtgcctgccatcatgaccacagcctgcagcgacaatgatgtgaggaaggtgggcagcctggccggcagcagcgtcttcctgaacagaagccccagccgctgcagcggcctgaacagaagtgagagccccaaccgggagaggagtgactttggaggcagcaacacccagctgtacagcagcagcaacaacctgtacatgccagactacagcgtgcacatcctgagtgatgtgcagtttgtgaagatcacccggcagcagtaccagaatgccctgacagcctgccacatggacagcagcccccagagcccagacatggaggccttcacagatggagacagcaccaaggcccccaccacccggggcaccccccagacccccaaggatgatcctgccatcaccctgctgaacaacagaaacagcctgccctgcagcagaagtgatggcctgcggagccccagcgaggtggtgtacctgaggatggaggagctggccttcacccaggaggagatgacagactttgaggagcacagcacccagcagctgaccctgagccctgctgctgtgcccacccgggccgccagtgacagcgagtgctgcaacatcaacctggacacagagaccagcccctgcagcagtgactttgaggagaatgtgggcaagaagctgctgcggaccctgagcggccagaagaggaagaggagccctgagggggagaggaccagcgaggacaacagcaacctgacccccctcatcacctag

SEQ ID NO: 148817 - DNA, 1215 bp, synthetic construct
  misc_feature 1..1215: note = Description of Artificial Sequence: Synthetic coding sequence
  source 1..1215: mol_type = other DNA
atgggcatcgtgaccctggaggacatcatcgaggagatcatcaagtctgagatcctggatgaaacagacctgtacacagacaacaggaagaagcagagggtgccccagcgggagaggaagagacatgacttcagcctcttcaagctgagtgacacagagatgagggtgaagatcagcccccagctgctgctggccacccaccgcttcatggccacagaggtggagcccttcaagagcctgtacctgtctgagaagatcctgctgcggctgctgaagcaccccaacgtcatccaggagctgaagtttgatgagaagaacaagaaggcccctgagcactacctgtaccagaggaacagacctgtggactactttgtgctgctgctgcagggcaaggtggaggtggaggtgggcaaggagggcctgcgctttgaaaatggagccttcacctactatggagtgcctgccatcatgaccacagcctgcagcgacaatgatgtgaggaaggtgggcagcctggccggcagcagcgtcttcctgaacagaagccccagccgctgcagcggcctgaacagaagtgagagccccaaccgggagaggagtgactttggaggcagcaacacccagctgtacagcagcagcaacaacctgtacatgccagactacagcgtgcacatcctgagtgatgtgcagtttgtgaagatcacccggcagcagtaccagaatgccctgacagcctgccacatggacagcagcccccagagcccagacatggaggccttcacagatggagacagcaccaaggcccccaccacccggggcaccccccagacccccaaggatgatcctgccatcaccctgctgaacaacagaaacagcctgccctgcagcagaagtgatggcctgcggagccccagcgaggtggtgtacctgaggatggaggagctggccttcacccaggaggagatgacagactttgaggagcacagcacccagcagctgaccctgagccctgctgctgtgcccacccgggccgccagtgacagcgagtgctgcaacatcaacctggacacagagaccagcccctgcagcagtgactttgaggagaatgtgggcaagaagctgctgcggaccctgagcggccagaagaggaagaggagccctgagggggagaggaccagcgaggacaacagcaacctgacccccctcatcacctag

SEQ ID NO: 148818 - DNA, 2562 bp, synthetic construct
  misc_feature 1..2562: note = Description of Artificial Sequence: Synthetic coding sequence
  source 1..2562: mol_type = other DNA
atgattggctgtggggcctgtgagcccaaggtgaagatggccggcggccaggccgccgccgccctgcccacctggaagatggccgcccggcgcagcctgagcgcccggggccggggcatcctgcaggccgctgctggccgcctgctgcccctgctgctgctgagctgctgctgcggggccggcggctgtgccgctgtgggggagaatgaggagaccgtcatcatcggcctgcggctggaggacaccaatgatgtgtccttcatggagggcggggccctgcgggtgtctgagaggaccagggtgaagctgcgggtgtatggccagaacatcaacaatgagacctggagccgcatcgccttcacagaacatgaaagaagaagacacagccctggagagcggggcctgggcggccctgcccctcctgagccagattctggcccccagagatgtggcatccgcaccagtgacatcatcatcctgccccacatcatcctgaacagaaggaccagcggcatcattgaaattgagatcaagcccctgaggaagatggagaagagcaagagctactacctgtgcaccagcctgagcaccccagccctgggcgctgggggcagcggcagcactggaggagctgtgggcggcaaaggaggcagcggcgtggccggcctgcccccaccaccctgggccgagaccacctggatctaccatgatggagaggacaccaagatgattgtgggggaggagaagaagttcctgctgcccttctggctgcaggtgatcttcatcagcctgctgctgtgcctgagcggcatgttttctggcctgaacctgggcctgatggccctggaccccatggagctgagaattgtgcagaactgtggcacagagaaggagaagaactatgccaagagaattgagcctgtgcggcggcagggcaactacctgctgtgcagcctgctgctgggcaatgtgctggtgaacaccaccctgaccatcctgctggatgacattgctggcagcggcctggtggccgtggtggtgtccaccatcggcatcgtcatctttggagagatcgtgccccaggccatctgcagcagacatggcctggccgtgggcgccaacaccatcttcctgaccaagttcttcatgatgatgaccttccctgccagctaccctgtgtccaagctgctggactgtgtgctgggccaggagattggaacagtgtacaaccgggagaagctgctggagatgctgcgggtgacagacccctacaatgacctggtgaaggaggagctgaacatcatccagggcgccctggagctgcggaccaagacagtggaggatgtgatgacccccctgcgggactgcttcatgatcaccggggaggccatcctggacttcaacaccatgtctgagatcatggagagcggctacacccgcatccctgtgtttgaaggagagaggagcaacatcgtggacctgctgtttgtgaaggacctggcctttgtggaccctgatgactgcacccccctgaagaccatcaccaagttctacaaccaccccctgcactttgtgttcaatgacaccaagctggatgccatgctggaggagttcaagaagggcaagagccacctggccatcgtgcagagggtgaacaatgaaggagagggggaccccttctatgaggtgctgggcatcgtgaccctggaggatgtgattgaggagatcatcaagtctgagatcctggatgaaacagacctgtacacagacaacagaaccaagaagaaggtggcccaccgggagaggaagcaggacttcagcgccttcaagcagacagacagcgagatgaaggtgaagatcagcccccagctgctgctggccatgcaccgcttcctggccacagaggtggaggccttcagccccagccagatgtctgagaagatcctgctgcggctgctgaagcaccccaacgtcatccaggagctgaagtatgatgagaagaacaagaaggcccctgagtactacctgtaccagaggaacaagcctgtggactactttgtgctgatcctgcagggcaaggtggaggtggaggccggcaaggagggcatgaagtttgaggccagcgccttctcctactatggagtgatggccctgacagccagccctggagagaacaagagccccccccggccctgtggcctgaaccacagcgacagcctgagcagaagtgacagaattgatgctgtgacccccaccctgggcagcagcaacaaccagctgaacagcagcctgctgcaggtgtacatcccagactacagcgtgcgggccctgagtgacctgcagtttgtgaagatcagccggcagcagtaccagaatgccctgatggccagcaggatggacaagaccccccagagcagtgacagcgagaacaccaagattgagctgaccctgacagagctgcatgatggcctgcctgatgaaacagccaacctgctgaatgagcagaactgtgtgacccacagcaaggccaaccacagcctgcacaatgaaggagccatctag

SEQ ID NO: 148819 - DNA, 1659 bp, synthetic construct
  misc_feature 1..1659: note = Description of Artificial Sequence: Synthetic coding sequence
  source 1..1659: mol_type = other DNA
atgattggctgtggggcctgtgagcccaaggtgaagatggccggcggccaggccgccgccgccctgcccacctggaagatggccgcccggcgcagcctgagcgcccggggccggggcatcctgcaggccgctgctggccgcctgctgcccctgctgctgctgagctgctgctgcggggccggcggctgtgccgctgtgggggagaatgaggagaccgtcatcatcggcctgcggctggaggacaccaatgatgtgtccttcatggagggcggggccctgcgggtgtctgagaggaccagggtgaagctgcgggtgtatggccagaacatcaacaatgagacctggagccgcatcgccttcacagaacatgaaagaagaagacacagccctggagagcggggcctgggcggccctgcccctcctgagccagattctggcccccagagatgtggcatccgcaccagtgacatcatcatcctgccccacatcatcctgaacagaaggaccagcggcatcattgaaattgagatcaagcccctgaggaagatggagaagagcaagagctactacctgtgcaccagcctgagcaccccagccctgggcgctgggggcagcggcagcactggaggagctgtgggcggcaaaggaggcagcggcgtggccggcctgcccccaccaccctgggccgagaccacctggatctaccatgatggagaggacaccaagatgattgtgggggaggagaagaagttcctgctgcccttctggctgcaggtgatcttcatcagcctgctgctgtgcctgagcggcatgttttctggcctgaacctgggcctgatggccctggaccccatggagctgagaattgtgcagaactgtggcacagagaaggagaagaactatgccaagagaattgagcctgtgcggcggcagggcaactacctgctgtgcagcctgctgctgggcaatgtgctggtgaacaccaccctgaccatcctgctggatgacattgctggcagcggcctggtggccgtggtggtgtccaccatcggcatcgtcatctttggagagatcgtgccccaggccatctgcagcagacatggcctggccgtgggcgccaacaccatcttcctgaccaagttcttcatgatgatgaccttccctgccagctaccctgtgtccaagctgctggactgtgtgctgggccaggagattggaacagtgtacaaccgggagaagctgctggagatgctgcgggtgacagacccctacaatgacctggtgaaggaggagctgaacatcatccagggcgccctggagctgcggaccaagacagtggaggatgtgatgacccccctgcgggactgcttcatgatcaccggggaggccatcctggacttcaacaccatgtctgagatcatggagagcggctacacccgcatccctgtgtttgaaggagagaggagcaacatcgtggacctgctgtttgtgaaggacctggcctttgtggaccctgatgactgcacccccctgaagaccatcaccaagttctacaaccaccccctgcactttgtgttcaatgacaccaagctggatgccatgctggaggagttcaagaaggagcacaccaacaagaagcccaagagctaccagcactag

SEQ ID NO: 148820 - DNA, 2628 bp, synthetic construct
  misc_feature 1..2628: note = Description of Artificial Sequence: Synthetic coding sequence
  source 1..2628: mol_type = other DNA
atgattggctgtggggcctgtgagcccaaggtgaagatggccggcggccaggccgccgccgccctgcccacctggaagatggccgcccggcgcagcctgagcgcccggggccggggcatcctgcaggccgctgctggccgcctgctgcccctgctgctgctgagctgctgctgcggggccggcggctgtgccgctgtgggggagaatgaggagaccgtcatcatcggcctgcggctggaggacaccaatgatgtgtccttcatggagggcggggccctgcgggtgtctgagaggaccagggtgaagctgcgggtgtatggccagaacatcaacaatgagacctggagccgcatcgccttcacagaacatgaaagaagaagacacagccctggagagcggggcctgggcggccctgcccctcctgagccagattctggcccccagagatgtggcatccgcaccagtgacatcatcatcctgccccacatcatcctgaacagaaggaccagcggcatcattgaaattgagatcaagcccctgaggaagatggagaagagcaagagctactacctgtgcaccagcctgagcaccccagccctgggcgctgggggcagcggcagcactggaggagctgtgggcggcaaaggaggcagcggcgtggccggcctgcccccaccaccctgggccgagaccacctggatctaccatgatggagaggacaccaagatgattgtgggggaggagaagaagttcctgctgcccttctggctgcaggtgatcttcatcagcctgctgctgtgcctgagcggcatgttttctggcctgaacctgggcctgatggccctggaccccatggagctgagaattgtgcagaactgtggcacagagaaggagaagaactatgccaagagaattgagcctgtgcggcggcagggcaactacctgctgtgcagcctgctgctgggcaatgtgctggtgaacaccaccctgaccatcctgctggatgacattgctggcagcggcctggtggccgtggtggtgtccaccatcggcatcgtcatctttggagagatcgtgccccaggccatctgcagcagacatggcctggccgtgggcgccaacaccatcttcctgaccaagttcttcatgatgatgaccttccctgccagctaccctgtgtccaagctgctggactgtgtgctgggccaggagattggaacagtgtacaaccgggagaagctgctggagatgctgcgggtgacagacccctacaatgacctggtgaaggaggagctgaacatcatccagggcgccctggagctgcggaccaagacagtggaggatgtgatgacccccctgcgggactgcttcatgatcaccggggaggccatcctggacttcaacaccatgtctgagatcatggagagcggctacacccgcatccctgtgtttgaaggagagaggagcaacatcgtggacctgctgtttgtgaaggacctggcctttgtggaccctgatgactgcacccccctgaagaccatcaccaagttctacaaccaccccctgcactttgtgttcaatgacaccaagctggatgccatgctggaggagttcaagaagggcaagagccacctggccatcgtgcagagggtgaacaatgaaggagagggggaccccttctatgaggtgctgggcatcgtgaccctggaggatgtgattgaggagatcatcaagtctgagatcctggatgaaacagacctgtacacagacaacagaaccaagaagaaggtggcccaccgggagaggaagcaggacttcagcgccttcaagcagacagacagcgagatgaaggtgaagatcagcccccagctgctgctggccatgcaccgcttcctggccacagaggtggaggccttcagccccagccagatgtctgagaagatcctgctgcggctgctgaagcaccccaacgtcatccaggagctgaagtatgatgagaagaacaagaaggcccctgagtactacctgtaccagaggaacaagcctgtggactactttgtgctgatcctgcagggcaaggtggaggtggaggccggcaaggagggcatgaagtttgaggccagcgccttctcctactatggagtgatggccctgacagccagccctgtgcccctgagcctgagcaggacctttgtggtgtccaggacagagctgctggccgccggcagccctggagagaacaagagccccccccggccctgtggcctgaaccacagcgacagcctgagcagaagtgacagaattgatgctgtgacccccaccctgggcagcagcaacaaccagctgaacagcagcctgctgcaggtgtacatcccagactacagcgtgcgggccctgagtgacctgcagtttgtgaagatcagccggcagcagtaccagaatgccctgatggccagcaggatggacaagaccccccagagcagtgacagcgagaacaccaagattgagctgaccctgacagagctgcatgatggcctgcctgatgaaacagccaacctgctgaatgagcagaactgtgtgacccacagcaaggccaaccacagcctgcacaatgaaggagccatctag

SEQ ID NO: 148821 - DNA, 2565 bp, synthetic construct
  misc_feature 1..2565: note = Description of Artificial Sequence: Synthetic coding sequence
  source 1..2565: mol_type = other DNA
atgattggctgtggggcctgtgagcccaaggtgaagatggccggcggccaggccgccgccgccctgcccacctggaagatggccgcccggcgcagcctgagcgcccggggccggggcatcctgcaggccgctgctggccgcctgctgcccctgctgctgctgagctgctgctgcggggccggcggctgtgccgctgtgggggagaatgaggagaccgtcatcatcggcctgcggctggaggacaccaatgatgtgtccttcatggagggcggggccctgcgggtgtctgagaggaccagggtgaagctgcgggtgtatggccagaacatcaacaatgagacctggagccgcatcgccttcacagaacatgaaagaagaagacacagccctggagagcggggcctgggcggccctgcccctcctgagccagattctggcccccagagatgtggcatccgcaccagtgacatcatcatcctgccccacatcatcctgaacagaaggaccagcggcatcattgaaattgagatcaagcccctgaggaagatggagaagagcaagagctactacctgtgcaccagcctgagcaccccagccctgggcgctgggggcagcggcagcactggaggagctgtgggcggcaaaggaggcagcggcgtggccggcctgcccccaccaccctgggccgagaccacctggatctaccatgatggagaggacaccaagatgattgtgggggaggagaagaagttcctgctgcccttctggctgcaggtgatcttcatcagcctgctgctgtgcctgagcggcatgttttctggcctgaacctgggcctgatggccctggaccccatggagctgagaattgtgcagaactgtggcacagagaaggagaagaactatgccaagagaattgagcctgtgcggcggcagggcaactacctgctgtgcagcctgctgctgggcaatgtgctggtgaacaccaccctgaccatcctgctggatgacattgctggcagcggcctggtggccgtggtggtgtccaccatcggcatcgtcatctttggagagatcgtgccccaggccatctgcagcagacatggcctggccgtgggcgccaacaccatcttcctgaccaagttcttcatgatgatgaccttccctgccagctaccctgtgtccaagctgctggactgtgtgctgggccaggagattggaacagtgtacaaccgggagaagctgctggagatgctgcgggtgacagacccctacaatgacctggtgaaggaggagctgaacatcatccagggcgccctggagctgcggaccaagacagtggaggatgtgatgacccccctgcgggactgcttcatgatcaccggggaggccatcctggacttcaacaccatgtctgagatcatggagagcggctacacccgcatccctgtgtttgaaggagagaggagcaacatcgtggacctgctgtttgtgaaggacctggcctttgtggaccctgatgactgcacccccctgaagaccatcaccaagttctacaaccaccccctgcactttgtgttcaatgacaccaagctggatgccatgctggaggagttcaagaagggcaagagccacctggccatcgtgcagagggtgaacaatgaaggagagggggaccccttctatgaggtgctgggcatcgtgaccctggaggatgtgattgaggagatcatcaagtctgagatcctggatgaaacagacctgtacacagacaacagaaccaagaagaaggtggcccaccgggagaggaagcaggacttcagcgccttcaagcagacagacagcgagatgaaggtgaagatcagcccccagctgctgctggccatgcacctggtgttcatcagcattgaggtggaggccttcagccccagccagatgtctgagaagatcctgctgcggctgctgaagcaccccaacgtcatccaggagctgaagtatgatgagaagaacaagaaggcccctgagtactacctgtaccagaggaacaagcctgtggactactttgtgctgatcctgcagggcaaggtggaggtggaggccggcaaggagggcatgaagtttgaggccagcgccttctcctactacggcgtgatggccctgacagccagccctggagagaacaagagccccccccggccctgtggcctgaaccacagcgacagcctgagcagaagtgacagaattgatgctgtgacccccaccctgggcagcagcaacaaccagctgaacagcagcctgctgcaggtgtacatcccagactacagcgtgcgggccctgagtgacctgcagtttgtgaagatcagccggcagcagtaccagaatgccctgatggccagcaggatggacaagaccccccagagcagtgacagcgagaacaccaagattgagctgaccctgacagagctgcatgatggcctgcctgatgaaacagccaacctgctgaatgagcagaactgtgtgacccacagcaaggccaaccacagcctgcacaatgaaggagccatctag

SEQ ID NO: 148822 - DNA, 2631 bp, synthetic construct
  misc_feature 1..2631: note = Description of Artificial Sequence: Synthetic coding sequence
  source 1..2631: mol_type = other DNA
atgattggctgtggggcctgtgagcccaaggtgaagatggccggcggccaggccgccgccgccctgcccacctggaagatggccgcccggcgcagcctgagcgcccggggccggggcatcctgcaggccgctgctggccgcctgctgcccctgctgctgctgagctgctgctgcggggccggcggctgtgccgctgtgggggagaatgaggagaccgtcatcatcggcctgcggctggaggacaccaatgatgtgtccttcatggagggcggggccctgcgggtgtctgagaggaccagggtgaagctgcgggtgtatggccagaacatcaacaatgagacctggagccgcatcgccttcacagaacatgaaagaagaagacacagccctggagagcggggcctgggcggccctgcccctcctgagccagattctggcccccagagatgtggcatccgcaccagtgacatcatcatcctgccccacatcatcctgaacagaaggaccagcggcatcattgaaattgagatcaagcccctgaggaagatggagaagagcaagagctactacctgtgcaccagcctgagcaccccagccctgggcgctgggggcagcggcagcactggaggagctgtgggcggcaaaggaggcagcggcgtggccggcctgcccccaccaccctgggccgagaccacctggatctaccatgatggagaggacaccaagatgattgtgggggaggagaagaagttcctgctgcccttctggctgcaggtgatcttcatcagcctgctgctgtgcctgagcggcatgttttctggcctgaacctgggcctgatggccctggaccccatggagctgagaattgtgcagaactgtggcacagagaaggagaagaactatgccaagagaattgagcctgtgcggcggcagggcaactacctgctgtgcagcctgctgctgggcaatgtgctggtgaacaccaccctgaccatcctgctggatgacattgctggcagcggcctggtggccgtggtggtgtccaccatcggcatcgtcatctttggagagatcgtgccccaggccatctgcagcagacatggcctggccgtgggcgccaacaccatcttcctgaccaagttcttcatgatgatgaccttccctgccagctaccctgtgtccaagctgctggactgtgtgctgggccaggagattggaacagtgtacaaccgggagaagctgctggagatgctgcgggtgacagacccctacaatgacctggtgaaggaggagctgaacatcatccagggcgccctggagctgcggaccaagacagtggaggatgtgatgacccccctgcgggactgcttcatgatcaccggggaggccatcctggacttcaacaccatgtctgagatcatggagagcggctacacccgcatccctgtgtttgaaggagagaggagcaacatcgtggacctgctgtttgtgaaggacctggcctttgtggaccctgatgactgcacccccctgaagaccatcaccaagttctacaaccaccccctgcactttgtgttcaatgacaccaagctggatgccatgctggaggagttcaagaagggcaagagccacctggccatcgtgcagagggtgaacaatgaaggagagggggaccccttctatgaggtgctgggcatcgtgaccctggaggatgtgattgaggagatcatcaagtctgagatcctggatgaaacagacctgtacacagacaacagaaccaagaagaaggtggcccaccgggagaggaagcaggacttcagcgccttcaagcagacagacagcgagatgaaggtgaagatcagcccccagctgctgctggccatgcacctggtgttcatcagcattgaggtggaggccttcagccccagccagatgtctgagaagatcctgctgcggctgctgaagcaccccaacgtcatccaggagctgaagtatgatgagaagaacaagaaggcccctgagtactacctgtaccagaggaacaagcctgtggactactttgtgctgatcctgcagggcaaggtggaggtggaggccggcaaggagggcatgaagtttgaggccagcgccttctcctactacggcgtgatggccctgacagccagccctgtgcccctgagcctgagcaggacctttgtggtgtccaggacagagctgctggccgccggcagccctggagagaacaagagccccccccggccctgtggcctgaaccacagcgacagcctgagcagaagtgacagaattgatgctgtgacccccaccctgggcagcagcaacaaccagctgaacagcagcctgctgcaggtgtacatcccagactacagcgtgcgggccctgagtgacctgcagtttgtgaagatcagccggcagcagtaccagaatgccctgatggccagcaggatggacaagaccccccagagcagtgacagcgagaacaccaagattgagctgaccctgacagagctgcatgatggcctgcctgatgaaacagccaacctgctgaatgagcagaactgtgtgacccacagcaaggccaaccacagcctgcacaatgaaggagccatctag

SEQ ID NO: 148823 - DNA, 1725 bp, synthetic construct
  misc_feature 1..1725: note = Description of Artificial Sequence: Synthetic coding sequence
  source 1..1725: mol_type = other DNA
atgattggctgtggggcctgtgagcccaaggtgaagatggccggcggccaggccgccgccgccctgcccacctggaagatggccgcccggcgcagcctgagcgcccggggccggggcatcctgcaggccgctgctggccgcctgctgcccctgctgctgctgagctgctgctgcggggccggcggctgtgccgctgtgggggagaatgaggagaccgtcatcatcggcctgcggctggaggacaccaatgatgtgtccttcatggagggcggggccctgcgggtgtctgagaggaccagggtgaagctgcgggtgtatggccagaacatcaacaatgagacctggagccgcatcgccttcacagaacatgaaagaagaagacacagccctggagagcggggcctgggcggccctgcccctcctgagccagattctggcccccagagatgtggcatccgcaccagtgacatcatcatcctgccccacatcatcctgaacagaaggaccagcggcatcattgaaattgagatcaagcccctgaggaagatggagaagagcaagagctactacctgtgcaccagcctgagcaccccagccctgggcgctgggggcagcggcagcactggaggagctgtgggcggcaaaggaggcagcggcgtggccggcctgcccccaccaccctgggccgagaccacctggatctaccatgatggagaggacaccaagatgattgtgggggaggagaagaagttcctgctgcccttctggctgcaggtgatcttcatcagcctgctgctgtgcctgagcggcatgttttctggcctgaacctgggcctgatggccctggaccccatggagctgagaattgtgcagaactgtggcacagagaaggagaagaactatgccaagagaattgagcctgtgcggcggcagggcaactacctgctgtgcagcctgctgctgggcaatgtgctggtgaacaccaccctgaccatcctgctggatgacattgctggcagcggcctggtggccgtggtggtgtccaccatcggcatcgtcatctttggagagatcgtgccccaggccatctgcagcagacatggcctggccgtgggcgccaacaccatcttcctgaccaagttcttcatgatgatgaccttccctgccagctaccctgtgtccaagctgctggactgtgtgctgggccaggagattggaacagtgtacaaccgggagaagctgctggagatgctgcgggtgacagacccctacaatgacctggtgaaggaggagctgaacatcatccagggcgccctggagctgcggaccaagacagtggaggatgtgatgacccccctgcgggactgcttcatgatcaccggggaggccatcctggacttcaacaccatgtctgagatcatggagagcggctacacccgcatccctgtgtttgaaggagagaggagcaacatcgtggacctgctgtttgtgaaggacctggcctttgtggaccctgatgactgcacccccctgaagaccatcaccaagttctacaaccaccccctgcactttgtgttcaatgacaccaagctggatgccatgctggaggagttcaagaaggagcacaccaacaagaagcccaagagctaccagcactgcaatgagcagaactgtgtgacccacagcaaggccaaccacagcctgcacaatgaaggagccatctag

SEQ ID NO: 148824 - DNA, 2124 bp, synthetic construct
  misc_feature 1..2124: note = Description of Artificial Sequence: Synthetic coding sequence
  source 1..2124: mol_type = other DNA
atggctgctgctgtggccgccgccggccgcctgggctggctgtttgctgccctgtgcctgggcaatgctgctggggaggccgcccctggcccccgggtgctgggcttctgcctggaggaggatggagctgctggggccggctgggtgcggggcggggccgcccgggacaccccagatgccaccttcctgctgcggctgtttggacctggctttgccaacagctcctggagctgggtggcccctgagggcgccggctgccgggaggaggccgccagccctgctggggagtggagggccctgctgcggctgcggctgcgggcagaggccgtgcggccccacagcgccctgctggccgtgcgggtggagcccggcggcggcgctgctgaggaggccgccccaccctgggccctgggcctgggcgccgccggcctgctggccctggccgccctggcccggggcctgcagctgagcgccctggccctggccccagctgaggtgcaggtgctgcgggagagcggcagcgaggccgagagagctgctgcccggcggctggagcccgcccggcgctgggccggctgtgccctgggcgccctgctgctgctggccagcctggcccaggccgccctggccgtgctgctgtacagagctgctggccagagagctgtgcctgctgtgctgggcagcgctggcctggtgttcctggtgggggaggtggtgcctgctgctgtgtctggccgctggaccctggccctggccccccgggccctgggcctgagccggctggccgtgctgctgaccctgcctgtggccctgcctgtgggccagctgctggagctggccgcccggcccggccgcctgcgggagcgggtgctggagctggcccggggcggcggggacccctacagcgacctgagcaagggcgtgctgcgctgcaggacagtggaggatgtgctgacccccctggaggactgcttcatgctggatgccagcacagtgctggactttggagtgctggccagcatcatgcagagcggccacacccgcatccctgtgtatgaggaggagaggagcaacatcgtggacatgctgtacctgaaggacctggcctttgtggaccctgaggactgcacccccctgagcaccatcacccgcttctacaaccaccccctgcactttgtgttcaatgacaccaagctggatgctgtgctggaggagttcaagaggggcaagagccacctggccatcgtgcagaaggtgaacaatgaaggagagggggaccccttctatgaggtgctgggcctggtgaccctggaggatgtgattgaggagatcatccgctctgagatcctggatgaaagtgaggactacagagacacagtggtgaagaggaagccagccagcctgatggcccccctgaagaggaaggaggagttcagcctcttcaaggtgtctgatgatgagtacaaggtgaccatcagcccccagctgctgctggccacccagcgcttcctgagccgggaggtggatgtgttcagccccctgcgcatcagcgagaaggtgctgctgcacctgctgaagcaccccagcgtgaaccaggaggtgcgctttgatgagagcaaccggctggccacccaccactacctgtaccagaggagccagcctgtggactacttcatcctgatcctgcagggccgggtggaggtggagatcggcaaggagggcctgaagtttgaaaatggagccttcacctactatggagtgtctgccctgactgtgcccagctctgtgcaccagagccctgtgagcagcctgcagcccatcagacatgacctgcagcctgaccctggagatggcacccacagcagcgcctactgcccagactacacagtgcgggccctgagtgacctgcagctgatcaaggtgacccggctgcagtacctgaatgccctgctggccacccgggcccagaacctgccccagagcccagaaaatacagacctgcaggtgattcctggcagccagacccggctgctgggggagaagaccaccacagctgctggcagcagccacagcaggcctggggtgcctgtggagggcagccctggaagaaatcctggggtgtag

SEQ ID NO: 148825 - DNA, 1980 bp, synthetic construct
  misc_feature 1..1980: note = Description of Artificial Sequence: Synthetic coding sequence
  source 1..1980: mol_type = other DNA
atggctgctgctgtggccgccgccggccgcctgggctggctgtttgctgccctgtgcctgggcaatgctgctggggaggccgcccctggcccccgggtgctgggcttctgcctggaggaggatggagctgctggggccggctgggtgcggggcggggccgcccgggacaccccagatgccaccttcctgctgcggctgtttggacctggctttgccaacagctcctggagctgggtggcccctgagggcgccggctgccgggaggaggccgccagccctgctggggagtggagggccctgctgcggctgcggctgcgggcagaggccgtgcggccccacagcgccctgctggccgtgcgggtggagcccggcggcggcgctgctgaggaggccgccccaccctgggccctgggcctgggcgccgccggcctgctggccctggccgccctggcccggggcctgcagctgagcgccctggccctggccccagctgaggtgcaggtgctgcgggagagcggcagcgaggccgagagagctgctgcccggcggctggagcccgcccggcgctgggccggctgtgccctgggcgccctgctgctgctggccagcctggcccaggccgccctggccgtgctgctgtacagagctgctggccagagagctgtgcctgctgtgctgggcagcgctggcctggtgttcctggtgggggaggtggtgcctgctgctgtgtctggccgctggaccctggccctggccccccgggccctgggcctgagccggctggccgtgctgctgaccctgcctgtggccctgcctgtgggccagctgctggagctggccgcccggcccggccgcctgcgggagcgggtgctggagctggcccggggcggcggggacccctacagcgacctgagcaagggcgtgctgcgctgcaggacagtggaggatgtgctgacccccctggaggactgcttcatgctggatgccagcacagtgctggactttggagtgctggccagcatcatgcagagcggccacacccgcatccctgtgtatgaggaggagaggagcaacatcgtggacatgctgtacctgaaggacctggcctttgtggaccctgaggactgcacccccctgagcaccatcacccgcttctacaaccaccccctgcactttgtgttcaatgacaccaagctggatgctgtgctggaggagttcaagagaggagacacagtggtgaagaggaagccagccagcctgatggcccccctgaagaggaaggaggagttcagcctcttcaaggtgtctgatgatgagtacaaggtgaccatcagcccccagctgctgctggccacccagcgcttcctgagccgggaggtggatgtgttcagccccctgcgcatcagcgagaaggtgctgctgcacctgctgaagcaccccagcgtgaaccaggaggtgcgctttgatgagagcaaccggctggccacccaccactacctgtaccagaggagccagcctgtggactacttcatcctgatcctgcagggccgggtggaggtggagatcggcaaggagggcctgaagtttgaaaatggagccttcacctactatggagtgtctgccctgactgtgcccagctctgtgcaccagagccctgtgagcagcctgcagcccatcagacatgacctgcagcctgaccctggagatggcacccacagcagcgcctactgcccagactacacagtgcgggccctgagtgacctgcagctgatcaaggtgacccggctgcagtacctgaatgccctgctggccacccgggcccagaacctgccccagagcccagaaaatacagacctgcaggtgattcctggcagccagacccggctgctgggggagaagaccaccacagctgctggcagcagccacagcaggcctggggtgcctgtggagggcagccctggaagaaatcctggggtgtag

SEQ ID NO: 148826 - DNA, 2043 bp, synthetic construct
  misc_feature 1..2043: note = Description of Artificial Sequence: Synthetic coding sequence
  source 1..2043: mol_type = other DNA
atggctgctgctgtggccgccgccggccgcctgggctggctgtttgctgccctgtgcctgggcaatgctgctggggaggccgcccctggcccccgggtgctgggcttctgcctggaggaggatggagctgctggggccggctgggtgcggggcggggccgcccgggacaccccagatgccaccttcctgctgcggctgtttggacctggctttgccaacagctcctggagctgggtggcccctgagggcgccggctgccgggaggaggccgccagccctgctggggagtggagggccctgctgcggctgcggctgcgggcagaggccgtgcggccccacagcgccctgctggccgtgcgggtggagcccggcggcggcgctgctgaggaggccgccccaccctgggccctgggcctgggcgccgccggcctgctggccctggccgccctggcccggggcctgcagctgagcgccctggccctggccccagctgaggtgcaggtgctgcgggagagcggcagcgaggccgagagagctgctgcccggcggctggagcccgcccggcgctgggccggctgtgccctgggcgccctgctgctgctggccagcctggcccaggccgccctggccgtgctgctgtacagagctgctggccagagagctgtgcctgctgtgctgggcagcgctggcctggtgttcctggtgggggaggtggtgcctgctgctgtgtctggccgctggaccctggccctggccccccgggccctgggcctgagccggctggccgtgctgctgaccctgcctgtggccctgcctgtgggccagctgctggagctggccgcccggcccggccgcctgcgggagcgggtgctggagctggcccggggcggcggggacccctacagcgacctgagcaagggcgtgctgcgctgcaggacagtggaggatgtgctgacccccctggaggactgcttcatgctggatgccagcacagtgctggactttggagtgctggccagcatcatgcagagcggccacacccgcatccctgtgtatgaggaggagaggagcaacatcgtggacatgctgtacctgaaggacctggcctttgtggaccctgaggactgcacccccctgagcaccatcacccgcttctacaaccaccccctgcactttgtgttcaatgacaccaagctggatgctgtgctggaggagttcaagagaggagacacagtggtgaagaggaagccagccagcctgatggcccccctgaagaggaaggaggagttcagcctcttcaaggtgtctgatgatgagtacaaggtgaccatcagcccccagctgctgctggccacccagcgcttcctgagccgggaggtggatgtgttcagccccctgcgcatcagcgagaaggtgctgctgcacctgctgaagcaccccagcgtgaaccaggaggtgcgctttgatgagagcaaccggctggccacccaccactacctgtaccagaggagccagcctgtggactacttcatcctgatcctgcagggccgggtggaggtggagatcggcaaggagggcctgaagtttgaaaatggagccttcacctactatggagtgtctgccctgactgtgcccagctctgtgcaccagagccctgtgagcagcctgcagcccatcagacatgacctgcagcctgaccctggagatggcacccacagcagcgcctactgcccagactacacagtgcgggccctgagtgacctgcagctgatcaaggtgacccggctgcagtacctgaatgccctgctggccacccgggcccagaacctgccccagagcccagaaaatacagacctgcaggtgattcctggcagccagacccggctgctgggggagaagaccaccacagctgctggcagcagccacagccggcccagcctgcccctgctgccccggggccgggacagcgctgcctacagcgacagcgacctgtttggcctgagccacctggtgtctgctgtgacagcctttgtgtggccctag

SEQ ID NO: 148827 - DNA, 2328 bp, synthetic construct
  misc_feature 1..2328: note = Description of Artificial Sequence: Synthetic coding sequence
  source 1..2328: mol_type = other DNA
atggcccctgtgggcggcggcggccggcctgtgggcggccctgcccggggccgcctgctgctggccgcccctgtgctgctggtgctgctgtgggccctgggcgcccggggccagggcagcccccagcagggcaccatcgtgggcatgaggctggccagctgcaacaagagctgtggcaccaacccagatggcatcatctttgtgtctgagggcagcacagtgaacctgcggctgtatggctacagcctgggcaacatcagcagcaacctgatctccttcacagaggtggatgatgctgagaccctgcacaagagcaccagctgcctggagctgaccaaggacctggtggtgcagcagctggtgaatgtgtcccggggcaacaccagcggcgtgctggtggtgctgaccaagttcctgcggcgctctgagagcatgaagctgtatgccctgtgcacccgggcccagccagatggcccctggctgaagtggacagacaaggacagcctgctcttcatggtggaggagcccggccgcttcctgcccctgtggctgcacatcctgctgatcaccgtgctgctggtgctgagcggcatcttcagcggcctgaacctgggcctgatggccctggaccccatggagctgcgcatcgtgcagaactgtggcacagagaaggagcggcgctatgccaggaagattgagcccatccggaggaagggcaactacctgctgtgcagcctgctgctgggcaatgtgctggtgaacaccagcctgaccatcctgctggacaacctgattggcagcggcctgatggctgtggccagcagcaccatcggcatcgtcatctttggagagatcctgccccaggccctgtgcagccgccacggcctggccgtgggcgccaacaccatcctgctgaccaagttcttcatgctgctgaccttccccctgtccttccccatcagcaagctgctggacttcttcctgggccaggagatcagaacagtgtacaaccgggagaagctgatggagatgctgaaggtgacagagccctacaatgacctggtgaaggaggagctgaacatgatccagggcgccctggagctgcggaccaagacagtggaggacatcatgacccagctgcaggactgcttcatgatccgcagtgatgccatcctggacttcaacaccatgtctgagatcatggagagcggctacacccgcatccctgtgtttgaagatgagcagagcaacatcgtggacatcctgtatgtgaaggacctggcctttgtggaccctgatgactgcacccccctgaagaccatcacccgcttctacaaccaccctgtgcactttgtgttccatgacaccaagctggatgccatgctggaggagttcaagaagggcaagagccacctggccatcgtgcagaaggtgaacaatgaaggagagggggaccccttctatgaggtgctgggcctggtgaccctggaggatgtgattgaggagatcatcaagtctgagatcctggatgaaagtgacatgtacacagacaacagaagcaggaagagggtgtctgagaagaacaagagggacttcagcgccttcaaggatgctgacaatgagctgaaggtgaagatcagcccccagctgctgctggccgcccaccgcttcctggccacagaggtgtcccagttcagccccagcctcatcagcgagaagatcctgctgcggctgctgaagtacccagatgtgatccaggagctgaagtttgatgagcacaacaagtactatgcccggcactacctgtacaccaggaacaagccagctgactacttcatcctgatcctgcagggcaaggtggaggtggaggccggcaaggagaacatgaagtttgaaacaggagccttctcctactacggcaccatggccctgacctctgtgcccagcgacaggagccctgcccaccccacccccctgagccgcagcgccagcctgagctacccagacagaacagatgtgtccacagctgccaccctggccggcagcagcaaccagtttggcagctctgtgctgggccagtacatcagtgacttctctgtgcgggccctggtggacctgcagtacatcaagatcacccggcagcagtaccagaatggcctgctggccagcaggatggagaacagcccccagttccccattgatggctgcaccacccacatggagaacctggccgagaagtctgagctgcctgtggtggatgagaccaccaccctgctgaatgaaagaaacagcctgctgcacaaggccagccatgaaaatgccatctag

SEQ ID NO: 148828 - DNA, 792 bp, synthetic construct
  misc_feature 1..792: note = Description of Artificial Sequence: Synthetic coding sequence
  source 1..792: mol_type = other DNA
atgtacacagacaacagaagcaggaagagggtgtctgagaagaacaagagggacttcagcgccttcaaggatgctgacaatgagctgaaggtgaagatcagcccccagctgctgctggccgcccaccgcttcctggccacagaggtgtcccagttcagccccagcctcatcagcgagaagatcctgctgcggctgctgaagtacccagatgtgatccaggagctgaagtttgatgagcacaacaagtactatgcccggcactacctgtacaccaggaacaagccagctgactacttcatcctgatcctgcagggcaaggtggaggtggaggccggcaaggagaacatgaagtttgagaccggggccttctcctactacggcaccatggccctgacctctgtgcccagcgacaggagccctgcccaccccacccccctgagccgcagcgccagcctgagctacccagacagaacagatgtgtccacagctgccaccctggccggcagcagcaaccagtttggcagctctgtgctgggccagtacatcagtgacttctctgtgcgggccctggtggacctgcagtacatcaagccccagagctggccctgcttcagcaggcctggggacagagtgtgcctgcctgccccacccagcatgaacagcagcctgccccacgccgaccacagcgctgctgtgcctgagagagctgctggcttcagccatggagagcagcccagcgtgagccaccggcgggtgcaccacccccacggggagctgggccgggaggtgtag

SEQ ID NO: 148829 - DNA, 2193 bp, synthetic construct
  misc_feature 1..2193: note = Description of Artificial Sequence: Synthetic coding sequence
  source 1..2193: mol_type = other DNA
atggccagcggccgcggggccagcagccgctggttcttcacccgggagcagctggagaacacccccagccgccgctgtggggtggaggccgacaaggagctgagctgccggcagcaggccgccaacctgatccaggagatgggccagaggctgaatgtgtcccagctgaccatcaacacagccatcgtgtacatgcaccgcttctacatgcaccacagcttcaccaagttcaacaagaacatcatcagcagcacagccctcttcctggccgccaaggtggaggagcaggccaggaagctggagcacgtgatcaaggtggcccacgcctgcctgcaccccctggagcccctgctggacaccaagtgtgatgcctacctgcagcagacccaggagctggtgatcctggagaccatcatgctgcagaccctgggctttgagatcaccatcgagcacccccacacagatgtggtgaagtgcacccagctggtgcgggccagcaaggacctggcccagaccagctacttcatggccaccaacagcctgcacctgaccaccttctgcctgcagtacaagcccaccgtgattgcctgtgtgtgcatccacctggcctgcaagtggagcaactgggagatccctgtgtccacagatggcaagcactggtgggagtatgtggaccccaccgtgaccctggagctgctggatgagctgacccatgagttcctgcagatcctggagaagacccccaaccggctgaagaagatccggaactggagggccaaccaggccgccaggaagcccaaggtggatggccaggtgtctgagacccccctgctgggcagcagcctggtgcagaacagcatcctggtggacagcgtgactggagtgcccaccaaccccagcttccagaagcccagcaccagcgccttccctgcccctgtgcccctgaacagcggcaacatctctgtgcaggacagccacaccagtgacaacctgtccatgctggccaccggcatgcccagcaccagctatggcctgagcagccaccaggagtggccccagcaccaggacagcgccaggacagagcagctgtacagccagaagcaggagaccagcctgagcggcagccagtacaacatcaacttccagcagggccccagcatcagcctgcacagcggcctgcaccacaggccagacaagatcagtgaccacagctctgtgaagcaggagtacacccacaaggccggcagcagcaagcaccacggccccatcagcaccaccccaggcatcatcccccagaagatgagcctggacaagtaccgggagaagaggaagctggagaccctggacctggatgtgcgggaccactacatcgccgcccaggtggagcagcagcacaagcagggccagagccaggccgccagcagcagctctgtgaccagccccatcaagatgaagatccccatcgccaacacagagaagtacatggctgacaagaaggagaagagcggcagcctgaagctgcgcatccccatccccccaacagacaagagcgccagcaaggaggagctgaagatgaagatcaaggtgagcagcagcgagcggcacagcagcagtgatgagggcagcggcaagagcaagcacagcagcccccacatcagccgggaccacaaggagaagcacaaggagcaccccagcagccgccaccacaccagcagccacaagcacagccacagccacagcggcagcagcagcggcggcagcaagcacagcgcagatggcatccccccaacagtgctgcggagccctgtgggcctgagcagtgatggcatcagcagcagcagcagcagcagcaggaagaggctgcacgtgaatgatgccagccacaaccaccacagcaagatgagcaagagcagcaagagcagcggcagcagcagcagcagcagcagctctgtgaagcagtacatcagcagccacaacagcgtcttcaaccaccccctgcccccacctcctcctgtgacctaccaggtgggctacggccacctgagcaccctggtgaagctggacaagaagcctgtggagaccaatggaccagatgccaaccacgagtacagcaccagcagccagcacatggactacaaggacacctttgacatgctggacagcctgctgagcgcccagggcatgaacatgtag

SEQ ID NO: 148830 - DNA, 1992 bp, synthetic construct
  misc_feature 1..1992: note = Description of Artificial Sequence: Synthetic coding sequence
  source 1..1992: mol_type = other DNA
atggccagcggccgcggggccagcagccgctggttcttcacccgggagcagctggagaacacccccagccgccgctgtggggtggaggccgacaaggagctgagctgccggcagcaggccgccaacctgatccaggagatgggccagaggctgaatgtgtcccagctgaccatcaacacagccatcgtgtacatgcaccgcttctacatgcaccacagcttcaccaagttcaacaagaacatcatcagcagcacagccctcttcctggccgccaaggtggaggagcaggccaggaagctggagcacgtgatcaaggtggcccacgcctgcctgcaccccctggagcccctgctggacaccaagtgtgatgcctacctgcagcagacccaggagctggtgatcctggagaccatcatgctgcagaccctgggctttgagatcaccatcgagcacccccacacagatgtggtgaagtgcacccagctggtgcgggccagcaaggacctggcccagaccagctacttcatggccaccaacagcctgcacctgaccaccttctgcctgcagtacaagcccaccgtgattgcctgtgtgtgcatccacctggcctgcaagtggagcaactgggagatccctgtgtccacagatggcaagcactggtgggagtatgtggaccccaccgtgaccctggagctgctggatgagctgacccatgagttcctgcagatcctggagaagacccccaaccggctgaagaagatccggaactggagggccaaccaggccgccaggaagcccaaggtggatggccaggtgtctgagacccccctgctgggcagcagcctggtgcagaacagcatcctggtggacagcgtgactggagtgcccaccaaccccagcttccagaagcccagcaccagcgccttccctgcccctgtgcccctgaacagcggcaacatctctgtgcaggacagccacaccagtgacaacctgtccatgctggccaccggcatgcccagcaccagctatggcctgagcagccaccaggagtggccccagcaccaggacagcgccaggacagagcagctgtacagccagaagcaggagaccagcctgagcggcagccagtacaacatcaacttccagcagggccccagcatcagcctgcacagcggcctgcaccacaggccagacaagatcagtgaccacagctctgtgaagcaggagtacacccacaaggccggcagcagcaagcaccacggccccatcagcaccaccccaggcatcatcccccagaagatgagcctggacaagtaccgggagaagaggaagctggagaccctggacctggatgtgcgggaccactacatcgccgcccaggtggagcagcagcacaagcagggccagagccaggccgccagcagcagctctgtgaccagccccatcaagatgaagatccccatcgccaacacagagaagtacatggctgacaagaaggagaagagcggcagcctgaagctgcgcatccccatccccccaacagacaagagcgccagcaaggaggagctgaagatgaagatcaaggtgagcagcagcgagcggcacagcagcagtgatgagggcagcggcaagagcaagcacagcagcccccacatcagccgggaccacaaggagaagcacaaggagcaccccagcagccgccaccacaccagcagccacaagcacagccacagccacagcggcagcagcagcggcggcagcaagcacagcgcagatggcatccccccaacagtgctgcggagccctgtgggcctgagcagtgatggcatcagcagcagcagcagcagcagcaggaagaggctgcacgtgaatgatgccagccacaaccaccacagcaagatgagcaagagcagcaagagcagcggcggcctgcggaccagccagcacccccgggagaccggccaggaggccagcggggaccagaggagctag

SEQ ID NO: 148831 - DNA, 1467 bp, synthetic construct
  misc_feature 1..1467: note = Description of Artificial Sequence: Synthetic coding sequence
  source 1..1467: mol_type = other DNA
atggccaccaacagcctgcacctgaccaccttctgcctgcagtacaagcccaccgtcatcgcctgtgtgtgcatccacctggcctgcaagtggagcaactgggagatccctgtgtccacagatggcaagcactggtgggagtatgtggaccccaccgtgaccctggagctgctggatgagctgacccatgagttcctgcagatcctggagaagacccccaaccggctgaagaagatccggaactggagggccaaccaggccgccaggaagcccaaggtggatggccaggtgtctgagacccccctgctgggcagcagcctggtgcagaacagcatcctggtggacagcgtgactggagtgcccaccaaccccagcttccagaagcccagcaccagcgccttccctgcccctgtgcccctgaacagcggcaacatctctgtgcaggacagccacaccagtgacaacctgtccatgctggccaccggcatgcccagcaccagctatggcctgagcagccaccaggagtggccccagcaccaggacagcgccaggacagagcagctgtacagccagaagcaggagaccagcctgagcggcagccagtacaacatcaacttccagcagggccccagcatcagcctgcacagcggcctgcaccacaggccagacaagatcagtgaccacagctctgtgaagcaggagtacacccacaaggccggcagcagcaagcaccacggccccatcagcaccaccccaggcatcatcccccagaagatgagcctggacaagtaccgggagaagaggaagctggagaccctggacctggatgtgcgggaccactacatcgccgcccaggtggagcagcagcacaagcagggccagagccaggccgccagcagcagctctgtgaccagccccatcaagatgaagatccccatcgccaacacagagaagtacatggctgacaagaaggagaagagcggcagcctgaagctgcgcatccccatccccccaacagacaagagcgccagcaaggaggagctgaagatgaagatcaaggtgagcagcagcgagcggcacagcagcagtgatgagggcagcggcaagagcaagcacagcagcccccacatcagccgggaccacaaggagaagcacaaggagcaccccagcagccgccaccacaccagcagccacaagcacagccacagccacagcggcagcagcagcggcggcagcaagcacagcgcagatggcatcccccccaccgtgctgcggagccctgtgggcctgagcagtgatggcatcagcagcagcagcagcagcagcaggaagaggctgcacgtgaatgatgccagccacaaccaccacagcaagatgagcaagagcagcaagagcagcggcggcctgcggaccagccagcacccccgggagaccggccaggaggccagcggggaccagaggagctag

SEQ ID NO: 148832 - DNA, 864 bp, synthetic construct
  misc_feature 1..864: note = Description of Artificial Sequence: Synthetic coding sequence
  source 1..864: mol_type = other DNA
atggagttcaaccccagcgaccacccccgggccagcaccatcttcctgagcaagagccagacagatgtgcgggagaagaggaagagcctcttcatcaaccaccaccccccaggccagatcgccaggaagtacagcagctgcagcaccatcttcctggatgacagcacagtgtcccagcccaacctgaagtacaccatcaagtgtgtggccctggccatctactaccacatcaagaacagagatcctgatggccgcatgctgctggacatctttgatgagaacctgcaccccctgagcaagtctgaggtgcccccagactatgacaagcacaaccctgagcagaagcagatctacagatttgtgaggaccctcttctctgctgcccagctgacagcagaatgtgccatcgtgaccctggtgtacctggagcggctgctgacctatgcagaaattgacatctgcccagccaactggaagagaattgtgctgggcgccatcctgctggccagcaaggtgtgggatgaccaggccgtgtggaatgtggactactgccagatcctgaaggacatcaccgtggaggacatgaatgagctggagcggcagttcctggagctgctgcagttcaacatcaacgtgcccagctctgtgtatgccaagtactactttgacctgcggagcctggccgaggccaacaacctgtccttccccctggagcccctgagccgggagcgggcccacaagctggaggccatcagccggctgtgtgaggacaagtacaaggacctgcggcgcagcgccaggaagaggtctgccagcgctgacaacctgaccctgccccgctggagccctgccatcatctcctag

SEQ ID NO: 148833 - DNA, 951 bp, synthetic construct
  misc_feature 1..951: note = Description of Artificial Sequence: Synthetic coding sequence
  source 1..951: mol_type = other DNA
atgggcaacaccaccagctgctgcgtgagcagcagccccaagctgcggagaaatgcccacagccggctggagagctacagaccagacacagacctgagccgggaggacaccggctgcaacctgcagcacatcagtgaccgggagaacattgatgtgcgggagaagaggaagagcctcttcatcaaccaccaccccccaggccagatcgccaggaagtacagcagctgcagcaccatcttcctggatgacagcacagtgtcccagcccaacctgaagtacaccatcaagtgtgtggccctggccatctactaccacatcaagaacagagatcctgatggccgcatgctgctggacatctttgatgagaacctgcaccccctgagcaagtctgaggtgcccccagactatgacaagcacaaccctgagcagaagcagatctacagatttgtgaggaccctcttctctgctgcccagctgacagcagaatgtgccatcgtgaccctggtgtacctggagcggctgctgacctacgccgagattgacatctgcccagccaactggaagagaattgtgctgggcgccatcctgctggccagcaaggtgtgggatgaccaggccgtgtggaatgtggactactgccagatcctgaaggacatcaccgtggaggacatgaatgagctggagcggcagttcctggagctgctgcagttcaacatcaacgtgcccagctctgtgtatgccaagtactactttgacctgcggagcctggccgaggccaacaacctgtccttccccctggagcccctgagccgggagcgggcccacaagctggaggccatcagccggctgtgtgaggacaagtacaaggacctgcggcgcagcgccaggaagaggtctgccagcgctgacaacctgaccctgccccgctggagccctgccatcatctcctag

SEQ ID NO: 148834 - DNA, 1026 bp, synthetic construct
  misc_feature 1..1026: note = Description of Artificial Sequence: Synthetic coding sequence
  source 1..1026: mol_type = other DNA
atgggcaacaccaccagctgctgcgtgagcagcagccccaagctgcggagaaatgcccacagccggctggagagctacagaccagacacagacctgagccgggaggacaccggctgcaacctgcagcacatcagtgaccgggagaacattgatgacctgaacatggagttcaaccccagcgaccacccccgggccagcaccatcttcctgagcaagagccagacagatgtgcgggagaagaggaagagcctcttcatcaaccaccaccccccaggccagatcgccaggaagtacagcagctgcagcaccatcttcctggatgacagcacagtgtcccagcccaacctgaagtacaccatcaagtgtgtggccctggccatctactaccacatcaagaacagagatcctgatggccgcatgctgctggacatctttgatgagaacctgcaccccctgagcaagtctgaggtgcccccagactatgacaagcacaaccctgagcagaagcagatctacagatttgtgaggaccctcttctctgctgcccagctgacagcagaatgtgccatcgtgaccctggtgtacctggagcggctgctgacctatgcagaaattgacatctgcccagccaactggaagagaattgtgctgggcgccatcctgctggccagcaaggtgtgggatgaccaggccgtgtggaatgtggactactgccagatcctgaaggacatcaccgtggaggacatgaatgagctggagcggcagttcctggagctgctgcagttcaacatcaacgtgcccagctctgtgtatgccaagtactactttgacctgcggagcctggccgaggccaacaacctgtccttccccctggagcccctgagccgggagcgggcccacaagctggaggccatcagccggctgtgtgaggacaagtacaaggacctgcggcgcagcgccaggaagaggtctgccagcgctgacaacctgaccctgccccgctggagccctgccatcatctcctag

SEQ ID NO: 148835 - DNA, 864 bp, synthetic construct; identical to SEQ ID NO: 148832
  misc_feature 1..864: note = Description of Artificial Sequence: Synthetic coding sequence
  source 1..864: mol_type = other DNA

SEQ ID NO: 148836 - DNA, 627 bp, synthetic construct
  misc_feature 1..627: note = Description of Artificial Sequence: Synthetic coding sequence
  source 1..627: mol_type = other DNA
atggaccctgatggccgcatgctgctggacatctttgatgagaacctgcaccccctgagcaagtctgaggtgcccccagactatgacaagcacaaccctgagcagaagcagatctacagatttgtgaggaccctcttctctgctgcccagctgacagcagaatgtgccatcgtgaccctggtgtacctggagcggctgctgacctacgccgagattgacatctgcccagccaactggaagagaattgtgctgggcgccatcctgctggccagcaaggtgtgggatgaccaggccgtgtggaatgtggactactgccagatcctgaaggacatcaccgtggaggacatgaatgagctggagcggcagttcctggagctgctgcagttcaacatcaacgtgcccagctctgtgtatgccaagtactactttgacctgcggagcctggccgaggccaacaacctgtccttccccctggagcccctgagccgggagcgggcccacaagctggaggccatcagccggctgtgtgaggacaagtacaaggacctgcggcgcagcgccaggaagaggtctgccagcgctgacaacctgaccctgccccgctggagccctgccatcatctcctag

SEQ ID NO: 148837 - DNA, 1026 bp, synthetic construct; identical to SEQ ID NO: 148834
  misc_feature 1..1026: note = Description of Artificial Sequence: Synthetic coding sequence
  source 1..1026: mol_type = other DNA

SEQ ID NO: 148838 - DNA, 942 bp, synthetic construct
  misc_feature 1..942: note = Description of Artificial Sequence: Synthetic coding sequence
  source 1..942: mol_type = other DNA
atggagcccatgtaccaggaccgggcccgggacacccagacagatgaaattgtggccctgaagaaggtgaggatggacaaggagaaggatggcatccccatcagcagcctgcgggagatcaccctgctgctgcggctgcggcaccccaacatcgtggagctgaaggaggtggtggtgggcaaccacctggagagcatcttcctggtgatgggctactgtgagcaggacctggccagcctgctggagaacatgcccacccccttcagcgaggcccaggtgaagtgcatcgtgctgcaggtgctgcggggcctgcagtacctgcacaggaacttcatcatccaccgggacctgaaggtgagcaacctgctgatgacagacaagggctgtgtgaagacagctgactttggcctggcccgggcctatggagtgcctgtgaagcccatgacccccaaggtggtgaccctgtggtaccgggcccctgagctgctgctgggcaccaccacccagaccaccagcattgacatgtgggccgtgggctgcatcctggccgagctgctggcccaccggcccctgctgcccggcaccagcgagatccaccagattgacctgattgtgcagctgctgggcacccccagcgagaacatctggccaggcttcagcaagctgcccctggtgggccagtacagcctgaggaagcagccctacaacaacctgaagcacaagttcccctggctgtctgaggccggcctgcggctgctgcacttcctgttcatgtatgaccccaagaagagggccacagctggggactgcctggagagcagctacttcaaggagaagcccctgccctgtgagcctgagctgatgcccaccttcccccaccacaggaacaagagagctgccccagccaccagcgagggccagagcaagcgctgcaagccctag

SEQ ID NO: 148839 - DNA, 1083 bp, synthetic construct
  misc_feature 1..1083: note = Description of Artificial Sequence: Synthetic coding sequence
  source 1..1083: mol_type = other DNA
atggccgagccagacctggagtgtgagcagatccggctgaagtgcatcaggaaggagggcttcttcaccgtgcccccagagcaccggctgggccgctgccgctctgtgaaggagtttgagaagctgaacagaattggagagggcacctacggcatcgtgtaccgggcccgggacacccagacagatgagatcgtggccctgaagaaggtgaggatggacaaggagaaggatggcatccccatcagcagcctgcgggagatcaccctgctgctgcggctgcggcaccccaacatcgtggagctgaaggaggtggtggtgggcaaccacctggagagcatcttcctggtgatgggctactgtgagcaggacctggccagcctgctggagaacatgcccacccccttcagcgaggcccaggtgaagtgcatcgtgctgcaggtgctgcggggcctgcagtacctgcacaggaacttcatcatccaccgggacctgaaggtgagcaacctgctgatgacagacaagggctgtgtgaagacagctgactttggcctggcccgggcctacggcgtgcctgtgaagcccatgacccccaaggtggtgaccctgtggtaccgggcccctgagctgctgctgggcaccaccacccagaccaccagcattgacatgtgggccgtgggctgcatcctggccgagctgctggcccaccggcccctgctgcccggcaccagcgagatccaccagattgacctgattgtgcagctgctgggcaccccatctgagaacatctggccaggcttcagcaagctgcccctggtgggccagtacagcctgaggaagcagccctacaacaacctgaagcacaagttcccctggctgtctgaggccggcctgcggctgctgcacttcctgttcatgtatgaccccaagaagagggccacagctggggactgcctggagagcagctacttcaaggagaagcccctgccctgtgagcctgagctgatgcccaccttcccccaccacaggaacaagagagctgccccagccaccagcgagggccagagcaagcgctgcaagccctag

SEQ ID NO: 148840 - DNA, 819 bp, synthetic construct
  misc_feature 1..819: note = Description of Artificial Sequence: Synthetic coding sequence
  source 1..819: mol_type = other DNA
atggacaaggagaaggatggcatccccatcagcagcctgcgggagatcaccctgctgctgcggctgcggcaccccaacatcgtggagctgaaggaggtggtggtgggcaaccacctggagagcatcttcctggtgatgggctactgtgagcaggacctggccagcctgctggagaacatgcccacccccttcagcgaggcccaggtgaagtgcatcgtgctgcaggtgctgcggggcctgcagtacctgcacaggaacttcatcatccaccgggacctgaaggtgagcaacctgctgatgacagacaagggctgtgtgaagacagctgactttggcctggcccgggcctatggagtgcctgtgaagcccatgacccccaaggtggtgaccctgtggtaccgggcccctgagctgctgctgggcaccaccacccagaccaccagcattgacatgtgggccgtgggctgcatcctggccgagctgctggcccaccggcccctgctgcccggcaccagcgagatccaccagattgacctgattgtgcagctgctgggcacccccagcgagaacatctggccaggcttcagcaagctgcccctggtgggccagtacagcctgaggaagcagccctacaacaacctgaagcacaagttcccctggctgtctgaggccggcctgcggctgctgcacttcctgttcatgtatgaccccaagaagagggccacagctggggactgcctggagagcagctacttcaaggagaagcccctgcggctgcccatcagcggcgtgtgtgagggctgccgggagcctggatag

SEQ ID NO: 148841 - DNA, 504 bp, synthetic construct
  misc_feature 1..504: note = Description of Artificial Sequence: Synthetic coding sequence
  source 1..504: mol_type = other DNA
atgggcaagacagaggagaagggaaatggaaaaggagccttccaggagaggaagggccccctgggcgctgtgaggaaggaggccggggccggggcccaggatgctggagctgctgagggcgctgctgtgaagaagatgaccttcagcgagcacccctacaacaacctgaggaagagatttggagccctgctgagtgaccagggctttgacctgatgaacaagttcctgacctacttccctggccgccgcatctctgcagaagatggcctgaagcatgagtacttccgggagacccccctgcccatcgaccccagcatgttccccacctggccagccaagtctgagcagcagagggtgaagaggggcaccagccccaggcctcctgagggcggcctgggctacagccagctgggagatgatgacctgaaggagaccggcttccacctgaccaccaccaaccagggcgccagcgctgctggccctggcttcagcctgaagttctag

SEQ ID NO: 148842 - DNA, 2241 bp, synthetic construct
  misc_feature 1..2241: note = Description of Artificial Sequence: Synthetic coding sequence
  source 1..2241: mol_type = other DNA
atgagccagagtgatgaccgggacagcaagagggacagcctggaggagggggagctgcgggaccactgcatggagatcaccatccggaacagcccctaccgccgggaggacagcatggaggacagaggagaagaagatgacagcctggccatcaagccaccccagcagatgagcaggaaggagaaggtgcaccacaggaaggatgagaagaggaaggagaagtgccgccaccacagccacagcgctgagggcggcaagcacgcccgggtgaaggagcgggagcatgaaagaaggaagaggcaccgggaggagcaggacaaggcccggcgggagtgggagcggcagaagagaagagagatggcccgggagcacagccggcgggagcgggaccggctggagcagctggagaggaagcgggagcgggagaggaagatgagggagcagcagaaggagcagcgggagcagaaggagcgggagcggcgggcagaggagaggaggaaggagcgggaggcccggcgggaggtgtctgcccaccacaggaccatgagggaggactacagcgacaaggtgaaggccagccactggagccgcagccccccccggcccccccgggagagatttgagctgggagatggcaggaagcctgtgaaggaggagaagatggaggagcgggacctgctgagtgacctgcaggacatcagtgacagcgagaggaagaccagcagcgctgagagcagcagcgctgagagcggcagcggcagcgaggaggaggaggaggaggaggaggaggaggaggaggagggcagcaccagcgaggagagcgaggaggaggaggaggaggaggaggaggaggaggaggagaccggcagcaacagcgaggaggccagcgagcagagcgctgaggaggtgtctgaggaggagatgtctgaagatgaggagagagaaaatgaaaaccacctgctggtggtgcctgagagcagatttgaccgggacagcggggagagcgaggaggccgaggaggaggtgggggagggcaccccccagagcagcgccctgacagaaggagactatgtgcctgacagccctgccctgctgcccatcgagctgaagcaggagctgcccaagtacctgcctgccctgcagggctgccgctctgtggaggagttccagtgcctgaacagaattgaggagggcacctacggcgtggtgtaccgggccaaggacaagaagacagatgagatcgtggccctgaagaggctgaagatggagaaggagaaggagggcttccccatcaccagcctgcgggagatcaacaccatcctgaaggcccagcaccccaacatcgtgacagtgcgggagatcgtggtgggcagcaacatggacaagatctacatcgtgatgaactacgtggagcatgacctgaagagcctgatggagaccatgaagcagcccttcctgcctggagaggtgaagaccctgatgatccagctgctgcggggcgtgaagcacctgcatgacaactggatcctgcaccgggacctgaagaccagcaacctgctgctgagccacgccggcatcctgaaggtgggggactttggcctggcccgggagtatggcagccccctgaaggcctacacccctgtggtggtgacccagtggtaccgggcccctgagctgctgctgggcgccaaggagtacagcacagctgtggacatgtggagcgtgggctgcatctttggagagctgctgacccagaagcccctcttccctggcaacagcgagattgaccagatcaacaaggtgttcaaggagctgggcaccccatctgagaagatctggccaggctacagcgagctgcctgtggtgaagaagatgaccttcagcgagcacccctacaacaacctgaggaagagatttggagccctgctgagtgaccagggctttgacctgatgaacaagttcctgacctacttccctggaagacgcatctctgcagaagatggcctgaagcatgagtacttccgggagacccccctgcccatcgaccccagcatgttccccacctggccagccaagtctgagcagcagagggtgaagaggggcaccagcccccggcccccagagggcggcctgggctacagccagctgggagatgatgacctgaaggagaccggcttccacctgaccaccaccaaccagggcgccagcgctgctggccctggcttcagcctgaagttctag

SEQ ID NO: 148843 - DNA, 2340 bp, synthetic construct
  misc_feature 1..2340: note = Description of Artificial Sequence: Synthetic coding sequence
  source 1..2340: mol_type = other DNA
atgggagatgagaaggacagctggaaggtgaagaccctggatgagatcctgcaggagaagaagaggaggaaggagcaggaggagaaggccgagatcaagaggctgaagaacagtgatgaccgggacagcaagagggacagcctggaggagggggagctgcgggaccactgcatggagatcaccatccggaacagcccctaccgccgggaggacagcatggaggacagaggagaagaagatgacagcctggccatcaagccaccccagcagatgagcaggaaggagaaggtgcaccacaggaaggatgagaagaggaaggagaagtggaagcacgcccgggtgaaggagcgggagcatgaaagaaggaagaggcaccgggaggagcaggacaaggcccggcgggagtgggagcggcagaagagaagagagatggcccgggagcacagccggcgggagagaggaaatgatggagtgtgcctcttccgggaccggctggagcagctggagaggaagcgggagcgggagaggaagatgagggagcagcagaaggagcagcgggagcagaaggagcgggagaggagagctgaggagaggaggaaggagcgggaggcccggcgggaggtgtctgcccaccacaggaccatgagggaggactacagcgacaaggtgaaggccagccactggagccgcagcccccccaggcctccccgggagagatttgagctgggagatggcaggaagcctgtgaaggaggagaagatggaggagcgggacctgctgagtgacctgcaggacatcagtgacagcgagaggaagaccagcagcgctgagagcagcagcgctgagagcggcagcggcagcgaggaggaggaggaggaggaggaggaggaggaggaggagggcagcaccagcgaggagagcgaggaggaggaggaggaggaggaggaggaggaggaggagaccggcagcaacagcgaggaggccagcgagcagagcgctgaggaggtgtctgaggaggagatgtctgaagatgaggagcgggagaatgaaaaccacctgctggtggtgcctgagagcagatttgaccgggacagcggggagagcgaggaggccgaggaggaggtgggggagggcaccccccagagcagcgccctgacagaaggagactatgtgcctgacagccctgccctgctgcccatcgagctgaagcaggagctgcccaagtacctgcctgccctgcagggctgccgctctgtggaggagttccagtgcctgaaccgcatcgaggagggcacctatggagtggtgtaccgggccaaggacaagaagacagatgaaattgtggccctgaagaggctgaagatggagaaggagaaggagggcttccccatcaccagcctgcgggagatcaacaccatcctgaaggcccagcaccccaacatcgtgacagtgcgggagatcgtggtgggcagcaacatggacaagatctacatcgtgatgaactacgtggagcatgacctgaagagcctgatggagaccatgaagcagcccttcctgcccggggaggtgaagaccctgatgatccagctgctgcggggcgtgaagcacctgcatgacaactggatcctgcaccgggacctgaagaccagcaacctgctgctgagccatgctggcatcctgaaggtgggggactttggcctggcccgggagtatggcagccccctgaaggcctacacccctgtggtggtgacccagtggtaccgggcccctgagctgctgctgggcgccaaggagtacagcacagctgtggacatgtggagcgtgggctgcatctttggagagctgctgacccagaagcccctcttccctggcaacagcgagattgaccagatcaacaaggtgttcaaggagctgggcacccccagcgagaagatctggccaggctacagcgagctgcctgtggtgaagaagatgaccttcagcgagcacccctacaacaacctgaggaagagatttggagccctgctgagtgaccagggctttgacctgatgaacaagttcctgacctacttccctggccgccgcatctctgcagaagatggcctgaagcatgagtacttccgggagacccccctgcccatcgaccccagcatgttccccacctggccagccaagtctgagcagcagagggtgaagaggggcaccagccccaggcctcctgagggcggcctgggctacagccagctgggagatgatgacctgaaggagaccggcttccacctgaccaccaccaaccagggcgccagcgctgctggccctggcttcagcctgaagttctag

SEQ ID NO: 148844 - DNA, 2313 bp, synthetic construct
  misc_feature 1..2313: note = Description of Artificial Sequence: Synthetic coding sequence
  source 1..2313: mol_type = other DNA
atgggagatgagaaggacagctggaaggtgaagaccctggatgagatcctgcaggagaagaagaggaggaaggagcaggaggagaaggccgagatcaagaggctgaagaacagtgatgaccgggacagcaagagggacagcctggaggagggggagctgcgggaccactgcatggagatcaccatccggaacagcccctaccgccgggaggacagcatggaggacagaggagaagaagatgacagcctggccatcaagccaccccagcagatgagcaggaaggagaaggtgcaccacaggaaggatgagaagaggaaggagaagtggaagcacgcccgggtgaaggagcgggagcatgaaagaaggaagaggcaccgggaggagcaggacaaggcccggcgggagtgggagcggcagaagagaagagagatggcccgggagcacagccggcgggagcgggaccggctggagcagctggagaggaagcgggagcgggagaggaagatgagggagcagcagaaggagcagcgggagcagaaggagcgggagcggcgggcagaggagaggaggaaggagcgggaggcccggcgggaggtgtctgcccaccacaggaccatgagggaggactacagcgacaaggtgaaggccagccactggagccgcagccccccccggcccccccgggagagatttgagctgggagatggcaggaagcctgtgaaggaggagaagatggaggagcgggacctgctgagtgacctgcaggacatcagtgacagcgagaggaagaccagcagcgctgagagcagcagcgctgagagcggcagcggcagcgaggaggaggaggaggaggaggaggaggaggaggaggagggcagcaccagcgaggagagcgaggaggaggaggaggaggaggaggaggaggaggaggagaccggcagcaacagcgaggaggccagcgagcagagcgctgaggaggtgtctgaggaggagatgtctgaagatgaggagagagaaaatgaaaaccacctgctggtggtgcctgagagcagatttgaccgggacagcggggagagcgaggaggccgaggaggaggtgggggagggcaccccccagagcagcgccctgacagaaggagactatgtgcctgacagccctgccctgctgcccatcgagctgaagcaggagctgcccaagtacctgcctgccctgcagggctgccgctctgtggaggagttccagtgcctgaacagaattgaggagggcacctacggcgtggtgtaccgggccaaggacaagaagacagatgagatcgtggccctgaagaggctgaagatggagaaggagaaggagggcttccccatcaccagcctgcgggagatcaacaccatcctgaaggcccagcaccccaacatcgtgacagtgcgggagatcgtggtgggcagcaacatggacaagatctacatcgtgatgaactacgtggagcatgacctgaagagcctgatggagaccatgaagcagcccttcctgcctggagaggtgaagaccctgatgatccagctgctgcggggcgtgaagcacctgcatgacaactggatcctgcaccgggacctgaagaccagcaacctgctgctgagccacgccggcatcctgaaggtgggggactttggcctggcccgggagtatggcagccccctgaaggcctacacccctgtggtggtgacccagtggtaccgggcccctgagctgctgctgggcgccaaggagtacagcacagctgtggacatgtggagcgtgggctgcatctttggagagctgctgacccagaagcccctcttccctggcaacagcgagattgaccagatcaacaaggtgttcaaggagctgggcaccccatctgagaagatctggccaggctacagcgagctgcctgtggtgaagaagatgaccttcagcgagcacccctacaacaacctgaggaagagatttggagccctgctgagtgaccagggctttgacctgatgaacaagttcctgacctacttccctggaagacgcatctctgcagaagatggcctgaagcatgagtacttccgggagacccccctgcccatcgaccccagcatgttccccacctggccagccaagtctgagcagcagagggtgaagaggggcaccagcccccggcccccagagggcggcctgggctacagccagctgggagatgatgacctgaaggagaccggcttccacctgaccaccaccaaccagggcgccagcgctgctggccctggcttcagcctgaagttctag

SEQ ID NO: 148845 - DNA, 2241 bp, synthetic construct; identical to SEQ ID NO: 148842
  misc_feature 1..2241: note = Description of Artificial Sequence: Synthetic coding sequence
  source 1..2241: mol_type = other DNA

SEQ ID NO: 148846 - DNA, 2352 bp, synthetic construct
  misc_feature 1..2352: note = Description of Artificial Sequence: Synthetic coding sequence
  source 1..2352: mol_type = other DNA
atgggagatgagaaggacagctggaaggtgaagaccctggatgagatcctgcaggagaagaagaggaggaaggagcaggaggagaaggccgagatcaagaggctgaagaacagtgatgaccgggacagcaagagggacagcctggaggagggggagctgcgggaccactgcatggagatcaccatccggaacagcccctaccgccgggaggacagcatggaggacagaggagaagaagatgacagcctggccatcaagccaccccagcagatgagcaggaaggagaaggtgcaccacaggaaggatgagaagaggaaggagaagtggaagcacgcccgggtgaaggagcgggagcatgaaagaaggaagaggcaccgggaggagcaggacaaggcccggcgggagtgggagcggcagaagagaagagagatggcccgggagcacagccggcgggagcgggaccggctggagcagctggagaggaagcgggagcgggagaggaagatgagggagcagcagaaggagcagcgggagcagaaggagcgggagcggcgggcagaggagaggaggaaggagcgggaggcccggcgggaggtgtctgcccaccacaggaccatgagggaggactacagcgacaaggtgaaggccagccactggagccgcagccccccccggcccccccgggagagatttgagctgggagatggcaggaagccaggagaggcccggcctgccccagcccagaagccagcccagctgaaggaggagaagatggaggagcgggacctgctgagtgacctgcaggacatcagtgacagcgagaggaagaccagcagcgctgagagcagcagcgctgagagcggcagcggcagcgaggaggaggaggaggaggaggaggaggaggaggaggagggcagcaccagcgaggagagcgaggaggaggaggaggaggaggaggaggaggaggaggagaccggcagcaacagcgaggaggccagcgagcagagcgctgaggaggtgtctgaggaggagatgtctgaagatgaggagcgggagaatgaaaaccacctgctggtggtgcctgagagcagatttgaccgggacagcggggagagcgaggaggccgaggaggaggtgggggagggcaccccccagagcagcgccctgacagaaggagactatgtgcctgacagccctgccctgctgcccatcgagctgaagcaggagctgcccaagtacctgcctgccctgcagggctgccgctctgtggaggagttccagtgcctgaaccgcatcgaggagggcacctatggagtggtgtaccgggccaaggacaagaagacagatgaaattgtggccctgaagaggctgaagatggagaaggagaaggagggcttccccatcaccagcctgcgggagatcaacaccatcctgaaggcccagcaccccaacatcgtgacagtgcgggagatcgtggtgggcagcaacatggacaagatctacatcgtgatgaactacgtggagcatgacctgaagagcctgatggagaccatgaagcagcccttcctgcccggggaggtgaagaccctgatgatccagctgctgcggggcgtgaagcacctgcatgacaactggatcctgcaccgggacctgaagaccagcaacctgctgctgagccatgctggcatcctgaaggtgggggactttggcctggcccgggagtatggcagccccctgaaggcctacacccctgtggtggtgacccagtggtaccgggcccctgagctgctgctgggcgccaaggagtacagcacagctgtggacatgtggagcgtgggctgcatctttggagagctgctgacccagaagcccctcttccctggcaacagcgagattgaccagatcaacaaggtgttcaaggagctgggcacccccagcgagaagatctggccaggctacagcgagctgcctgtggtgaagaagatgaccttcagcgagcacccctacaacaacctgaggaagagatttggagccctgctgagtgaccagggctttgacctgatgaacaagttcctgacctacttccctggccgccgcatctctgcagaagatggcctgaagcatgagtacttccgggagacccccctgcccatcgaccccagcatgttccccacctggccagccaagtctgagcagcagagggtgaagaggggcaccagccccaggcctcctgagggcggcctgggctacagccagctgggagatgatgacctgaaggagaccggcttccacctgaccaccaccaaccagggcgccagcgctgctggccctggcttcagcctgaagttctag

SEQ ID NO: 148847 - DNA, 699 bp, synthetic construct
  misc_feature 1..699: note = Description of Artificial Sequence: Synthetic coding sequence
  source 1..699: mol_type = other DNA
atgggagatgagaaggacagctggaaggtgaagaccctggatgagatcctgcaggagaagaagaggaggaaggagcaggaggagaaggccgagatcaagaggctgaagaacagtgatgaccgggacagcaagagggacagcctggaggagggggagctgcgggaccactgcatggagatcaccatccggaacagcccctaccgccgggaggacagcatggaggacagaggagaagaagatgacagcctggccatcaagccaccccagcagatgagcaggaaggagaaggtgcaccacaggaaggatgagaagaggaaggagaagtggaagcacgcccgggtgaaggagcgggagcatgaaagaaggaagaggcaccgggaggagcaggacaaggcccggcgggagtgggagcggcagaagagaagagagatggcccgggagcacagccggcgggagagcgtgtgcaccagccccaatgatgagcggggcctgcagaggcagagcgagagccagcccctggagagccagcctgccagcgctgctgctggagctgtgcgggtgggcagaagacctgaggccagcaagaggcgggagaatggaaggaagggccctgctgtgcggctgaccggccaccagaggcagcgggaggaggaccagctgggccgggtgctggtgtctggcatccggctgcgcttctag

SEQ ID NO: 148848 - DNA, 2241 bp, synthetic construct; identical to SEQ ID NO: 148842
  misc_feature 1..2241: note = Description of Artificial Sequence: Synthetic coding sequence
  source 1..2241: mol_type = other DNA

SEQ ID NO: 148849 - DNA, 114 bp, synthetic construct
  misc_feature 1..114: note = Description of Artificial Sequence: Synthetic coding sequence
  source 1..114: mol_type = other DNA
atgggagatgagaaggacagctggaaggtgaagaccctggatgagatcctgcaggagaagaagaggaggaaggagcaggaggagaaggccgagatcaagaggctgaagaactag

SEQ ID NO: 148850 - DNA, 2343 bp, synthetic construct
  misc_feature 1..2343: note = Description of Artificial Sequence: Synthetic coding sequence
  source 1..2343: mol_type = other DNA
atgggagatgagaaggacagctggaaggtgaagaccctggatgagatcctgcaggagaagaagaggaggaaggagcaggaggagaaggccgagatcaagaggctgaagaacagtgatgaccgggacagcaagagggacagcctggaggagggggagctgcgggaccactgcatggagatcaccatccggaacagcccctaccgccgggaggacagcatggaggacagaggagaagaagatgacagcctggccatcaagccaccccagcagatgagcaggaaggagaaggtgcaccacaggaaggatgagaagaggaaggagaagtgccgccaccacagccacagcgctgagggcggcaagcacgcccgggtgaaggagcgggagcatgaaagaaggaagaggcaccgggaggagcaggacaaggcccggcgggagtgggagcggcagaagagaagagagatggcccgggagcacagccggcgggagcgggaccggctggagcagctggagaggaagcgggagcgggagaggaagatgagggagcagcagaaggagcagcgggagcagaaggagcgggagcggcgggcagaggagaggaggaaggagcgggaggcccggcgggaggtgtctgcccaccacaggaccatgagggaggactacagcgacaaggtgaaggccagccactggagccgcagccccccccggcccccccgggagagatttgagctgggagatggcaggaagcctgtgaaggaggagaagatggaggagcgggacctgctgagtgacctgcaggacatcagtgacagcgagaggaagaccagcagcgctgagagcagcagcgctgagagcggcagcggcagcgaggaggaggaggaggaggaggaggaggaggaggaggagggcagcaccagcgaggagagcgaggaggaggaggaggaggaggaggaggaggaggaggagaccggcagcaacagcgaggaggccagcgagcagagcgctgaggaggtgtctgaggaggagatgtctgaagatgaggagagagaaaatgaaaaccacctgctggtggtgcctgagagcagatttgaccgggacagcggggagagcgaggaggccgaggaggaggtgggggagggcaccccccagagcagcgccctgacagaaggagactatgtgcctgacagccctgccctgctgcccatcgagctgaagcaggagctgcccaagtacctgcctgccctgcagggctgccgctctgtggaggagttccagtgcctgaacagaattgaggagggcacctacggcgtggtgtaccgggccaaggacaagaagacagatgagatcgtggccctgaagaggctgaagatggagaaggagaaggagggcttccccatcaccagcctgcgggagatcaacaccatcctgaaggcccagcaccccaacatcgtgacagtgcgggagatcgtggtgggcagcaacatggacaagatctacatcgtgatgaactacgtggagcatgacctgaagagcctgatggagaccatgaagcagcccttcctgcctggagaggtgaagaccctgatgatccagctgctgcggggcgtgaagcacctgcatgacaactggatcctgcaccgggacctgaagaccagcaacctgctgctgagccacgccggcatcctgaaggtgggggactttggcctggcccgggagtatggcagccccctgaaggcctacacccctgtggtggtgacccagtggtaccgggcccctgagctgctgctgggcgccaaggagtacagcacagctgtggacatgtggagcgtgggctgcatctttggagagctgctgacccagaagcccctcttccctggcaacagcgagattgaccagatcaacaaggtgttcaaggagctgggcaccccatctgagaagatctggccaggctacagcgagctgcctgtggtgaagaagatgaccttcagcgagcacccctacaacaacctgaggaagagatttggagccctgctgagtgaccagggctttgacctgatgaacaagttcctgacctacttccctggaagacgcatctctgcagaagatggcctgaagcatgagtacttccgggagacccccctgcccatcgaccccagcatgttccccacctggccagccaagtctgagcagcagagggtgaagaggggcaccagcccccggcccccagagggcggcctgggctacagccagctgggagatgatgacctgaaggagaccggcttccacctgaccaccaccaaccagggcgccagcgctgctggccctggcttcagcctgaagttctag

SEQ ID NO: 148851 - DNA, 456 bp, synthetic construct
  misc_feature 1..456: note = Description of Artificial Sequence: Synthetic coding sequence
  source 1..456: mol_type = other DNA
atgggagatgagaaggacagctggaaggtgaagaccctggatgagatcctgcaggagaagaagaggaggaaggagcaggaggagaaggccgagatcaagaggctgaagaacagtgatgaccgggacagcaagagggacagcctggaggagggggagctgcgggaccactgcatggagatcaccatccggaacagcccctaccgccgggaggacagcatggaggacagaggagaagaagatgacagcctggccatcaagccaccccagcagatgagcaggaaggagaaggtgcaccacaggaaggatgagaagaggaaggagaagtggaagcacgcccgggtgaaggagcgggagcatgaaagaaggaagaggcaccgggaggagcaggacaaggcccggcgggagtgggagcggcagaagagaagagagatggcccgggagcacagcagaagatag

SEQ ID NO: 148852 - DNA, 1263 bp, synthetic construct
  misc_feature 1..1263: note = Description of Artificial Sequence: Synthetic coding sequence
  source 1..1263: mol_type = other DNA
atgggagatgagaaggacagctggaaggtgaagaccctggatgagatcctgcaggagaagaagaggaggaaggagcaggaggagaaggccgagatcaagaggctgaagaacagtgatgaccgggacagcaagagggacagcctggaggagggggagctgcgggaccactgcatggagatcaccatccggaacagcccctaccgccgggaggacagcatggaggacagaggagaagaagatgacagcctggccatcaagccaccccagcagatgagcaggaaggagaaggtgcaccacaggaaggatgagaagaggaaggagaagtgccgccaccacagccacagcgctgagggcggcaagcacgcccgggtgaaggagcgggagcatgaaagaaggaagaggcaccgggaggagcaggacaaggcccggcgggagtgggagcggcagaagagaagagagatggcccgggagcacagccggcgggagcgggaccggctggagcagctggagaggaagcgggagcgggagaggaagatgagggagcagcagaaggagcagcgggagcagaaggagcgggagcggcgggcagaggagaggaggaaggagcgggaggcccggcgggaggtgtctgcccaccacaggaccatgagggaggactacagcgacaaggtgaaggccagccactggagccgcagccccccccggcccccccgggagagatttgagctgggagatggcaggaagccaggagaggcccggcctgccccagcccagaagccagcccagctgaaggaggagaagatggaggagcgggacctgctgagtgacctgcaggacatcagtgacagcgagaggaagaccagcagcgctgagagcagcagcgctgagagcggcagcggcagcgaggaggaggaggaggaggaggaggaggaggaggaggagggcagcaccagcgaggagagcgaggaggaggaggaggaggaggaggaggaggaggaggagaccggcagcaacagcgaggaggccagcgagcagagcgctgaggaggtgtctgaggaggagatgtctgaagatgaggagcgggagaatgaaaaccacctgctggtggtgcctgagagcagatttgaccgggacagcggggagagcgaggaggccgaggaggaggtgggcctgcctgagcggcggggcgtgcctgtgcctgagcaggacagaggaggccacctgtggagcggcctgcagagcaagaggcaggagaacagatag

SEQ ID NO: 148853 - DNA, 1686 bp, synthetic construct
  misc_feature 1..1686: note = Description of Artificial Sequence: Synthetic coding sequence
  source 1..1686: mol_type = other DNA
atggccatcgccaccagcacccagctggcccgggccctgtatgacaacacagctgagagcccccaggagctgtccttcagaagaggagatgtgctgcgggtgctgcagcgggagggcgctgggggcctggatggctggtgcctgtgcagcctgcacggccagcagggcatcgtgcctgccaacagagtgaagctgctgcctgctggccctgcccccaagcccagcctgagccctgccagccctgcccagcccggcagcccctacccagccccagaccacagcaatgaagaccaggaggtgtatgtggtgcccccaccagcccggccctgccccaccagcggccccccagctggcccctgcccccccagcccagacctgatctacaagatcccccgggccagcggcacccagctggccgcccccagagatgccctggaggtgtatgatgtgcccccaacagccctgcgggtgcccagcagcggcccctatgactgcccagccagcttcagccaccccctgaccagggtggccccccagcccccaggagaagatgatgccccctatgatgtgcccctgacccccaagcccccagctgagctggagccagacctggagtgggagggcggccgggagcccggcccccccatctatgctgcccccagcaacctgaagagggccagcgccctgctgaacctgtatgaggcccctgaggagctgctggctgatggagagggcggcggcacagatgagggcatctatgatgtgcccctgctgggccctgaggccccacccagccctgagcccccaggggccctggccagccatgaccaggacaccctggcccagctgctggcccggagccccccaccaccccaccggccccggctgcccagcgctgagagcctgagccggcggcccctgcctgccctgcctgtgcctgaggcccccagccccagccctgtgcccagccctgcccctggcaggaagggcagcatccaggaccggcccctgcccccacctccaccccggctgcccggctatggaggccccaaggtggagggggaccctgagggccgggagatggaggatgatcctgctggccaccacaatgaatatgagggcatccccatggccgaggagtatgactatgtgcacctgaagggcatggacaaggcccagggcagccggcccccagaccaggcctgcacaggagaccctgagctgcctgagcggggcatgcctgccccccaggaggccctgagccctggagagcccctggtggtgtccactggagacctgcagctgctgtacttctacgccggccagtgccagagccactacagcgccctgcaggccgctgtggccgccctgatgagcagcacccaggccaaccagcccccccggctgtttgtgccccacagcaagagggtggtggtggccgcccaccggctggtgtttgtgggggacaccctgggccgcctggccgccagcgcccccctgcgggcccaggtgcgggctgctggaacagccctgggccaggccctgcgggccaccgtgctggccgtgaagggagctgccctgggctaccccagcagccctgccatccaggagatggtgcagtgtgtgacagagctggccggccaggccctgcagttcaccaccctgctgaccagcctggccccctag

SEQ ID NO: 148854 - DNA, 684 bp, synthetic construct
  misc_feature 1..684: note = Description of Artificial Sequence: Synthetic coding sequence
  source 1..684: mol_type = other DNA
atgaatggcaccatctatgccaatgaatgccagcagatccgccaccccaacagcaagaccctgggcaccgtgacccccaggaagcctgtgctgtctgtgtctgccaggaagatcaaggacaatgctgctgactggcacaacctgatcctgaagtgggagaccctgaatgatgctggcttcaccacagccaacaacatcgccaacctgaagatcagcctgctgaacaaggacaagattgagctggacagcagcagccctgccagcaaagaaaatgaggagaaggtgtgcctggagtacaatgaggagctggagaagctgtgtgaggagctgcaggccaccctggatggcctgaccaagatccaggtgaagatggagaagctgagcagcaccaccaagggcatctgtgagctggagaactaccactacggggaggagagcaagaggcctcctctcttccacacctggcccaccacccacttctatgaggtgagccacaagctgctggagatgtacaggaaggagctgctgctgaagaggacagtggccaaggagctggcccacactggagaccctgacctgaccctgagctacctgtccatgtggctgcaccagccctacgtggagagtgacagccggctgcacctggagagcatgctgctggagaccggccaccgggccctgtag

SEQ ID NO: 148855 - DNA, 357 bp, synthetic construct
  misc_feature 1..357: note = Description of Artificial Sequence: Synthetic coding sequence
  source 1..357: mol_type = other DNA
atggaggccaagaccctgggcaccgtgacccccaggaagcctgtgctgtctgtgtctgccaggaagatcaaggacaatgctgctgactggcacaacctgatcctgaagtgggagaccctgaatgatgctggcttcaccacagccaacaacatcgccaacctgaagatcagcctgctgaacaaggacaagattgagctggacagcagcagccctgccagcaaagaaaatgaggagaaggtgtgcctggagtacaatgaggagctggagaagctgtgtgaggagctgcaggccaccctggatggcctgatgaggttccgcatcagctcctggcgctgcaccggccgcagctgcagctag

SEQ ID NO: 148856 - DNA, 639 bp, synthetic construct
  misc_feature 1..639: note = Description of Artificial Sequence: Synthetic coding sequence
  source 1..639: mol_type = other DNA
atggaggccaagaccctgggcaccgtgacccccaggaagcctgtgctgtctgtgtctgccaggaagatcaaggacaatgctgctgactggcacaacctgatcctgaagtgggagaccctgaatgatgctggcttcaccacagccaacaacatcgccaacctgaagatcagcctgctgaacaaggacaagattgagctggacagcagcagccctgccagcaaagaaaatgaggagaaggtgtgcctggagtacaatgaggagctggagaagctgtgtgaggagctgcaggccaccctggatggcctgaccaagatccaggtgaagatggagaagctgagcagcaccaccaagggcatctgtgagctggagaactaccactatggagaggagagcaagaggcctcctctcttccacacctggcccaccacccacttctatgaggtgagccacaagctgctggagatgtacaggaaggagctgctgctgaagaggacagtggccaaggagctggcccacactggagaccctgacctgaccctgagctacctgtccatgtggctgcaccagccctacgtggagagtgacagccggctgcacctggagagcatgctgctggagaccggccaccgggccctgtag

SEQ ID NO: 148857 - DNA, 918 bp, synthetic construct
  misc_feature 1..918: note = Description of Artificial Sequence: Synthetic coding sequence
  source 1..918: mol_type = other DNA
atggacatgttccagaaggtggagaagatcggggagggcacctatggagtggtgtacaaggccaagaaccgggagaccggccagctggtggccctgaagaagatccggctggacctggagatggagggcgtgcccagcacagccatccgggagatcagcctgctgaaggagctgaagcaccccaacatcgtgcggctgctggatgtggtgcacaatgaaaggaagctgtacctggtgtttgagttcctgagccaggacctgaagaagtacatggacagcaccccaggcagcgagctgcccctgcacctgatcaagagctacctgttccagctgctgcagggcgtgtccttctgccacagccacagggtcatccaccgggacctgaagccccagaacctgctgatcaatgagctgggcgccatcaagctggccgactttggcctggcccgggccttcggcgtgcccctgcggacctacacccatgaggtggtgaccctgtggtaccgggcccctgagatcctgctgggcagcaagttctacaccacagctgtggacatctggagcatcggctgcatctttgctgagatggtgaccaggaaggccctcttccctggggacagcgagattgaccagctgttccgcatcttcaggatgctgggcaccccatctgaggacacctggccaggagtgacccagctgcctgactacaagggcagcttccccaagtggaccaggaagggcctggaggagatcgtgcccaacctggagcctgagggccgggacctgctgatgcagctgctgcagtatgaccccagccagaggatcacagccaagacagccctggcccacccctacttcagcagccctgagcccagccctgctgcccggcagtatgtgctgcagcgcttccgccactag

SEQ ID NO: 148858 - DNA, 918 bp, synthetic construct; identical to SEQ ID NO: 148857
  misc_feature 1..918: note = Description of Artificial Sequence: Synthetic coding sequence
  source 1..918: mol_type = other DNA

SEQ ID NO: 148859 - DNA, 879 bp, synthetic construct
  misc_feature 1..879: note = Description of Artificial Sequence: Synthetic coding sequence
  source 1..879: mol_type = other DNA
atgcagaagtatgagaagctggagaagatcggggagggcacctatggaacagtgttcaaggccaagaaccgggagacccatgaaattgtggccctgaagagggtgcggctggatgatgatgatgaaggagtgcccagcagcgccctgcgggagatctgcctgctgaaggagctgaagcacaagaacatcgtgcggctgcatgatgtgctgcacagcgacaagaagctgaccctggtgtttgagttctgtgaccaggacctgaagaagtactttgacagctgcaatggagacctggaccctgagatcgtgaagagcttcctgttccagctgctgaagggcctgggcttctgccacagcagaaatgtgctgcaccgggacctgaagccccagaacctgctgatcaacagaaatggagagctgaagctggccgactttggcctggcccgggccttcggcatccctgtgcgctgctacagcgctgaggtggtgaccctgtggtacagacctccagatgtgctgtttggagccaagctgtacagcaccagcattgacatgtggagcgctggctgcatctttgctgagctggccaatgccggccggcccctcttccctggaaatgatgtggatgaccagctgaagaggatcttccggctgctgggcacccccacagaggagcagtggcccagcatgaccaagctgcctgactacaagccctaccccatgtacccagccaccaccagcctggtgaatgtggtgcccaagctgaatgccaccggccgggacctgctgcagaacctgctgaagtgcaaccctgtgcagaggatctctgctgaggaggccctgcagcacccctacttcagtgacttctgccccccatag

SEQ ID NO: 148860 - DNA, 783 bp, synthetic construct
  misc_feature 1..783: note = Description of Artificial Sequence: Synthetic coding sequence
  source 1..783: mol_type = other DNA
atgcagaagtatgagaagctggagaagatcggggagggcacctatggaacagtgttcaaggccaagaaccgggagacccatgaaattgtggccctgaagagggtgcggctggatgatgatgatgaaggagtgcccagcagcgccctgcgggagatctgcctgctgaaggagctgaagcacaagaacatcgtgcggctgcatgatgtgctgcacagcgacaagaagctgaccctggtgtttgagttctgtgaccaggacctgaagaagtactttgacagctgcaatggagacctggaccctgagatcgtgaagaatggagagctgaagctggccgactttggcctggcccgggccttcggcatccctgtgcgctgctacagcgctgaggtggtgaccctgtggtacagacctccagatgtgctgtttggagccaagctgtacagcaccagcattgacatgtggagcgctggctgcatctttgctgagctggccaatgccggccggcccctcttccctggaaatgatgtggatgaccagctgaagaggatcttccggctgctgggcacccccacagaggagcagtggcccagcatgaccaagctgcctgactacaagccctaccccatgtacccagccaccaccagcctggtgaatgtggtgcccaagctgaatgccaccggccgggacctgctgcagaacctgctgaagtgcaaccctgtgcagaggatctctgctgaggaggccctgcagcacccctacttcagtgacttctgccccccatag

SEQ ID NO: 148861 - DNA, 1104 bp, synthetic construct
  misc_feature 1..1104: note = Description of Artificial Sequence: Synthetic coding sequence
  source 1..1104: mol_type = other DNA
atgggcaccgtgctgagcctgagccctgccagcagcgccaagggccggcggcctgggggcctgcctgaggagaagaagaaggcccctcctgctggagatgaggccctgggcggctatggagcccctcctgtgggcaagggcggcaaaggagagagccggctgaagaggcccagcgtgctgatcagcgccctgacctggaagaggctggtggccgccagcgccaagaagaagaagggcagcaagaaggtgacccccaagccagccagcacaggccctgaccccctggtgcagcagaggaaccgggagaacctgctgaggaagggccgggaccccccagatggcggcggcacagccaagcccctggccgtgcctgtgcccaccgtgcctgctgctgctgccacctgtgagcccccatctgggggcagcgctgctgcccagcccccaggcagcggcggcggcaagcccccacctcctcctcctccagccccccaggtggcccctcctgtgcctgggggcagccccaggagggtcatcgtgcaggccagcactggagagctgctgcgctgcctgggggactttgtgtgccgccgctgctaccgcctgaaggagctgagccctggagagctggtgggctggttccggggcgtggacaggagcctgctgctgcagggctggcaggaccaggccttcatcaccccagccaacctggtgtttgtgtacctgctgtgccgggagagcctgcggggagatgagctggccagcgctgctgagctgcaggccgccttcctgacctgcctgtacctggcctacagctacatgggaaatgagatctcctaccccctgaagcccttcctggtggagccagacaaggagcgcttctggcagcgctgcctgcggctcatccagaggctgagcccccagatgctgcggctgaatgctgacccccacttcttcacccaggtgttccaggacctgaagaatgaaggagaggccgccgccagcggcggcggcccccccagcggcggggccccagctgccagcagcgctgcccgggacagctgtgccgccggcaccaagcactggaccatgaacctggacagatag

SEQ ID NO: 148862 - DNA, 1779 bp, synthetic construct
  misc_feature 1..1779: note = Description of Artificial Sequence: Synthetic coding sequence
  source 1..1779: mol_type = other DNA
atggagatgtatgagaccctgggcaaggtgggggagggcagctatggaacagtgatgaagtgcaagcacaagaacacaggccagatcgtggccatcaagatcttctatgaaagacctgagcagagcgtgaacaagatcgccatgagggagatcaagttcctgaagcagttccaccacgagaacctggtgaacctgattgaggtgttccggcagaagaagaagatccacctggtgtttgagttcatcgaccacacagtgctggatgagctgcagcactactgccacggcctggagagcaagaggctgaggaagtacctgttccagatcctgcgggccatcgactacctgcacagcaacaacatcatccaccgggacatcaagccagagaacatcctggtgtcccagagcggcatcaccaagctgtgtgactttggatttgcccggaccctggccgcccctggggacatctacacagattatgtggccacccgctggtaccgggcccctgagctggtgctgaaggacaccagctatggcaagcctgtggacatctgggccctgggctgcatgatcatcgagatggccaccggcaacccctacctgcccagcagcagtgacctggacctgctgcacaagatcgtgctgaaggtgggcaacctgagcccccacctgcagaacatcttcagcaagagccccatctttgctggggtggtgctgccccaggtgcagcaccccaagaatgccaggaagaagtaccccaagctgaatggcctgctggccgacatcgtgcacgcctgcctgcagattgatcctgctgaccgcatcagcagcagtgacctgctgcaccacgagtacttcaccagagatggcttcatcgagaagttcatgcctgagctgaaggccaagctgctgcaggaggccaaggtgaacagcctcatcaagcccaaggagagcagcaaagaaaatgagctgaggaaggatgagaggaagacagtgtacaccaacaccctgctgagcagctctgtgctgggcaaggagattgagaaggagaagaagcccaaggagatcaaggtgcgggtcatcaaggtgaagggcggccgcggggacatcagcgagcccaagaagaaggagtatgagggcggcctgggccagcaggatgccaatgaaaatgtgcaccccatgagcccagacaccaagctggtgaccatcgagccccccaaccccatcaaccccagcaccaactgcaatggcctgaaggagaacccccactgcggcggctctgtgaccatgccacccatcaacctgaccaacagcaacctgatggccgccaacctgagcagcaacctcttccaccccagcgtgcggctgacagagcgggccaagaagaggaggaccagcagccagagcatcggccaggtgatgcccaacagccggcaggaggaccccggccccatccagagccagatggagaagggcatcttcaatgaaagaacaggccacagcgaccagatggccaatgaaaacaagaggaagctgaacttcagcagaagtgacaggaaggagttccacttccctgagctgcctgtgaccatccagagcaaggacaccaagggcatggaggtgaagcagatcaagatgctgaagcgggagagcaagaagacagagagcagcaagatccccaccctgctgaatgtggaccagaaccaggagaagcaggagggcggagatggccactgtgagggcaagaacctgaagaggaaccgcttcttcttctggtag

SEQ ID NO: 148863 - DNA, 1368 bp, synthetic construct
  misc_feature 1..1368: note = Description of Artificial Sequence: Synthetic coding sequence
  source 1..1368: mol_type = other DNA
atggagatgtatgagaccctgggcaaggtgggggagggcagctatggaacagtgatgaagtgcaagcacaagaacacaggccagatcgtggccatcaagatcttctatgaaagacctgagcagagcgtgaacaagatcgccatgagggagatcaagttcctgaagcagttccaccacgagaacctggtgaacctgattgaggtgttccggcagaagaagaagatccacctggtgtttgagttcatcgaccacacagtgctggatgagctgcagcactactgccacggcctggagagcaagaggctgaggaagtacctgttccagatcctgcgggccatcgactacctgcacagcaacaacatcatccaccgggacatcaagccagagaacatcctggtgtcccagagcggcatcaccaagctgtgtgactttggatttgcccggaccctggccgcccctggggacatctacacagattatgtggccacccgctggtaccgggcccctgagctggtgctgaaggacaccagctatggcaagcctgtggacatctgggccctgggctgcatgatcatcgagatggccaccggcaacccctacctgcccagcagcagtgacctggacctgctgcacaagatcgtgctgaaggtgggcaacctgagcccccacctgcagaacatcttcagcaagagccccatctttgctggggtggtgctgccccaggtgcagcaccccaagaatgccaggaagaagtaccccaagctgaatggcctgctggccgacatcgtgcacgcctgcctgcagattgatcctgctgaccgcatcagcagcagtgacctgctgcaccacgagtacttcaccagagatggcttcatcgagaagttcatgcctgagctgaaggccaagctgctgcaggaggccaaggtgaacagcctcatcaagcccaaggagagcagcaaagaaaatgagctgaggaaggatgagaggaagacagtgtacaccaacaccctgctgagcagctctgtgctgggcaaggagattgagaaggagaagaagcccaaggagatcaaggtgcgggtcatcaaggtgaagggcggccgcggggacatcagcgagcccaagaagaaggagtatgagggcggcctgggccagcaggatgccaatgaaaatgtgcaccccatgagcccagacaccaagctggtgaccatcgagccccccaaccccatcaaccccagcaccaactgcaatggcctgaaggagaacccccactgcggcggctctgtgaccatgccacccatcaacctgaccaacagcaacctgatggccgccaacctgagcagcaacctcttccaccccagcgtgaggtag

SEQ ID NO: 148864 - DNA, 1092 bp, synthetic construct
  misc_feature 1..1092: note = Description of Artificial Sequence: Synthetic coding sequence
  source 1..1092: mol_type = other DNA
atgcctgagctgaaggccaagctgctgcaggaggccaaggtgaacagcctcatcaagcccaaggagagcagcaaagaaaatgagctgaggaaggatgagaggaagacagtgtacaccaacaccctgctgagcagctctgtgctgggcaaggagattgagaaggagaagaagcccaaggagatcaaggtgcgggtcatcaaggtgaagggcggccgcggggacatcagcgagcccaagaagaaggagtatgaaggaggcctgggccagcaggatgccaatgaaaatgtgcaccccatgagcccagacaccaagctggtgaccatcgagccccccaaccccatcaaccccagcaccaactgcaatggcctgaaggagaacccccactgcggcggctctgtgaccatgccacccatcaacctgaccaacagcaacctgatggccgccaacctgagcagcaacctcttccaccccagcgtgcggctgacagagcgggccaagaagaggaggaccagcagccagagcatcggccaggtgatgcccaacagccggcaggaggaccccggccccatccagagccagatggagaagggcatcttcaatgaaagaacaggccacagcgaccagatggccaatgaaaacaagaggaagctgaacttcagcagaagtgacaggaaggagttccacttccctgagctgcctgtgaccatccagagcaaggacaccaagggcatggaggtgaagcagatcaagatgctgaagcgggagagcaagaagacagagagcagcaagatccccaccctgctgaatgtggaccagaaccaggagaagcaggagttcatccccctgagcctgctgagcgcctgctgccccatcttcaccaacatctgcagccagctgaccatccgctacgtgttcatcagcggcatgaagacagaccagtacagcgagctggtgcctgtggagtggggcattgctgagaagatccccaagaatgtggaggccaccctggagctgggcaaccggcagagatttgagcagtttggagagctgcggcggcggcaggagaatgtgggcaagtttggcaccttctag

SEQ ID NO: 148865 - DNA, 1773 bp, synthetic construct
  misc_feature 1..1773: note = Description of Artificial Sequence: Synthetic coding sequence
  source 1..1773: mol_type = other DNA
atggagatgtatgagaccctgggcaaggtgggggagggcagctatggaacagtgatgaagtgcaagcacaagaacacaggccagatcgtggccatcaagatcttctatgaaagacctgagcagagcgtgaacaagatcgccatgagggagatcaagttcctgaagcagttccaccacgagaacctggtgaacctgattgaggtgttccggcagaagaagaagatccacctggtgtttgagttcatcgaccacacagtgctggatgagctgcagcactactgccacggcctggagagcaagaggctgaggaagtacctgttccagatcctgcgggccatcgactacctgcacagcaacaacatcatccaccgggacatcaagccagagaacatcctggtgtcccagagcggcatcaccaagctgtgtgactttggatttgcccggaccctggccgcccctggggacatctacacagattatgtggccacccgctggtaccgggcccctgagctggtgctgaaggacaccagctatggcaagcctgtggacatctgggccctgggctgcatgatcatcgagatggccaccggcaacccctacctgcccagcagcagtgacctggacctgctgcacaagatcgtgctgaaggtgggcaacctgagcccccacctgcagaacatcttcagcaagagccccatctttgctggggtggtgctgccccaggtgcagcaccccaagaatgccaggaagaagtaccccaagctgaatggcctgctggccgacatcgtgcacgcctgcctgcagattgatcctgctgaccgcatcagcagcagtgacctgctgcaccacgagtacttcaccagagatggcttcatcgagaagttcatgcctgagctgaaggccaagctgctgcaggaggccaaggtgaacagcctcatcaagcccaaggagagcagcaaagaaaatgagctgaggaaggatgagaggaagacagtgtacaccaacaccctgctgagcagctctgtgctgggcaaggagattgagaaggagaagaagcccaaggagatcaaggtgcgggtcatcaaggtgaagggcggccgcggggacatcagcgagcccaagaagaaggagtatgagggcggcctgggccagcaggatgccaatgaaaatgtgcaccccatgagcccagacaccaagctggtgaccatcgagccccccaaccccatcaaccccagcaccaactgcaatggcctgaaggagaacccccactgcggcggctctgtgaccatgccacccatcaacctgaccaacagcaacctgatggccgccaacctgagcagcaacctcttccaccccagcgtgcggctgacagagcgggccaagaagaggaggaccagcagccagagcatcggccaggtgatgcccaacagccggcaggaggaccccggccccatccagagccagatggagaagggcatcttcaatgaaagaacaggccacagcgaccagatggccaatgaaaacaagaggaagctgaacttcagcagaagtgacaggaaggagttccacttccctgagctgcctgtgaccatccagagcaaggacaccaagggcatggaggtgaagcagatcaagatgctgaagcgggagagcaagaagacagagagcagcaagatccccaccctgctgaatgtggaccagaaccaggagaagcaggagaacacaggaaatgcccagacagagaggaagaagaacctgcctgatgtggagtag

SEQ ID NO: 148866 - DNA, 1368 bp, synthetic construct; identical to SEQ ID NO: 148863
  misc_feature 1..1368: note = Description of Artificial Sequence: Synthetic coding sequence
  source 1..1368: mol_type = other DNA

SEQ ID NO: 148867 - DNA, 876 bp, synthetic construct
  misc_feature 1..876: note = Description of Artificial Sequence: Synthetic coding sequence
  source 1..876: mol_type = other DNA
atgcctgagctgaaggccaagctgctgcaggaggccaaggtgaacagcctcatcaagcccaaggagagcagcaaagaaaatgagctgaggaaggatgagaggaagacagtgtacaccaacaccctgctgagcagctctgtgctgggcaaggagattgagaaggagaagaagcccaaggagatcaaggtgcgggtcatcaaggtgaagggcggccgcggggacatcagcgagcccaagaagaaggagtatgaaggaggcctgggccagcaggatgccaatgaaaatgtgcaccccatgagcccagacaccaagctggtgaccatcgagccccccaaccccatcaaccccagcaccaactgcaatggcctgaaggagaacccccactgcggcggctctgtgaccatgccacccatcaacctgaccaacagcaacctgatggccgccaacctgagcagcaacctcttccaccccagcgtgcggctgacagagcgggccaagaagaggaggaccagcagccagagcatcggccaggtgatgcccaacagccggcaggaggaccccggccccatccagagccagatggagaagggcatcttcaatgaaagaacaggccacagcgaccagatggccaatgaaaacaagaggaagctgaacttcagcagaagtgacaggaaggagttccacttccctgagctgcctgtgaccatccagagcaaggacaccaagggcatggaggtgaagcagatcaagatgctgaagcgggagagcaagaagacagagagcagcaagatccccaccctgctgaatgtggaccagaaccaggagaagcaggaggtgcggctgtaccagagacatgaggaccggcccatccagtag

SEQ ID NO: 148868 - DNA, 3093 bp, synthetic construct
  misc_feature 1..3093: note = Description of Artificial Sequence: Synthetic coding sequence
  source 1..3093: mol_type = other DNA
atgaagatccccaacattggaaatgtgatgaacaagtttgagatcctgggcgtggtgggggagggcgcctacggcgtggtgctgaagtgccgccacaaggagacccatgagatcgtggccatcaagaagttcaaggacagtgaagaaaatgaggaggtgaaggagaccaccctgcgggagctgaagatgctgcggaccctgaagcaggagaacatcgtggagctgaaggaggccttcagaagaagaggcaagctgtacctggtgtttgaatatgtggagaagaacatgctggagctgctggaggagatgcccaatggagtgcccccagagaaggtgaagagctacatctaccagctgatcaaggccatccactggtgccacaagaatgacatcgtgcaccgggacatcaagccagagaacctgctgatcagccacaatgatgtgctgaagctgtgtgactttggatttgccaggaacctgtctgagggcaacaatgccaactacacagaatatgtggccacccgctggtaccgcagccctgagctgctgctgggcgccccctacggcaagtctgtggacatgtggagcgtgggctgcatcctgggggagctgagtgatggccagcccctcttccctggagagagcgagattgaccagctgttcaccatccagaaggtgctgggccccctgcccagcgagcagatgaagctgttctacagcaacccccgcttccacggcctgcgcttccctgctgtgaaccacccccagagcctggagcggcgctacctgggcatcctgaacagcgtgctgctggacctgatgaagaacctgctgaagctggaccctgctgaccgctacctgacagagcagtgcctgaaccaccccaccttccagacccagaggctgctggacaggagccccagccgcagcgccaagaggaagccctaccacgtggagagcagcaccctgagcaacagaaaccaggccggcaagagcacagccctgcagagccaccacaggagcaacagcaaggacatccagaacctgtctgtgggcctgcccagggcagatgagggcctgcctgccaatgaaagcttcctgaatggaaacctggccggggccagcctgagccccctgcacaccaagacctaccaggccagcagccagcccggcagcaccagcaaggacctgaccaacaacaacatcccccacctgctgagccccaaggaggccaagagcaagacagaatttgacttcaacatcgaccccaagcccagcgagggccctggcaccaagtacctgaagagcaacagccgcagccagcagaacagacacagcttcatggagagcagccagagcaaggccggcaccctgcagcccaatgagaagcagagccgccacagctacatcgacaccatcccccagagcagccgcagccccagctaccgcaccaaggccaagagccatggagccctgagtgacagcaagtctgtgagcaacctgtctgaggcccgggcccagattgctgagcccagcaccagccgctacttccccagcagctgcctggacctgaacagccccaccagccccacccccaccaggcacagcgacaccaggaccctgctgagccccagcggcaggaacaacagaaatgaaggcaccctggacagcaggaggaccaccaccaggcacagcaagaccatggaggagctgaagctgcctgagcacatggacagcagccacagccacagcctgagcgcccctcatgagagcttctcctatggcctgggctacaccagccccttcagcagccagcagaggccccaccgccacagcatgtatgtgacccgggacaaggtgcgggccaagggcctggatggcagcctgagcatcggccagggcatggccgcccgggccaacagcctgcagctgctgagcccccagcctggagagcagctgcccccagagatgacagtggcccggagctctgtgaaggagaccagccgggagggcaccagcagcttccacacccggcagaagtctgagggcggcgtgtaccatgacccccacagtgatgatggaacagcccccaaggaaaatagacacctgtacaatgaccctgtgccccggcgggtgggcagcttctacagagtgcccagccccaggccagacaacagcttccatgaaaataatgtgtccaccagggtgagcagcctgcccagcgagagcagcagcggcaccaaccacagcaagaggcagcctgcctttgacccctggaagagccctgagaacatcagccacagcgagcagctgaaggagaaggagaagcagggcttcttccgctccatgaagaagaagaagaagaagagccagacagtgcccaacagcgacagcccagacctgctgaccctgcagaagagcatccacagcgccagcacccccagcagccggcccaaggagtggaggcctgagaagatcagtgacctgcagacccagagccagcccctgaagagcctgaggaagctgctgcacctgagcagcgccagcaaccacccagccagcagtgacccccgcttccagcccctgacagcccagcagaccaagaacagcttcagcgagatccgcatccaccccctgagccaggccagcggcggcagcagcaacatccggcaggagcccgcccccaagggccgcccagccctgcagctgcctgatggcggctgtgatggaagacggcagaggcaccacagcggcccccaggaccggcgcttcatgctgcggaccacagagcagcagggcgagtacttctgctgcggggaccccaagaagccccacaccccctgtgtgcccaacagagccctgcaccggcccatcagcagccctgccccctaccctgtgctgcaggtgcggggcacctccatgtgccccaccctgcaggtgcggggcacagatgccttcagctgccccacccagcagagcggcttctccttctttgtgagacatgtgatgagggaggccctgatccaccgggcccaggtgaaccaggccgccctgctgacctaccatgaaaatgctgccctgaccgggaagtag

SEQ ID NO: 148869 - DNA, 3093 bp, synthetic construct; identical to SEQ ID NO: 148868
  misc_feature 1..3093: note = Description of Artificial Sequence: Synthetic coding sequence
  source 1..3093: mol_type = other DNA

SEQ ID NO: 148870 - DNA, 1956 bp, synthetic construct
  misc_feature 1..1956: note = Description of Artificial Sequence: Synthetic coding sequence
  source 1..1956: mol_type = other DNA
atgagcctgccccggctgctgaaggtgaacatccgcacctatgacaacagcatccccatcagcgagagcagcaggaagtcctggaaccagaagcactttgccctgaccttccccaagcccctgcagaggggcaccaatgacaagagccggcccctgaagagccagatcaccgtgaccaggcatgacaagaggaagctggaggagggccagaagccagcccacaagtggatccgccacagcttcaggaagatcctgcagtggccacccatctacacagctgcccgggagcagacccccttccgccacctgtacaccagcaagacccacctgaagaaggccgagtacaagaagagcaaggatgagaagggcggcacccccctgaagaaggacagcaagaagaagggcggcagctatgccaccaaccctgagagcaagcagatcgtggaggagaagaccaagaggcagaatgaggccgacaagacccccctgaagagcagccatgaaaatgagcagagcaagaagagcaagagcagcagcgagaccaaccctgagagccagaacagcaagacagtgtccaagaactgcagccagaaggacaagaaggacagcaagaacagcaagaagaccaacacagagttcctgcacaccaagaacaaccccaagaaggacctgaagaggagcaagaccagcaatgaccccatcagcgagatctgcagcgagaacagcctgaatgtggacttcctgatgctggtgggccagagtgatgatgagagcatcaactttgatgcctggctgaggaactacagccagaacaacagcaagaactacagcctgaagtacaccaagtacaccaagaaggacaccaagaagaatgccaagaagagcagtgatgctgagagcgaggacagcaaggatgccaagaaggacagcaagaaggtgaagaagaatgtgaagaaggatgacaagaagaaggatgtgaagaaggacacagagagcacagatgctgagagcggggacagcaaggatgagaggaaggacaccaagaaggacaagaagaagctgaagaaggatgacaagaagaaggacaccaagaagtacccagagagcacagacacagagagcggagatgccaaggatgccagaaatgacagcaggaacctgaagaaggccagcaagaatgatgacaagaagaaggatgccaagaagatcaccttcagcacagattctgagagcgagctggagagcaaggagagccagaaggatgagaagaaggacaagaaggacagcaagacagacaacaagaagtctgtgaagaatgatgaggagagcacagatgctgacagcgagcccaagggggacagcaagaagggcaagaaggatgagaagaagggcaagaaggacagcaagaaggatgacaagaagaaggatgccaagaagaatgctgagagcacagagatggagagtgacctggagctgaagaaggacaagaagcacagcaaggagaagaagggcagcaagaaggacatcaagaaggatgccaggaaggacacagagagcacagatgctgagtttgatgagagcagcaagacaggcttcaagaccagcaccaagatcaagggcagtgacacagaaagtgaggagagcctgtacaagccaggggccaagaagaagattgatgaaagtgatggcaccagcgccaacagcaagatggagggcctggagagcaagaggggcttcaggatgagcagcaagaagaccaccttcaatgaaaaaggagagaaggccagcacaggccgggtgccccccagccgggagaagccacccctgcctgcctgtgagcccagcctgcccagccccaaggtgcggcggctgtgctggtgcaagatgcctcctcctccacccaagcccaggtatgcccccctgcctgaggccccctggatccacaagctgctgtag

SEQ ID NO: 148871 - DNA, 1974 bp, synthetic construct
  misc_feature 1..1974: note = Description of Artificial Sequence: Synthetic coding sequence
  source 1..1974: mol_type = other DNA
atgagcctgccccggctgctgaaggtgaacatccgcacctatgacaacagcatccccatcagcgagagcagcaggaagtcctggaaccagaagcactttgccctgaccttccccaagcccctgcagaggggcaccaatgacaagagccggcccctgaagagccagatcaccgtgaccaggcatgacaagaggaagctggaggagggccagaagccagcccacaagtggatccgccacagcttcaggaagatcctgcagtggccacccatctacacagctgcccgggagcagacccccttccgccacctgtacaccagcaagacccacctgaagaaggccgagtacaagaagagcaaggatgagaagggcggcacccccctgaagaaggacagcaagaagaagggcggcagctatgccaccaaccctgagagcaagcagatcgtggaggagaagaccaagaggcagaatgaggccgacaagacccccctgaagagcagccatgaaaatgagcagagcaagaagagcaagagcagcagcgagaccaaccctgagagccagaacagcaagacagtgtccaagaactgcagccagaaggacaagaaggacagcaagaacagcaagaagaccaacacagagttcctgcacaccaagaacaaccccaagaaggacctgaagaggagcaagaccagcaatgaccccatcagcgagatctgcagcgagaacagcctgaatgtggacttcctgatgctggtgggccagagtgatgatgagagcatcaactttgatgcctggctgaggaactacagccagaacaacagcaagaactacagcctgaagtacaccaagtacaccaagaaggacaccaagaagaatgccaagaagagcagtgatgctgagagcgaggacagcaaggatgccaagaaggacagcaagaaggtgaagaagaatgtgaagaaggatgacaagaagaaggatgtgaagaaggacacagagagcacagatgctgagagcggggacagcaaggatgagaggaaggacaccaagaaggacaagaagaagctgaagaaggatgacaagaagaaggacaccaagaagtacccagagagcacagacacagagagcggagatgccaaggatgccagaaatgacagcaggaacctgaagaaggccagcaagaatgatgacaagaagaaggatgccaagaagatcaccttcagcacagattctgagagcgagctggagagcaaggagagccagaaggatgagaagaaggacaagaaggacagcaagacagacaacaagaagtctgtgaagaatgatgaggagagcacagatgctgacagcgagcccaagggggacagcaagaagggcaagaaggatgagaagaagggcaagaaggacagcaagaaggatgacaagaagaaggatgccaagaagaatgctgagagcacagagatggagagtgacctggagctgaagaaggacaagaagcacagcaaggagaagaagggcagcaagaaggacatcaagaaggatgccaggaaggacacagagagcacagatgctgagtttgatgagagcagcaagacaggcttcaagaccagcaccaagatcaagggcagtgacacagaaagtgaggagagcctgtacaagccaggggccaagaagaagattgatgaaagtgatggcaccagcgccaacagcaagatggagggcctggagagcaagaggggcttcaggatgagcagcaagaagaccaccttcaatgaaaaaggagagaaggccagcacaggccgggtgccccccagccgggagaagccacccctgcctgcctgtgagcccagcctgcccagccccaaggtgcggcggctgtgctggtgcaagatgcctcctcctccacccaagcccaggtatgcccccctcatccagaggcggcagaggctgggcgtgcggcgctgccagctgctgatgtag

SEQ ID NO: 148872 - DNA, 1086 bp, synthetic construct
  misc_feature 1..1086: note = Description of Artificial Sequence: Synthetic coding sequence
  source 1..1086: mol_type = other DNA
atgcaggagaaggatgccagcagccagggcttcctgccccacttccagcactttgccacccaggccatccacgtgggccaggaccctgagcagtggaccagcagagctgtggtgccccccatcagcctgagcaccaccttcaagcagggcgcccctggccagcacagcggctttgagtacagccgcagcggcaaccccaccaggaactgcctggagaaggctgtggccgccctggatggagccaagtactgcctggcctttgccagcggcctggccgccaccgtgaccatcacccacctgctgaaggccggggaccagatcatctgcatggatgatgtgtatggaggcaccaaccgctacttccggcaggtggccagcgagtttggcctgaagatcagctttgtggactgcagcaagatcaagctgctggaggccgccatcaccccagagaccaagaggcccctggccctgggcgctgacatctccatgtacagcgccaccaagtacatgaatggccacagtgatgtggtgatgggcctggtgtctgtgaactgtgagagcctgcacaaccggctgcgcttcctgcagaacagcctgggcgctgtgcccagccccatcgactgctacctgtgcaacagaggcctgaagaccctgcacgtgaggatggagaagcacttcaagaatggcatggctgtggcccagttcctggagagcaacccctgggtggagaaggtgatctacccaggcctgcccagccacccccagcacgagctggtgaagaggcagtgcaccggctgcaccggcatggtgaccttctacatcaagggcaccctgcagcacgccgagatcttcctgaagaacctgaagctgttcaccctggccgagagcctgggcggctttgagagcctggccgagctgcctgccatcatgacccacgcctctgtgctgaagaatgacagagatgtgctgggcatcagtgacaccctcatccggctgtctgtgggcctggaggatgaggaggacctgctggaggacctggaccaggccctgaaggccgcccaccccccatctggcagccacagctag

SEQ ID NO: 148873 - DNA, 1218 bp, synthetic construct
  misc_feature 1..1218: note = Description of Artificial Sequence: Synthetic coding sequence
  source 1..1218: mol_type = other DNA
atgcaggagaaggatgccagcagccagggcttcctgccccacttccagcactttgccacccaggccatccacgtgggccaggaccctgagcagtggaccagcagagctgtggtgccccccatcagcctgagcaccaccttcaagcagggcgcccctggccagcacagcggctttgagtacagccgcagcggcaaccccaccaggaactgcctggagaaggctgtggccgccctggatggagccaagtactgcctggcctttgccagcggcctggccgccaccgtgaccatcacccacctgctgaaggccggggaccagatcatctgcatggatgatgtgtatggaggcaccaaccgctacttccggcaggtggccagcgagtttggcctgaagatcagctttgtggactgcagcaagatcaagctgctggaggccgccatcaccccagagaccaagctggtgtggattgagacccccaccaaccccacccagaaggtgattgatattgagggctgtgcccacatcgtgcacaagcatggagacatcatcctggtggtggacaacaccttcatgagcccctacttccagaggcccctggccctgggcgctgacatctccatgtacagcgccaccaagtacatgaatggccacagtgatgtggtgatgggcctggtgtctgtgaactgtgagagcctgcacaaccggctgcgcttcctgcagaacagcctgggcgctgtgcccagccccatcgactgctacctgtgcaacagaggcctgaagaccctgcacgtgaggatggagaagcacttcaagaatggcatggctgtggcccagttcctggagagcaacccctgggtggagaaggtgatctacccaggcctgcccagccacccccagcacgagctggtgaagaggcagtgcaccggctgcaccggcatggtgaccttctacatcaagggcaccctgcagcacgccgagatcttcctgaagaacctgaagctgttcaccctggccgagagcctgggcggctttgagagcctggccgagctgcctgccatcatgacccacgcctctgtgctgaagaatgacagagatgtgctgggcatcagtgacaccctcatccggctgtctgtgggcctggaggatgaggaggacctgctggaggacctggaccaggccctgaaggccgcccaccccccatctggcagccacagctag

SEQ ID NO: 148874 - DNA, 1122 bp, synthetic construct
  misc_feature 1..1122: note = Description of Artificial Sequence: Synthetic coding sequence
  source 1..1122: mol_type = other DNA
atgcaggagaaggatgccagcagccagggcttcctgccccacttccagcactttgccacccaggccatccacgtgggccaggaccctgagcagtggaccagcagagctgtggtgccccccatcagcctgagcaccaccttcaagcagggcgcccctggccagcacagcggctttgagtacagccgcagcggcaaccccaccaggaactgcctggagaaggctgtggccgccctggatggagccaagtactgcaccaaccgctacttccggcaggtggccagcgagtttggcctgaagatcagctttgtggactgcagcaagatcaagctgctggaggccgccatcaccccagagaccaagctggtgtggattgagacccccaccaaccccacccagaaggtgattgatattgagggctgtgcccacatcgtgcacaagcatggagacatcatcctggtggtggacaacaccttcatgagcccctacttccagaggcccctggccctgggcgctgacatctccatgtacagcgccaccaagtacatgaatggccacagtgatgtggtgatgggcctggtgtctgtgaactgtgagagcctgcacaaccggctgcgcttcctgcagaacagcctgggcgctgtgcccagccccatcgactgctacctgtgcaacagaggcctgaagaccctgcacgtgaggatggagaagcacttcaagaatggcatggctgtggcccagttcctggagagcaacccctgggtggagaaggtgatctacccaggcctgcccagccacccccagcacgagctggtgaagaggcagtgcaccggctgcaccggcatggtgaccttctacatcaagggcaccctgcagcacgccgagatcttcctgaagaacctgaagctgttcaccctggccgagagcctgggcggctttgagagcctggccgagctgcctgccatcatgacccacgcctctgtgctgaagaatgacagagatgtgctgggcatcagtgacaccctcatccggctgtctgtgggcctggaggatgaggaggacctgctggaggacctggaccaggccctgaaggccgcccaccccccatctggcagccacagctag

SEQ ID NO: 148875 - DNA, 1656 bp, synthetic construct
  misc_feature 1..1656: note = Description of Artificial Sequence: Synthetic coding sequence
  source 1..1656: mol_type = other DNA
atgcccagcgagaccccccaggccgaggtgggccccaccggctgcccccacaggagcggcccccacagcgccaagggcagcctggagaagggcagccctgaggacaaggaggccaaggagcccctgtggatccggccagatgcccccagccgctgcacctggcagctgggccgcccagccagcgagagcccccaccaccacacagccccagccaagagccccaagatcctgcctgacatcctgaagaagatcggggacacccccatggtgcgcatcaacaagattggcaagaagtttggcctgaagtgtgagctgctggccaagtgtgagttcttcaatgctgggggctctgtgaaggaccgcatcagcctgaggatgattgaagatgctgagagagatggcaccctgaagccaggggacaccatcatcgagcccaccagcggcaacacaggcatcggcctggccctggccgctgctgtgcggggctaccgctgcatcatcgtgatgcctgagaagatgagcagcgagaaggtggatgtgctgcgggccctgggcgctgagatcgtgaggacccccaccaatgccaggtttgacagccctgagagccacgtgggcgtggcctggaggctgaagaatgagatccccaacagccacatcctggaccagtacagaaatgccagcaaccccctggcccactatgacaccacagcagatgagatcctgcagcagtgtgatggcaagctggacatgctggtggcctctgtgggcactggaggcaccatcaccggcatcgccaggaagctgaaggagaagtgccccggctgccgcatcatcggcgtggaccctgagggcagcatcctggccgagcctgaggagctgaaccagacagagcagaccacctatgaggtggagggcatcggctatgacttcatccccaccgtgctggacagaacagtggtggacaagtggttcaagagcaatgatgaggaggccttcacctttgccaggatgctgattgcccaggagggcctgctgtgtggcggcagcgctggcagcacagtggccgtggccgtgaaggccgcccaggagctgcaggagggccagagatgtgtggtgatcctgcctgattctgtgaggaactacatgaccaagttcctgagtgaccgctggatgctgcagaagggcttcctgaaggaggaggacctgacagagaagaagccctggtggtggcacctgcgggtgcaggagctgggcctgagcgcccccctgactgtgctgcccaccatcacctgtggccacaccatcgagatcctgcgggagaagggctttgaccaggcccctgtggtggatgaggccggggtcatcctgggcatggtgaccctgggcaacatgctgagcagcctgctggccggcaaggtgcagcccagcgaccaggtgggcaaggtgatctacaagcagttcaagcagatccggctgacagacaccctgggccgcctgagccacatcctggagatggaccactttgccctggtggtgcatgagcagatccagtaccacagcacaggcaagagcagccagaggcagatggtgtttggagtggtgacagccatcgacctgctgaactttgtggccgcccaggagcgggaccagaagtag

SEQ ID NO: 148876 - DNA, 1656 bp, synthetic construct; identical to SEQ ID NO: 148875
  misc_feature 1..1656: note = Description of Artificial Sequence: Synthetic coding sequence
  source 1..1656: mol_type = other DNA

SEQ ID NO: 148877 - DNA, 1656 bp, synthetic construct; identical to SEQ ID NO: 148875
  misc_feature 1..1656: note = Description of Artificial Sequence: Synthetic coding sequence
  source 1..1656: mol_type = other DNA

SEQ ID NO: 148878 - DNA, 1656 bp, synthetic construct; identical to SEQ ID NO: 148875
  misc_feature 1..1656: note = Description of Artificial Sequence: Synthetic coding sequence
  source 1..1656: mol_type = other DNA

SEQ ID NO: 148879 - DNA, 1698 bp, synthetic construct
  misc_feature 1..1698: note = Description of Artificial Sequence: Synthetic coding sequence
  source 1..1698: mol_type = other DNA
atgcccagcgagaccccccaggccgaggtgggccccaccggctgcccccacaggagcggcccccacagcgccaagggcagcctggagaagggcagccctgaggacaaggaggccaaggagcccctgtggatccggccagatgcccccagccgctgcacctggcagctgggccgcccagccagcgagagcccccaccaccacacagccccagccaagagccccaagatcctgcctgacatcctgaagaagatcggggacacccccatggtgcgcatcaacaagattggcaagaagtttggcctgaagtgtgagctgctggccaagtgtgagttcttcaatgctgggggctctgtgaaggaccgcatcagcctgaggatgattgaagatgctgagagagatggcaccctgaagccaggggacaccatcatcgagcccaccagcggcaacacaggcatcggcctggccctggccgctgctgtgcggggctaccgctgcatcatcgtgatgcctgagaagatgagcagcgagaaggtggatgtgctgcgggccctgggcgctgagatcgtgaggacccccaccaatgccaggtttgacagccctgagagccacgtgggcgtggcctggaggctgaagaatgagatccccaacagccacatcctggaccagtacagaaatgccagcaaccccctggcccactatgacaccacagcagatgagatcctgcagcagtgtgatggcaagctggacatgctggtggcctctgtgggcactggaggcaccatcaccggcatcgccaggaagctgaaggagaagtgccccggctgccgcatcatcggcgtggaccctgagggcagcatcctggccgagcctgaggagctgaaccagacagagcagaccacctatgaggtggagggcatcggctatgacttcatccccaccgtgctggacagaacagtggtggacaagtggttcaagagcaatgatgaggaggccttcacctttgccaggatgctgattgcccaggagggcctgctgtgtggcggcagcgctggcagcacagtggccgtggccgtgaaggccgcccaggagctgcaggagggccagagatgtgtggtgatcctgcctgattctgtgaggaactacatgaccaagttcctgagtgaccgctggatgctgcagaagggcttcctgaaggaggaggacctgacagagaagaagccctggtggtggcacctgcgggtgcaggagctgggcctgagcgcccccctgactgtgctgcccaccatcacctgtggccacaccatcgagatcctgcgggagaagggctttgaccaggcccctgtggtggatgaggccggggtcatcctgggcatggtgaccctgggcaacatgctgagcagcctgctggccggcaaggtgcagcccagcgaccaggtgggcaaggtgatctacaagcagttcaagcagatccggctgacagacaccctgggccgcctgagccacatcctggagatggaccactttgccctggtggtgcatgagcagatccagagccaggaccaggcctgggccggcgtggtgggcggccctgctgaccacagcacaggcaagagcagccagaggcagatggtgtttggagtggtgacagccatcgacctgctgaactttgtggccgcccaggagcgggaccagaagtag

SEQ ID NO: 148880 - DNA, 534 bp, synthetic construct
  misc_feature 1..534: note = Description of Artificial Sequence: Synthetic coding sequence
  source 1..534: mol_type = other DNA
atgcccagcgagaccccccaggccgaggtgggccccaccggctgcccccacaggagcggcccccacagcgccaagggcagcctggagaagggcagccctgaggacaaggaggccaaggagcccctgtggatccggccagatgcccccagccgctgcacctggcagctgggccgcccagccagcgagagcccccaccaccacacagccccagccaagagccccaagatcctgcctgacatcctgaagaagatcggggacacccccatggtgcgcatcaacaagattggcaagaagtttggcctgaagtgtgagctgctggccaagtgtgagttcttcaatgctgggggctctgtgaaggaccgcatcagcctgaggatgattgaagatgctgagagagatggcaccctgaagccaggggacaccatcatcgagcccaccagcggcaacacaggcatcggcctggccctggccgctgctgtgcggggctaccgctgcatcatcgtgatgcctgagaagatgagcagcgagaagtag

SEQ ID NO: 148881 - DNA, 1527 bp, synthetic construct
  misc_feature 1..1527: note = Description of Artificial Sequence: Synthetic coding sequence
  source 1..1527: mol_type = other DNA
atgcccagcgagaccccccaggccgaggtgggccccaccggctgcccccacaggagcggcccccaccaccacacagccccagccaagagccccaagatcctgcctgacatcctgaagaagattggagacacccccatggtgcgcatcaacaagattggcaagaagtttggcctgaagtgtgagctgctggccaagtgtgagttcttcaatgccggcggctctgtgaaggaccgcatcagcctgaggatgattgaagatgctgagagagatggcaccctgaagccaggggacaccatcatcgagcccaccagcggcaacacaggaattggcctggccctggccgctgctgtgcggggctaccgctgcatcatcgtgatgcctgagaagatgagcagcgagaaggtggatgtgctgcgggccctgggcgctgagatcgtgaggacccccaccaatgccaggtttgacagccctgagagccacgtgggcgtggcctggaggctgaagaatgagatccccaacagccacatcctggaccagtacagaaatgccagcaaccccctggcccactatgacaccacagcagatgagatcctgcagcagtgtgatggcaagctggacatgctggtggcctctgtgggcaccggcggcaccatcactggaattgccaggaagctgaaggagaagtgccccggctgccgcatcattggagtggaccctgagggcagcatcctggccgagcctgaggagctgaaccagacagagcagaccacctatgaggtggagggcatcggctatgacttcatccccaccgtgctggacagaacagtggtggacaagtggttcaagagcaatgatgaggaggccttcacctttgccaggatgctgattgcccaggagggcctgctgtgtggcggcagcgctggcagcacagtggccgtggccgtgaaggccgcccaggagctgcaggagggccagagatgtgtggtgatcctgcctgacagcgtgaggaactacatgaccaagttcctgagtgaccgctggatgctgcagaagggcttcctgaaggaggaggacctgacagagaagaagccctggtggtggcacctgcgggtgcaggagctgggcctgagcgcccccctgactgtgctgcccaccatcacctgtggccacaccatcgagatcctgcgggagaagggctttgaccaggcccctgtggtggatgaagctggggtcatcctgggcatggtgaccctgggcaacatgctgagcagcctgctggccggcaaggtgcagcccagcgaccaggtgggcaaggtgatctacaagcagttcaagcagatccggctgacagacaccctgggccgcctgagccacatcctggagatggaccactttgccctggtggtgcatgagcagatccagtaccacagcacaggcaagagcagccagaggcagatggtgtttggagtggtgacagccatcgacctgctgaactttgtggccgcccaggagcgggaccagaagtag

SEQ ID NO: 148882 - DNA, 1392 bp, synthetic construct
  misc_feature 1..1392: note = Description of Artificial Sequence: Synthetic coding sequence
  source 1..1392: mol_type = other DNA
atggtgcgcatcaacaagattggcaagaagtttggcctgaagtgtgagctgctggccaagtgtgagttcttcaatgctgggggctctgtgaaggaccgcatcagcctgaggatgattgaagatgctgagagagatggcaccctgaagccaggggacaccatcatcgagcccaccagcggcaacacaggcatcggcctggccctggccgctgctgtgcggggctaccgctgcatcatcgtgatgcctgagaagatgagcagcgagaaggtggatgtgctgcgggccctgggcgctgagatcgtgaggacccccaccaatgccaggtttgacagccctgagagccacgtgggcgtggcctggaggctgaagaatgagatccccaacagccacatcctggaccagtacagaaatgccagcaaccccctggcccactatgacaccacagcagatgagatcctgcagcagtgtgatggcaagctggacatgctggtggcctctgtgggcactggaggcaccatcaccggcatcgccaggaagctgaaggagaagtgccccggctgccgcatcatcggcgtggaccctgagggcagcatcctggccgagcctgaggagctgaaccagacagagcagaccacctatgaggtggagggcatcggctatgacttcatccccaccgtgctggacagaacagtggtggacaagtggttcaagagcaatgatgaggaggccttcacctttgccaggatgctgattgcccaggagggcctgctgtgtggcggcagcgctggcagcacagtggccgtggccgtgaaggccgcccaggagctgcaggagggccagagatgtgtggtgatcctgcctgattctgtgaggaactacatgaccaagttcctgagtgaccgctggatgctgcagaagggcttcctgaaggaggaggacctgacagagaagaagccctggtggtggcacctgcgggtgcaggagctgggcctgagcgcccccctgactgtgctgcccaccatcacctgtggccacaccatcgagatcctgcgggagaagggctttgaccaggcccctgtggtggatgaggccggggtcatcctgggcatggtgaccctgggcaacatgctgagcagcctgctggccggcaaggtgcagcccagcgaccaggtgggcaaggtgatctacaagcagttcaagcagatccggctgacagacaccctgggccgcctgagccacatcctggagatggaccactttgccctggtggtgcatgagcagatccagtaccacagcacaggcaagagcagccagaggcagatggtgtttggagtggtgacagccatcgacctgctgaactttgtggccgcccaggagcgggaccagaagtag

SEQ ID NO: 148883 - DNA, 312 bp, synthetic construct
  misc_feature 1..312: note = Description of Artificial Sequence: Synthetic coding sequence
  source 1..312: mol_type = other DNA
atgatggccgagccctggcaggccctgcagctgctgctggccatcctgctgaccctgatggccctgccctaccaggccaggaagaagaccttcctgtctgtgcatgaggtgatggctgtggagaactatgccaaggacagcctgcagtggatcacagaccagtacaacaaggagagtgatgacaagtaccacttccgcatcttccgggtgctgaaggtgcagaggcagcaggtgaactgcttcttctctgtgtttgctgtgccctggtttgagcagtacaagatcctgaacaagagctgcagcagtgactag

SEQ ID NO: 148884 - DNA, 417 bp, synthetic construct
  misc_feature 1..417: note = Description of Artificial Sequence: Synthetic coding sequence
  source 1..417: mol_type = other DNA
atgatggccgagccctggcaggccctgcagctgctgctggccatcctgctgaccctgatggccctgccctaccaggccaggaagaagaccttcctgtctgtgcatgaggtgatggctgtggagaactatgccaaggacagcctgcagtggatcacagaccagtacaacaaggagagtgatgacaagtaccacttccgcatcttccgggtgctgaaggtgcagaggcaggtgacagaccacctggagtaccacctgaatgtggagatgcagtggaccacctgccagaagccagagaccaccaactgtgtgccccaggagcgggagctgcacaagcaggtgaactgcttcttctctgtgtttgctgtgccctggtttgagcagtacaagatcctgaacaagagctgcagcagtgactag

SEQ ID NO: 148885 - DNA, 297 bp, synthetic construct
  misc_feature 1..297: note = Description of Artificial Sequence: Synthetic coding sequence
  source 1..297: mol_type = other DNA
atgatccctgggggcctgtctgaggccaagccagccaccccagagatccaggagatcgtggacaaggtgaagccccagctggaggagaagaccaatgagacctacggcaagctggaggccgtgcagtacaagacccaggtggtggccggcaccaactactacatcaaggtgcgggccggggacaacaagtacatgcacctgaaggtgttcaagagcctgcccggccagaatgaagacctggtgctgaccggctaccaggtggacaagaacaaggatgatgagctgaccggcttctag

SEQ ID NO: 148886 - DNA, 297 bp, synthetic construct
  misc_feature 1..297: note = Description of Artificial Sequence: Synthetic coding sequence
  source 1..297: mol_type = other DNA
atgatgtgtggggcccccagcgccacccagcctgccacagctgagacccagcacatcgctgaccaggtgcgcagccagctggaggagaaggagaacaagaagtttcctgtgttcaaggctgtgtccttcaagagccaggtggtggccggcaccaactacttcatcaaggtgcacgtgggagatgaggactttgtgcacctgcgggtcttccagagcctgccccatgagaacaagcccctgaccctgagcaactaccagaccaacaaggccaagcatgatgagctgacctacttctag

SEQ ID NO: 148887 - DNA, 441 bp, synthetic construct
  misc_feature 1..441: note = Description of Artificial Sequence: Synthetic coding sequence
  source 1..441: mol_type = other DNA
atggccggccccctgcgggcccccctgctgctgctggccatcctggccgtggccctggccgtgtccccagctgctggcagcagccctgggaagccaccccggctggtgggcggccccatggatgcctctgtggaggaggagggcgtgcggcgggccctggactttgctgtgggggagtacaacaaggccagcaatgacatgtaccacagccgggccctgcaggtggtgcgggccaggaagcagatcgtggccggcgtgaactacttcctggatgtggagctgggccgcaccacctgcaccaagacccagcccaacctggacaactgccccttccatgaccagccccacctgaagaggaaggccttctgcagcttccagatctatgctgtgccctggcagggcaccatgaccctgagcaagagcacctgccaggatgcctag

SEQ ID NO: 148888 - DNA, 441 bp, synthetic construct; identical to SEQ ID NO: 148887
  misc_feature 1..441: note = Description of Artificial Sequence: Synthetic coding sequence
  source 1..441: mol_type = other DNA

SEQ ID NO: 148889 - DNA, 441 bp, synthetic construct; identical to SEQ ID NO: 148887
  misc_feature 1..441: note = Description of Artificial Sequence: Synthetic coding sequence
  source 1..441: mol_type = other DNA

SEQ ID NO: 148890 - DNA, 429 bp, synthetic construct
  misc_feature 1..429: note = Description of Artificial Sequence: Synthetic coding sequence
  source 1..429: mol_type = other DNA
atgatgtggcccatgcacacccccctgctgctgctgacagccctgatggtggccgtggccggcagcgccagcgcccagagcaggaccctggccggcggcatccacgccacagacctgaatgacaagtctgtgcagtgtgccctggactttgccatcagcgagtacaacaaggtgatcaacaaggatgagtactacagccggcccctgcaggtgatggccgcctaccagcagatcgtgggcggcgtgaactactacttcaacgtgaagtttggccgcaccacctgcaccaagagccagcccaacctggacaactgccccttcaatgaccagcccaagctgaaggaggaggagttctgcagcttccagatcaatgaggtgccctgggaggacaagatcagcatcctgaactacaagtgcaggaaggtgtag

SEQ ID NO: 148891 - DNA, 1578 bp, synthetic construct
  misc_feature 1..1578: note = Description of Artificial Sequence: Synthetic coding sequence
  source 1..1578: mol_type = other DNA
atggccaccctgctgcggagcaagctgagcaatgtggccacctctgtgagcaacaagagccaggccaagatgagcggcatgtttgccaggatgggcttccaggccgccacagatgaggaggccgtgggctttgcccactgtgatgacctggactttgagcaccggcagggcctgcagatggacatcctgaaggccgagggggagccctgtggagatgagggcgctgaggcccctgtggagggggacatccactaccagaggggcagcggggcccccctgccccccagcggcagcaaggaccaggtgggcggcggcggggagtttggaggccatgacaagcccaagatcacagcctgggaggccggctggaatgtgaccaatgccatccagggcatgtttgtgctgggcctgccctatgccatcctgcatggaggctacctgggcctcttcctgatcatctttgctgctgtggtgtgctgctacaccgggaagatcctgattgcctgcctgtatgaagaaaatgaagatggagaggtggtgcgggtgcgggacagctatgtggccatcgccaatgcctgctgtgccccccgcttccccaccctgggcggccgggtggtgaatgtggcccagatcatcgagctggtgatgacctgcatcctgtatgtggtggtgtctggcaacctgatgtacaacagcttccctggcctgcctgtgtcccagaagtcctggagcatcatcgccacagctgtgctgctgccctgtgccttcctgaagaacctgaaggctgtgtccaagttcagcctgctgtgcaccctggcccactttgtgatcaacatcctggtgattgcctactgcctgagccgggcccgggactgggcctgggagaaggtgaagttctacattgatgtgaagaagttccccatcagcatcggcatcatcgtgttctcctacaccagccagatcttcctgcccagcctggagggcaacatgcagcagcccagcgagttccactgcatgatgaactggacccacatcgccgcctgtgtgctgaagggcctgtttgccctggtggcctacctgacctgggcagatgagaccaaggaggtgatcacagacaacctgcccggcagcatccgggctgtggtgaacatcttcctggtggccaaggccctgctgagctaccccctgcccttctttgctgctgtggaggtgctggagaagagcctcttccaggagggcagccgggccttcttccctgcctgctacagcggagatggccgcctgaagtcctggggcctgaccctgcgctgtgccctggtggtgttcaccctgctgatggccatctacgtgccccactttgccctgctgatgggcctgaccggcagcctgaccggggccggcctgtgcttcctgctgcccagcctcttccacctgcggctgctgtggaggaagctgctgtggcaccaggtgttctttgatgtggccatctttgtgattggaggcatctgcagcgtgtctggctttgtgcacagcctggagggcctcatcgaggcctaccgcaccaatgctgaggactag

SEQ ID NO: 148892 - DNA, 426 bp, synthetic construct
  misc_feature 1..426: note = Description of Artificial Sequence: Synthetic coding sequence
  source 1..426: mol_type = other DNA
atggcctggcccctgtgcaccctgctgctgctgctggccacccaggccgtggccctggcctggagcccccaggaggaggaccgcatcatcgagggcggcatctatgatgctgacctgaatgatgagcgggtgcagagggccctgcacttcgtcatcagcgagtacaacaaggccacagaagatgagtactacagaaggctgctgcgggtgctgcgggcccgggagcagatcgtgggcggcgtgaactacttctttgatattgaggtgggccgcaccatctgcaccaagagccagcccaacctggacacctgtgccttccacgagcagcctgagctgcagaagaagcagctgtgcagcttccagatctatgaggtgccctgggaggacaggatgagcctggtgaacagccgctgccaggaggcctag

SEQ ID NO: 148893 - DNA, 426 bp, synthetic construct
  misc_feature 1..426: note = Description of Artificial Sequence: Synthetic coding sequence
  source 1..426: mol_type = other DNA
atggcccagtacctgagcaccctgctgctgctgctggccaccctggccgtggccctggcctggagccccaaggaggaggaccgcatcatccctgggggcatctacaatgctgacctgaatgatgagtgggtgcagagggccctgcactttgccatcagcgagtacaacaaggccaccaaggatgactactacagaagacccctgcgggtgctgcgggcccggcagcagacagtgggcggcgtgaactacttctttgatgtggaggtgggccgcaccatctgcaccaagagccagcccaacctggacacctgtgccttccacgagcagcctgagctgcagaagaagcagctgtgcagctttgagatctatgaggtgccctgggagaacagaagaagcctggtgaagagccgctgccaggagagctag

SEQ ID NO: 148894 - DNA, 426 bp, synthetic construct; identical to SEQ ID NO: 148893
  misc_feature 1..426: note = Description of Artificial Sequence: Synthetic coding sequence
  source 1..426: mol_type = other DNA

SEQ ID NO: 148895 - DNA, 582 bp, synthetic construct
  misc_feature 1..582: note = Description of Artificial Sequence: Synthetic coding sequence
  source 1..582: mol_type = other DNA
atgcccaactggggcggcggcaagaagtgtggggtgtgccagaagacagtgtactttgctgaggaggtgcagtgtgagggcaacagcttccacaagagctgcttcctgtgcatggtgtgcaagaagaacctggacagcaccaccgtggccgtgcacggggaggagatctactgcaagagctgctacggcaagaagtatggccccaagggctacggctacggccagggcgccggcaccctgagcacagacaagggggagagcctgggcatcaagcatgaggaggcccctggccaccggcccaccaccaaccccaatgccagcaagtttgcccagaagattggaggcagcgagcgctgcccccgctgcagccaggccgtgtatgctgctgagaaggtgattggagctgggaagtcctggcacaaggcctgcttccgctgtgccaagtgtgggaagggcctggagagcaccaccctggccgacaaggatggagagatctactgcaagggctgctacgccaagaactttggccccaagggcttcggcttcggccagggcgctggggccctggtgcacagcgagtag

SEQ ID NO: 148896 - DNA, 582 bp, synthetic construct; identical to SEQ ID NO: 148895
  misc_feature 1..582: note = Description of Artificial Sequence: Synthetic coding sequence
  source 1..582: mol_type = other DNA

SEQ ID NO: 148897 - DNA, 582 bp, synthetic construct; identical to SEQ ID NO: 148895
  misc_feature 1..582: note = Description of Artificial Sequence: Synthetic coding sequence
  source 1..582: mol_type = other DNA

SEQ ID NO: 148898 - DNA, 582 bp, synthetic construct; identical to SEQ ID NO: 148895
  misc_feature 1..582: note = Description of Artificial Sequence: Synthetic coding sequence
  source 1..582: mol_type = other DNA

SEQ ID NO: 148899 - DNA, 513 bp, synthetic construct
  misc_feature 1..513: note = Description of Artificial Sequence: Synthetic coding sequence
  source 1..513: mol_type = other DNA
atgcccaactggggcggcggcaagaagtgtggggtgtgccagaagacagtgtactttgctgaggaggtgcagtgtgagggcaacagcttccacaagagctgcttcctgtgcatggtgtgcaagaagaacctggacagcaccaccgtggccgtgcacggggaggagatctactgcaagagctgctacggcaagaagtatggccccaagggctacggctacggccagggcgccggcaccaaccccaatgccagcaagtttgcccagaagattggaggcagcgagcgctgcccccgctgcagccaggccgtgtatgctgctgagaaggtgattggagctgggaagtcctggcacaaggcctgcttccgctgtgccaagtgtgggaagggcctggagagcaccaccctggccgacaaggatggagagatctactgcaagggctgctacgccaagaactttggccccaagggctttggatttggccagggcgctggggccctggtgcacagcgagtag

SEQ ID NO: 148900 - DNA, 582 bp, synthetic construct
  misc_feature 1..582: note = Description of Artificial Sequence: Synthetic coding sequence
  source 1..582: mol_type = other DNA
atgcctgtgtggggcggcggcaacaagtgtggggcctgtggccgcacagtgtaccacgccgaggaggtgcagtgtgatggccgctccttccaccgctgctgcttcctgtgcatggtgtgcaggaagaacctggacagcaccaccgtggccatccatgatgaggagatctactgcaagagctgctacggcaagaagtatggccccaagggctacggctacggccagggcgccggcaccctgaacatggacagaggagagcggctgggcatcaagccagagagcgtgcagccccaccggcccaccaccaaccccaacaccagcaagtttgcccagaagtatggaggagctgagaagtgcagccgctgtggggacagcgtgtatgctgctgagaagatcattggagctgggaagccctggcacaagaactgcttccgctgtgccaagtgtgggaagagcctggagagcaccaccctgacagagaaggagggggagatctactgcaagggctgctacgccaagaactttggccccaagggcttcggctacggccagggcgctggggccctggtgcacgcccagtag

SEQ ID NO: 148901 - DNA, 582 bp, synthetic construct; identical to SEQ ID NO: 148900
  misc_feature 1..582: note = Description of Artificial Sequence: Synthetic coding sequence
  source 1..582: mol_type = other DNA

SEQ ID NO: 148902 - DNA, 585 bp, synthetic construct
  misc_feature 1..585: note = Description of Artificial Sequence: Synthetic coding sequence
  source 1..585: mol_type = other DNA
atgcccaactggggcggcggggccaagtgtggggcctgtgagaagacagtgtaccacgccgaggagatccagtgcaatggccgctccttccacaagacctgcttccactgcatggcctgcaggaaggccctggacagcaccaccgtggccgcccacgagagcgagatctactgcaaggtgtgctacggccgccgctatggccccaagggcatcggctacggccagggcgccggctgcctgagcacagacaccggggagcacctgggcctgcagttccagcagagccccaagccagcccggtctgtgaccaccagcaaccccagcaagttcaccgccaagtttggagagagcgagaagtgcccccgctgtgggaagtctgtgtatgctgctgagaaggtgatgggcggcggcaagccctggcacaagacctgcttccgctgtgccatctgtgggaagagcctggagagcaccaacgtgacagacaaggatggagagctgtactgcaaggtgtgctacgccaagaactttggccccactggaattggatttggaggcctgacccagcaggtggagaagaaggagtag

SEQ ID NO: 148903 - DNA, 585 bp, synthetic construct; identical to SEQ ID NO: 148902
  misc_feature 1..585: note = Description of Artificial Sequence: Synthetic coding sequence
  source 1..585: mol_type = other DNA

SEQ ID NO: 148904 - DNA, 1365 bp, synthetic construct
  misc_feature 1..1365: note = Description of Artificial Sequence: Synthetic coding sequence
  source 1..1365: mol_type = other DNA
atgttcctggcccagaggagcctgtgcagcctgagcggccgggccaagttcctgaagaccatcagcagcagcaagatcctgggcttcagcaccagcgccaagatgagcctgaagttcaccaatgccaagagaattgagggcctggacagcaatgtgtggattgagttcaccaagctggccgctgaccccagcgtggtgaacctgggccagggcttcccagacatcagcccccccacctacgtgaaggaggagctgagcaagattgctgccatcgacagcctgaaccagtacacccggggcttcggccaccccagcctggtgaaggccctgagctacctgtatgagaagctgtaccagaagcagattgacagcaacaaggagatcctggtgacagtgggcgcctacggcagcctcttcaacaccatccaggccctgattgatgaaggagatgaggtgatcctgattgtgcccttctatgactgctatgagcccatggtgaggatggccggggccacccctgtgttcatccccctgcggagcaagcctgtgtatggcaagcgctggagcagcagtgactggaccctggacccccaggagctggagagcaagttcaacagcaagaccaaggccatcatcctgaacaccccccacaaccccctgggcaaggtgtacaaccgggaggagctgcaggtgattgctgacctgtgcatcaagtatgacaccctgtgcatcagtgatgaggtgtatgagtggctggtgtacagcggcaacaagcacctgaagatcgccaccttccctggcatgtgggagaggaccatcaccatcggcagcgctgggaagaccttctctgtgacaggctggaagctgggctggagcatcggccccaaccacctgatcaagcacctgcagacagtgcagcagaacaccatctacacctgtgccacccccctgcaggaggccctggcccaggccttctggattgacatcaagaggatggatgatcctgagtgctacttcaacagcctgcccaaggagctggaggtgaagagggacaggatggtgcggctgctggagagcgtgggcctgaagcccatcgtgcctgatggcggctacttcatcatcgcagatgtgtccctgctggaccctgacctgagtgacatgaagaacaatgagccctatgactacaagtttgtgaagtggatgaccaagcacaagaagctgagcgccatccctgtgtctgccttctgcaacagcgagaccaagagccagtttgagaagtttgtgcgcttctgcttcatcaagaaggacagcaccctggatgctgctgaggagatcatcaaggcctggagcgtgcagaagagctag

SEQ ID NO: 148905 - DNA, 504 bp, synthetic construct
  misc_feature 1..504: note = Description of Artificial Sequence: Synthetic coding sequence
  source 1..504: mol_type = other DNA
atgttcctggcccagaggagcctgtgcagcctgagcggccgggccaagttcctgaagaccatcagcagcagcaagatcctgggcttcagcaccagcgccaagatgagcctgaagttcaccaatgccaagagaattgagggcctggacagcaatgtgtggattgagttcaccaagctggccgctgaccccagcgtggtgaacctgggccagggcttcccagacatcagcccccccacctacgtgaaggaggagctgagcaagattgctgccatcgacagcctgaaccagtacacccggggcttcggccaccccagcctggtgaaggccctgagctacctgtatgagaagctgtaccagaagcagattgacagcaacaaggagatcctggtgacagtgggcgcctacggcagcctcttcaacaccatccaggccctgattgatgaaggagatgagtacaatgcctgcaccgtgaagttcaccaacctgaagtgcacagctggatag

SEQ ID NO: 148906 - DNA, 789 bp, synthetic construct
  misc_feature 1..789: note = Description of Artificial Sequence: Synthetic coding sequence
  source 1..789: mol_type = other DNA
atgttcctggcccagaggagcctgtgcagcctgagcggccgggccaagttcctgaagaccatcagcagcagcaagatcctgggcttcagcaccagcgccaagatgagcctgaagttcaccaatgccaagagaattgagggcctggacagcaatgtgtggattgagttcaccaagctggccgctgaccccagcgtggtgaacctgggccagggcttcccagacatcagcccccccacctacgtgaaggaggagctgagcaagattgctgccatcgacagcctgaaccagtacacccggggcttcggccaccccagcctggtgaaggccctgagctacctgtatgagaagctgtaccagaagcagattgacagcaacaaggagatcctggtgacagtgggcgcctacggcagcctcttcaacaccatccaggccctgattgatgaaggagatgaggtgatcctgattgtgcccttctatgactgctatgagcccatggtgaggatggccggggccacccctgtgttcatccccctgcggagcaagcctgtgtatggcaagcgctggagcagcagtgactggaccctggacccccaggagctggagagcaagttcaacagcaagaccaaggccatcatcctgaacaccccccacaaccccctgggcaaggtgtacaaccgggaggagctgcaggtgattgctgacctgtgcatcaagtatgacaccctgtgcatcagtgatgaggtgtatgagtggctggtgtacagcggcaacaagcacctgaagatctag

SEQ ID NO: 148907 - DNA, 1263 bp, synthetic construct
  misc_feature 1..1263: note = Description of Artificial Sequence: Synthetic coding sequence
  source 1..1263: mol_type = other DNA
atgagcctgaagttcaccaatgccaagagaattgagggcctggacagcaatgtgtggattgagttcaccaagctggccgctgaccccagcgtggtgaacctgggccagggcttcccagacatcagcccccccacctacgtgaaggaggagctgagcaagattgctgccatcgacagcctgaaccagtacacccggggcttcggccaccccagcctggtgaaggccctgagctacctgtatgagaagctgtaccagaagcagattgacagcaacaaggagatcctggtgacagtgggcgcctacggcagcctcttcaacaccatccaggccctgattgatgaaggagatgaggtgatcctgattgtgcccttctatgactgctatgagcccatggtgaggatggccggggccacccctgtgttcatccccctgcggagcaagcctgtgtatggcaagcgctggagcagcagtgactggaccctggacccccaggagctggagagcaagttcaacagcaagaccaaggccatcatcctgaacaccccccacaaccccctgggcaaggtgtacaaccgggaggagctgcaggtgattgctgacctgtgcatcaagtatgacaccctgtgcatcagtgatgaggtgtatgagtggctggtgtacagcggcaacaagcacctgaagatcgccaccttccctggcatgtgggagaggaccatcaccatcggcagcgctgggaagaccttctctgtgacaggctggaagctgggctggagcatcggccccaaccacctgatcaagcacctgcagacagtgcagcagaacaccatctacacctgtgccacccccctgcaggaggccctggcccaggccttctggattgacatcaagaggatggatgatcctgagtgctacttcaacagcctgcccaaggagctggaggtgaagagggacaggatggtgcggctgctggagagcgtgggcctgaagcccatcgtgcctgatggcggctacttcatcatcgcagatgtgtccctgctggaccctgacctgagtgacatgaagaacaatgagccctatgactacaagtttgtgaagtggatgaccaagcacaagaagctgagcgccatccctgtgtctgccttctgcaacagcgagaccaagagccagtttgagaagtttgtgcgcttctgcttcatcaagaaggacagcaccctggatgctgctgaggagatcatcaaggcctggagcgtgcagaagagctag

SEQ ID NO: 148908 - DNA, 1269 bp, synthetic construct
  misc_feature 1..1269: note = Description of Artificial Sequence: Synthetic coding sequence
  source 1..1269: mol_type = other DNA
atggccaagcagctgcaggcccggcggctggatggcatcgactacaacccctgggtggagtttgtgaagctggccagcgagcatgatgtggtgaacctgggccagggcttcccagacttccccccaccagactttgctgtggaggccttccagcacgctgtgtctggggacttcatgctgaaccagtacaccaagaccttcggctacccacccctgaccaagatcctggccagcttcttcggggagctgctgggccaggagattgaccccctgagaaatgtgctggtgacagtgggcggctatggagccctcttcaccgccttccaggccctggtggatgaaggagatgaggtgatcatcatcgagcccttctttgactgctatgagcccatgaccatgatggccggcggccggcctgtgtttgtgtccctgaagccaggccccatccagaatggagagctgggcagcagcagcaactggcagctggaccccatggagctggccggcaagttcaccagcaggaccaaggccctggtgctgaacacccccaacaaccccctgggcaaggtgttcagccgggaggagctggagctggtggccagcctgtgccagcagcatgatgtggtgtgcatcacagatgaggtgtaccagtggatggtgtatgatggccaccagcacatcagcatcgccagcctgcccggcatgtgggagaggaccctgaccatcggcagcgctgggaagaccttcagcgccaccggctggaaggtgggctgggtgctgggccctgaccacatcatgaagcacctgaggacagtgcaccagaacagcgtcttccactgccccacccagagccaggccgctgtggccgagagctttgagcgggagcagctgctcttccggcagcccagcagctactttgtgcagttcccccaggccatgcagcgctgccgggaccacatgatccgcagcctgcagagcgtgggcctgaagcccatcatcccccagggcagctacttcctgatcacagacatcagtgacttcaagaggaagatgccagacctgcctggagctgtggatgagccctatgacagaagatttgtgaagtggatgatcaagaacaagggcctggtggccatccctgtgtccatcttctacagcgtgccccaccagaagcactttgaccactacatccgcttctgctttgtgaaggatgaggccaccctgcaggccatggatgagaagctgaggaagtggaaggtggagctgtag

SEQ ID NO: 148909 - DNA, 1119 bp, synthetic construct
  misc_feature 1..1119: note = Description of Artificial Sequence: Synthetic coding sequence
  source 1..1119: mol_type = other DNA
atggccaagcagctgcaggcccggcggctggatggcatcgactacaacccctgggtggagtttgtgaagctggccagcgagcatgatgtggtgaacctgggccagggcttcccagacttccccccaccagactttgctgtggaggccttccagcacgctgtgtctggggacttcatgctgaaccagtacaccaagacctttgtgatcatcatcgagcccttctttgactgctatgagcccatgaccatgatggccggcggccggcctgtgtttgtgtccctgaagccaggccccatccagaatggagagctgggcagcagcagcaactggcagctggaccccatggagctggccggcaagttcaccagcaggaccaaggccctggtgctgaacacccccaacaaccccctgggcaaggtgttcagccgggaggagctggagctggtggccagcctgtgccagcagcatgatgtggtgtgcatcacagatgaggtgtaccagtggatggtgtatgatggccaccagcacatcagcatcgccagcctgcccggcatgtgggagaggaccctgaccatcggcagcgctgggaagaccttcagcgccaccggctggaaggtgggctgggtgctgggccctgaccacatcatgaagcacctgaggacagtgcaccagaacagcgtcttccactgccccacccagagccaggccgctgtggccgagagctttgagcgggagcagctgctcttccggcagcccagcagctactttgtgcagttcccccaggccatgcagcgctgccgggaccacatgatccgcagcctgcagagcgtgggcctgaagcccatcatcccccagggcagctacttcctgatcacagacatcagtgacttcaagaggaagatgccagacctgcctggagctgtggatgagccctatgacagaagatttgtgaagtggatgatcaagaacaagggcctggtggccatccctgtgtccatcttctacagcgtgccccaccagaagcactttgaccactacatccgcttctgctttgtgaaggatgaggccaccctgcaggccatggatgagaagctgaggaagtggaaggtggagctgtag

SEQ ID NO: 148910 - DNA, 480 bp, synthetic construct
  misc_feature 1..480: note = Description of Artificial Sequence: Synthetic coding sequence
  source 1..480: mol_type = other DNA
gccatggccaagcagctgcaggcccggcggctggatggcatcgactacaacccctgggtggagtttgtgaagctggccagcgagcatgatgtggtgaacctgggccagggcttcccagacttccccccaccagactttgctgtggaggccttccagcacgctgtgtctggggacttcatgctgaaccagtacaccaagacctttgtgtccctgtgctacccaggctggagcgccatggtgcgctcctggagcacagctgccctgaccctgcctgtgagcagcggcccccccaccagcgccagcggcgtgacaggcaccaccggctggagccagagctggctggagagcagcttctttgaccccaagaagaagaagatcatctggggctacccacccctgaccaagatcctggccagcttctttggagagctgctgggccaggagattgaccccctgagaaatgtgctggtgacagtgtag

SEQ ID NO: 148911 - DNA, 555 bp, synthetic construct
  misc_feature 1..555: note = Description of Artificial Sequence: Synthetic coding sequence
  source 1..555: mol_type = other DNA
atggccaagcagctgcaggcccggcggctggatggcatcgactacaacccctgggtggagtttgtgaagctggccagcgagcatgatgtggtgaacctgggccagggcttcccagacttccccccaccagactttgctgtggaggccttccagcacgctgtgtctggggacttcatgctgaaccagtacaccaagaccttcggctacccacccctgaccaagatcctggccagcttcttcggggagctgctgggccaggagattgaccccctgagaaatgtgctggtgacagtgggcggctatggagccctcttcaccgccttccaggccctggtggatgaaggagatgaggtgatcatcatcgagcccttctttgactgctatgagcccatgaccatgatggccggcggccggcctgtgtttgtgtccctgaagccaggccccatccagaatggagagctgggcagcagcagcaactggcagctggaccccatggagctggccggcaagttcaccagcaggaccaaggccctggtgctgaacacccccaactag

SEQ ID NO: 148912 - DNA, 480 bp, synthetic construct; identical to SEQ ID NO: 148910
  misc_feature 1..480: note = Description of Artificial Sequence: Synthetic coding sequence
  source 1..480: mol_type = other DNA

SEQ ID NO: 148913 - DNA, 1551 bp, synthetic construct
  misc_feature 1..1551: note = Description of Artificial Sequence: Synthetic coding sequence
  source 1..1551: mol_type = other DNA
atgttcagaacagctgctgccatctctgtgcacctggtgggccccctgcagggcaggaaggccggggcccccctgacctggttcctgcaccagacccaggtggccgagaagaatgtgggcagccctgccccccggcccaccagccacctgggcctggccaacccccaggagaggaaggtgccccagggcccccagagcccctgtgaggtgcctgctgctgagggcatcctgaggactggaggagccaagctgcccatccagggccacccagccaagctggccatggccaagcagctgcaggcccggcggctggatggcatcgactacaacccctgggtggagtttgtgaagctggccagcgagcatgatgtggtgaacctgggccagggcttcccagacttccccccaccagactttgctgtggaggccttccagcacgctgtgtctggggacttcatgctgaaccagtacaccaagaccttcggctacccacccctgaccaagatcctggccagcttcttcggggagctgctgggccaggagattgaccccctgagaaatgtgctggtgacagtgggcggctatggagccctcttcaccgccttccaggccctggtggatgaaggagatgaggtgatcatcatcgagcccttctttgactgctatgagcccatgaccatgatggccggcggccggcctgtgtttgtgtccctgaagccaggccccatccagaatggagagctgggcagcagcagcaactggcagctggaccccatggagctggccggcaagttcaccagcaggaccaaggccctggtgctgaacacccccaacaaccccctgggcaaggtgttcagccgggaggagctggagctggtggccagcctgtgccagcagcatgatgtggtgtgcatcacagatgaggtgtaccagtggatggtgtatgatggccaccagcacatcagcatcgccagcctgcccggcatgtgggagaggaccctgaccatcggcagcgctgggaagaccttcagcgccaccggctggaaggtgggctgggtgctgggccctgaccacatcatgaagcacctgaggacagtgcaccagaacagcgtcttccactgccccacccagagccaggccgctgtggccgagagctttgagcgggagcagctgctcttccggcagcccagcagctactttgtgcagttcccccaggccatgcagcgctgccgggaccacatgatccgcagcctgcagagcgtgggcctgaagcccatcatcccccagggcagctacttcctgatcacagacatcagtgacttcaagaggaagatgccagacctgcctggagctgtggatgagccctatgacagaagatttgtgaagtggatgatcaagaacaagggcctggtggccatccctgtgtccatcttctacagcgtgccccaccagaagcactttgaccactacatccgcttctgctttgtgaaggatgaggccaccctgcaggccatggatgagaagctgaggaagtggaaggtggagctgtag

SEQ ID NO: 148914 - DNA, 756 bp, synthetic construct
  misc_feature 1..756: note = Description of Artificial Sequence: Synthetic coding sequence
  source 1..756: mol_type = other DNA
atggccaagcagctgcaggcccggcggctggatggcatcgactacaacccctgggtggagtttgtgaagctggccagcgagcatgatgtggtgaacctgggccagggcttcccagacttccccccaccagactttgctgtggaggccttccagcacgctgtgtctggggacttcatgctgaaccagtacaccaagaccttcggctacccacccctgaccaagatcctggccagcttcttcggggagctgctgggccaggagattgaccccctgagaaatgtgctggtgacagtgggcggctatggagccctcttcaccgccttccaggccctggtggatgaaggagatgaggtgatcatcatcgagcccttctttgactgctatgagcccatgaccatgatggccggcggccggcctgtgtttgtgtccctgaagccaggccccatccagaatggagagctgggcagcagcagcaactggcagctggaccccatggagctggccggcaagttcaccagcaggaccaaggccctggtgctgaacacccccaacaaccccctgggcaaggtgttcagccgggaggagctggagctggtggccagcctgtgccagcagcatgatgtggtgtgcatcacagatgaggtgtaccagtggatggtgtatgatggccaccagcacatcagcatcgccagcctgcccggcatgtgggagaggaccctgaccatcggcagcgctgggaagaccttcagcgcctag

SEQ ID NO: 148915 - DNA, 603 bp, synthetic construct
  misc_feature 1..603: note = Description of Artificial Sequence: Synthetic coding sequence
  source 1..603: mol_type = other DNA
atggagcagacagaggtgctgaagcccaggaccctggccgacctgatccgcatcctgcaccagctgtttgctggagatgaggtgaatgtggaggaggtgcaggccatcatggaggcctatgaaagtgaccccacagagtgggccatgtatgccaagtttgaccagtaccgctacaccaggaacctggtggaccagggcaatggcaagttcaacctgatgatcctgtgctggggcgagggccacggcagcagcatccatgaccacaccaacagccactgcttcctgaagatgctgcagggcaacctgaaggagaccctgtttgcctggccagacaagaagagcaatgagatggtgaagaagtctgagcgggtgctgcgggagaaccagtgtgcctacatcaatgacagcatcggcctgcaccgggtggagaacatcagccacacagagcctgctgtgtccctgcacctgtacagccccccatttgacacctgccacgcctttgaccagaggacaggccacaagaacaaggtgaccatgaccttccacagcaagtttggcatccgcaccccaaatgccaccagcggcagcctggagaacaactag

SEQ ID NO: 148916 - DNA, 3111 bp, synthetic construct
  misc_feature 1..3111: note = Description of Artificial Sequence: Synthetic coding sequence
  source 1..3111: mol_type = other DNA
atgtacctggtggccggggaccggggcctggccggctgcggccacctgctggtgtccctgctgggcctgctgctgctgctggcccggagcggcacccgggccctggtgtgcctgccctgtgatgagagcaaatgtgaggagcccaggaactgccccggcagcatcgtgcagggcgtgtgtggctgctgctacacctgtgccagccagagaaatgaaagctgtggcggcaccttcggcatctacggcacctgtgaccggggcctgcgctgcgtcatccggccccccctgaatggagacagcctgacagaatatgaggccggcgtgtgtgaagatgagaactggacagatgaccagctgctgggcttcaagccctgcaatgaaaacctgattgctggctgcaacatcatcaatggaaaatgtgagtgcaacaccatccgcacctgcagcaacccctttgagttccccagccaggacatgtgcctgagcgccctgaagagaattgaggaggagaagccagactgcagcaaggcccgctgtgaggtgcagttcagcccccgctgcccagaagattctgtgctgattgagggctacgcccctcctggagagtgctgccccctgcccagccgctgtgtgtgcaacccagctggctgcctgaggaaggtgtgccagcccggcaacctgaacatcctggtgtccaaggccagcggcaagccaggagagtgctgtgacctgtatgagtgcaagcctgtgtttggagtggactgcaggacagtggagtgcccccctgtgcagcagacagcctgccccccagacagctatgagacccaggtgcggctgacagcagatggctgctgcaccctgcccacccgctgtgagtgcctgagcggcctgtgtggcttccctgtgtgtgaggtgggcagcaccccaagaattgtgtccagaggagatggcaccccaggcaagtgctgtgatgtgtttgaatgtgtgaatgacaccaagccagcctgtgtgttcaacaacgtggagtactatgatggagacatgttcaggatggacaactgccgcttctgccgctgccagggcggcgtggccatctgcttcaccgcccagtgtggggagatcaactgtgagcgctactacgtgcctgaaggagagtgctgccctgtgtgtgaagatcctgtgtaccccttcaacaacccagctggctgctacgccaacggcctcatcctggcccacggggaccgctggagagaagatgactgcaccttctgccagtgtgtgaatggagagcggcactgtgtggccaccgtgtgtggccagacctgcaccaaccctgtgaaggtgcctggagagtgctgccctgtgtgtgaggagcccaccatcatcaccgtggaccccccagcctgtggggagctgagcaactgcaccctgaccgggaaggactgcatcaatggcttcaagagggaccacaacggctgcaggacctgccagtgcatcaacacagaggagctgtgcagcgagaggaagcagggctgcaccctgaactgccccttcggcttcctgacagatgcccagaactgtgagatctgtgaatgtcggccccggcccaagaagtgccggcccatcatctgtgacaagtactgccccctgggcctgctgaagaacaagcacggctgtgacatctgccgctgcaagaagtgcccagagctgagctgcagcaagatctgccccctgggcttccagcaggacagccacggctgcctgatctgcaagtgccgggaggccagcgccagcgctggcccccccatcctgagcggcacctgcctgactgtggatggccaccaccacaagaatgaggagagctggcatgatggctgccgggagtgctactgcctgaatggccgggagatgtgtgccctgatcacctgccctgtgcctgcctgtggcaaccccaccatccaccctggccagtgctgccccagctgtgctgatgactttgtggtgcagaagccagagctgagcacccccagcatctgccacgcccctggaggagagtactttgtggagggggagacctggaacatcgacagctgcacccagtgcacctgccacagcggccgggtgctgtgtgaaacagaggtgtgcccccccctgctgtgccagaaccccagcaggacccaggacagctgctgcccccagtgcacagaccagcccttccggcccagcctgagcaggaacaacagcgtgcccaactactgcaagaatgatgaaggagacatcttcctggccgctgagagctggaagccagatgtgtgcaccagctgcatctgcatcgacagcgtcatcagctgcttcagcgagagctgccccagcgtgtcctgtgagaggcctgtgctgaggaagggccagtgctgcccctactgcatcgaggacaccatccccaagaaggtggtgtgccacttcagcggcaaggcctatgcagatgaggagcgctgggacctggacagctgcacccactgctactgcctgcagggccagaccctgtgcagcacagtgtcctgcccccccctgccctgtgtggagcccatcaacgtggagggcagctgctgccccatgtgcccagagatgtatgtgcctgagcccaccaacatccccatcgagaagaccaaccacagaggagaggtggacctggaggtgcccctgtggcccacccccagtgaaaatgacatcgtgcacctgccccgggacatgggccacctgcaggtggactacagagacaaccggctgcaccccagcgaggacagcagcctggacagcatcgcctctgtggtggtgcccatcatcatctgcctgagcatcatcatcgccttcctgttcatcaaccagaagaagcagtggatccccctgctgtgctggtaccgcacccccaccaagcccagcagcctgaacaaccagctggtgtctgtggactgcaagaagggcaccagggtgcaggtggacagcagccagaggatgctgagaattgctgagccagatgcccgcttcagcggcttctacagcatgcagaagcagaaccacctgcaggccgacaacttctaccagacagtgtag

SEQ ID NO: 148917 - DNA, 498 bp, synthetic construct
  misc_feature 1..498: note = Description of Artificial Sequence: Synthetic coding sequence
  source 1..498: mol_type = other DNA
atggctgactttgatgagatctatgaggaggaggaggatgaggagcgggccctggaggagcagctgctgaagtacagcccagaccctgtggtggtgcggggcagcggccacgtgacagtgtttggcctgagcaacaagtttgaaagtgagttccccagcagcctgaccgggaaggtggcccctgaggagttcaaggccagcatcaacagagtgaacagctgcctgaagaagaacctgcctgtgaatgtgcgctggctgctgtgtggctgcctgtgctgctgctgcaccctgggctgcagcatgtggcctgtgatctgcctgagcaagaggacccggcgcagcattgagaagctgctggagtgggagaacaaccggctgtaccacaagctgtgcctgcactggaggctgagcaagaggaaatgtgagaccaacaacatgatggagtatgtgatcctgattgagttcctgcccaagacccccatcttccggccagactag

SEQ ID NO: 148918 - DNA, 234 bp, synthetic construct
  misc_feature 1..234: note = Description of Artificial Sequence: Synthetic coding sequence
  source 1..234: mol_type = other DNA
atgcccaagtgccccaagtgcaacaaggaggtgtactttgctgagcgggtgaccagcctgggcaaggactggcaccggccctgcctgaagtgtgagaagtgtgggaagaccctgaccagcggcggccacgccgagcacgagggcaagccctactgcaaccacccctgctacgccgccatgtttggccccaagggcttcggccggggcggcgctgagagccacaccttcaagtag

SEQ ID NO: 148919 - DNA, 234 bp, synthetic construct; identical to SEQ ID NO: 148918
  misc_feature 1..234: note = Description of Artificial Sequence: Synthetic coding sequence
  source 1..234: mol_type = other DNA

SEQ ID NO: 148920 - DNA, 234 bp, synthetic construct; identical to SEQ ID NO: 148918
  misc_feature 1..234: note = Description of Artificial Sequence: Synthetic coding sequence
  source 1..234: mol_type = other DNA

SEQ ID NO: 148921 - DNA, 627 bp, synthetic construct
  misc_feature 1..627: note = Description of Artificial Sequence: Synthetic coding sequence
  source 1..627: mol_type = other DNA
atggccagcaagtgccccaagtgtgacaagacagtgtactttgctgagaaggtgagcagcctgggcaaggactggcacaagttctgcctgaagtgtgagcgctgcagcaagaccctgaccccaggcggccatgctgagcatgatggcaagcccttctgccacaagccctgctacgccaccctgtttggccccaagggcgtgaacattggaggagctggcagctacatctatgagaagcccctggccgagggcccccaggtgacaggccccatcgaggtgcctgctgcccgggcagaggagaggaaggccagcggcccccccaagggccccagccgggccagctctgtgaccaccttcaccggggagcccaacacctgcccccgctgcagcaagaaggtgtactttgctgagaaggtgaccagcctgggcaaggactggcaccggccctgcctgcgctgtgagcgctgtgggaagaccctgacccctgggggccacgccgagcatgatggccagccctactgccacaagccctgctacggcatcctgtttggccccaagggcgtgaacacaggagctgtgggcagctacatctatgaccgggaccctgagggcaaggtgcagccctag

SEQ ID NO: 148922 - DNA, 849 bp, synthetic construct
  misc_feature 1..849: note = Description of Artificial Sequence: Synthetic coding sequence
  source 1..849: mol_type = other DNA
atgccaccccaccacctgctgccctggctggcccaggtgcccagcgctgagggggagctggtgcggctggtgtccagagctgggggccgcggggcctgcttctggccagctgtgaccatggagatggctgtggccgccggctgtgtgtgcaagggcggcggctgctgccaccgggagcccagccaggaccaccacgagagccaggagcaccggggccccctggtgggcagccagacctgcctggtgcaccaggccgagggcacagctgagaaggtgagcagcctgggcaaggactggcacaagttctgcctgaagtgtgagcgctgcagcaagaccctgaccccaggcggccatgctgagcatgatggcaagcccttctgccacaagccctgctacgccaccctgtttggccccaagggcgtgaacattggaggagctggcagctacatctatgagaagcccctggccgagggcccccaggtgacaggccccatcgaggtgcctgctgcccgggcagaggagaggaaggccagcggcccccccaagggccccagccgggccagctctgtgaccaccttcaccggggagcccaacacctgcccccgctgcagcaagaaggtgtactttgctgagaaggtgaccagcctgggcaaggactggcaccggccctgcctgcgctgtgagcgctgtgggaagaccctgacccctgggggccacgccgagcatgatggccagccctactgccacaagccctgctacggcatcctgtttggccccaagggcgtgaacacaggagctgtgggcagctacatctatgaccgggaccctgagggcaaggtgcagccctag

SEQ ID NO: 148923 - DNA, 315 bp, synthetic construct
  misc_feature 1..315: note = Description of Artificial Sequence: Synthetic coding sequence
  source 1..315: mol_type = other DNA
tgaccaggaggagagagagctgagggcgccggccggcctggggcccccaccatggccagcaaatgtcccaagtgtgacaagacagtgtactttgctgagaaggtgaccagcctgggcaaggactggcaccggccctgcctgcgctgtgagcgctgtgggaagaccctgacccctgggggccacgccgagcatgatggccagccctactgccacaagccctgctacggcatcctgtttggccccaagggcgtgaacacaggagctgtgggcagctacatctatgaccgggaccctgagggcaaggtgcagccctag

SEQ ID NO: 148924 - DNA, 537 bp, synthetic construct
  misc_feature 1..537: note = Description of Artificial Sequence: Synthetic coding sequence
  source 1..537: mol_type = other DNA
atggagatcaagcacctgctcttcctggtggccgccgcctgcctgctgcccatgctgtccatgaagaagaagagcgcccgggaccagttcaacaagctggtgacagacctgcccaacgtgcaggaggagatcgtgaacatccacaatgccctgcggaggagagtggtgcccccagccagcaacatgctgaagatgtcctggagcgaggaggccgcccagaatgcccgcatcttcagcaagtactgtgacatgacagagagcaaccccctggagcggcggctgcccaacaccttctgtggggagaacatgcacatgaccagctaccctgtgtcctggagcagcgtcatcggcgtgtggtacagcgagagcaccagcttcaagcacggggagtggaccaccacagatgatgacatcaccacagaccactacacccagatcgtgtgggccaccagctacctgattggctgtgccatcgccagctgccggcagcagggcagcccccgctacctgtatgtgtgccactactgccacgactag

SEQ ID NO: 148925 - DNA, 750 bp, synthetic construct
  misc_feature 1..750: note = Description of Artificial Sequence: Synthetic coding sequence
  source 1..750: mol_type = other DNA
atggagatcaagcacctgctcttcctggtggccgccgcctgcctgctgcccatgctgtccatgaagaagaagagcgcccgggaccagttcaacaagctggtgacagacctgcccaacgtgcaggaggagatcgtgaacatccacaatgccctgcggaggagagtggtgcccccagccagcaacatgctgaagatgtcctggagcgaggaggccgcccagaatgcccgcatcttcagcaagtactgtgacatgacagagagcaaccccctggagcggcggctgcccaacaccttctgtggggagaacatgcacatgaccagctaccctgtgtcctggagcagcgtcatcggcgtgtggtacagcgagagcaccagcttcaagcacggggagtggaccaccacagatgatgacatcaccacagaccactacacccagatcgtgtgggccaccagctacctgattggctgtgccatcgccagctgccggcagcagggcagcccccgctacctgtatgtgtgccactactgccacgagggcaatgaccctgagaccaagaatgagccctacaagacaggagtgccctgtgaggcctgccccagcaactgtgaggacaagctgtgcaccaacccctgcatctactatgatgagtactttgactgtgacatccaggtgcactacctgggctgcaaccacagcaccaccatcctcttctgcaaggccacctgcctgtgtgacacagagatcaagtag

SEQ ID NO: 148926 - DNA, 750 bp, synthetic construct; identical to SEQ ID NO: 148925
  misc_feature 1..750: note = Description of Artificial Sequence: Synthetic coding sequence
  source 1..750: mol_type = other DNA

SEQ ID NO: 148927 - DNA, 750 bp, synthetic construct; identical to SEQ ID NO: 148925
  misc_feature 1..750: note = Description of Artificial Sequence: Synthetic coding sequence
  source 1..750: mol_type = other DNA

SEQ ID NO: 148928 - DNA, 537 bp, synthetic construct; identical to SEQ ID NO: 148924
  misc_feature 1..537: note = Description of Artificial Sequence: Synthetic coding sequence
  source 1..537: mol_type = other DNA

SEQ ID NO: 148929 - DNA, 537 bp, synthetic construct; identical to SEQ ID NO: 148924
  misc_feature 1..537: note = Description of Artificial Sequence: Synthetic coding sequence
  source 1..537: mol_type = other DNA

SEQ ID NO: 148930 - DNA, 669 bp, synthetic construct
  misc_feature 1..669: note = Description of Artificial Sequence: Synthetic coding sequence
  source 1..669: mol_type = other DNA
atggccggcaagcccaagctgcactacttcaacggccggggccgcatggagcccatccgctggctgctggccgccgccggcgtggagtttgaggagaagttcatcggcagcgctgaggacctgggcaagctgagaaatgatggcagcctgatgttccagcaggtgcccatggtggagattgatggcatgaagctggtgcagacccgggccatcctgaactacatcgccagcaagtacaacctgtatggcaaggacatcaaggagcgggccctgattgacatgtacacagagggcatggctgacctgaatgagatgatcctgctgctgcccctgtgcaggcctgaggagaaggatgccaagatcgccctgatcaaggagaagaccaagagccgctacttccctgcctttgagaaggtgctgcagagccacggccaggactacctggtgggcaacaagctgagcagagctgacatcagcctggtggagctgctgtactacgtggaggagctggacagcagcctcatcagcaacttccccctgctgaaggccctgaagacccgcatcagcaacctgcccaccgtgaagaagttcctgcagcccggcagccccaggaagcccccagcagatgccaaggccctggaggaggccaggaagatcttccgcttctag

SEQ ID NO: 148931 - DNA, 732 bp, synthetic construct
  misc_feature 1..732: note = Description of Artificial Sequence: Synthetic coding sequence
  source 1..732: mol_type = other DNA
atggccctgctgcctgtgctcttcctggtgacagtgctgctgcccagcctgcctgctgagggcaaggaccctgccttcaccgccctgctgaccacccagctgcaggtgcagcgggagatcgtgaacaagcacaatgagctgaggaaggctgtgtccccaccagccagcaacatgctgaagatggagtggagccgggaggtgaccaccaatgcccagcgctgggccaacaagtgcaccctgcagcacagcgaccctgaggacaggaagaccagcacccgctgtggggagaacctgtacatgagcagtgaccccacctcctggagcagcgccatccagagctggtatgatgagatcctggactttgtgtatggagtgggccccaagagccccaatgctgtggtgggccactacacccagctggtgtggtacagcacctaccaggtgggctgcggcatcgcctactgccccaaccaggacagcctgaagtactactacgtgtgccagtactgcccagctggcaacaacatgaacaggaagaacaccccctaccagcagggcaccccctgtgccggctgcccagatgactgtgacaagggcctgtgcaccaacagctgccagtaccaggacctgctgagcaactgtgacagcctgaagaacacagctggctgtgaacatgagctgctgaaggagaagtgcaaggccacctgcctgtgtgagaacaagatctactag

SEQ ID NO: 148932 - DNA, 1494 bp, synthetic construct
  misc_feature 1..1494: note = Description of Artificial Sequence: Synthetic coding sequence
  source 1..1494: mol_type = other DNA
atgagctgtgtgctgggcggcgtcatccccctgggcctgctcttcctggtgtgtggcagccagggctacctgctgcccaacgtgaccctgctggaggagctgctgagcaagtaccagcacaatgaaagccacagccgggtgcggcgggccatcccccgggaggacaaggaggagatcctgatgctgcacaacaagctgcggggccaggtgcagccccaggccagcaacatggagtacatgacctgggatgatgagctggagaagtctgctgctgcctgggccagccagtgcatctgggagcacggccccaccagcctgctggtgtccatcggccagaacctgggcgcccactggggccgctaccgcagccctggcttccacgtgcagagctggtatgatgaggtgaaggactacacctacccctaccccagcgagtgcaacccctggtgcccagagcgctgcagcggccccatgtgcacccactacacccagatcgtgtgggccaccaccaacaagattggctgtgctgtgaacacctgcaggaagatgacagtgtggggcgaggtgtgggagaatgctgtgtactttgtgtgcaactacagccccaagggcaactggattggagaggccccctacaagaatggccggccctgcagcgagtgcccccccagctatggaggcagctgcaggaacaacctgtgctaccgggaggagacctacacccccaagccagagacagatgagatgaatgaggtggagacagcccccatccctgaggagaaccacgtgtggctgcagccccgggtgatgaggcccaccaagcccaagaagaccagcgctgtgaactacatgacccaggtggtgcgctgtgacaccaagatgaaggaccgctgcaagggcagcacctgcaaccgctaccagtgcccagctggctgcctgaaccacaaggccaagatcttcggcaccctcttctatgagagcagcagcagcatctgccgggccgccatccactacggcatcctggatgacaagggcggcctggtggacatcaccagaaatggcaaggtgcccttctttgtgaagtcagaaagacatggagtgcagagcctgagcaagtacaagcccagcagcagcttcatggtgtccaaggtgaaggtgcaggacctggactgctacaccaccgtggcccagctgtgcccctttgagaagccagccacccactgcccccgcatccactgcccagcccactgcaaggatgagcccagctactgggcccctgtgtttggcaccaacatctatgctgacaccagcagcatctgcaagacagctgtgcacgccggggtcatcagcaatgaaagtggaggagatgtggatgtgatgcctgtggacaagaagaagacctacgtgggcagcctgagaaatggagtgcagagcgagagcctgggcaccccaagagatggcaaggccttccgcatctttgctgtgcggcagtag

SEQ ID NO: 148933 - DNA, 1269 bp, synthetic construct
  misc_feature 1..1269: note = Description of Artificial Sequence: Synthetic coding sequence
  source 1..1269: mol_type = other DNA
atggccccctggccacccaagggcctggtgcctgccatgctgtggggcctgagcctcttcctgaacctgcccggccccatctggctgcagcccagccccccaccccagagcagccccccaccccagccccacccctgccacacctgccggggcctggtggacagcttcaacaagggcctggagaggaccatccgggacaactttggaggcggcaacacagcctgggaggaggagaacctgagcaagtacaaggacagcgagacccggctggtggaggtgctggagggcgtgtgcagcaagagtgactttgagtgccaccggctgctggagctgtctgaggagctggtggagagctggtggttccacaagcagcaggaggccccagacctcttccagtggctgtgcagcgacagcctgaagctgtgctgcccagctggcaccttcggccccagctgcctgccctgccctgggggcacagagcggccctgtggcggctacggccagtgtgagggggagggcacccggggcggcagcggccactgtgactgccaggccggctatggaggagaggcctgtggccagtgtggcctgggctactttgaggccgagagaaatgccagccacctggtgtgcagcgcctgcttcggcccctgtgcccgctgcagcggccctgaggagagcaactgcctgcagtgcaagaagggctgggccctgcaccacctgaagtgtgtggacattgatgaatgtggcacagaaggagccaactgtggggctgaccagttctgtgtgaacacagagggcagctatgagtgccgggactgtgccaaggcctgcctgggctgcatgggcgccggccctggccgctgcaagaagtgcagccctggctaccagcaggtgggcagcaagtgcctggatgtggatgaatgtgaaacagaggtgtgccctggagagaacaagcagtgtgagaacacagagggcggctaccgctgcatctgtgccgagggctacaagcagatggagggcatctgtgtgaaggagcagatccctggggccttccccatcctgacagacctgaccccagagaccacccggcgctggaagctgggcagccacccccacagcacctacgtgaagatgaagatgcagagagatgaggccaccttccctggcctgtatggcaagcaggtggccaagctgggcagccagagccggcagagcgaccggggcaccaggctcatccacagccagcaggccagcagccagaggtag

SEQ ID NO: 148934 - DNA, 1263 bp, synthetic construct
  misc_feature 1..1263: note = Description of Artificial Sequence: Synthetic coding sequence
  source 1..1263: mol_type = other DNA
atggccccctggccacccaagggcctggtgcctgccatgctgtggggcctgagcctcttcctgaacctgcccggccccatctggctgcagcccagccccccaccccagagcagccccccaccccagccccacccctgccacacctgccggggcctggtggacagcttcaacaagggcctggagaggaccatccgggacaactttggaggcggcaacacagcctgggaggaggagaacctgagcaagtacaaggacagcgagacccggctggtggaggtgctggagggcgtgtgcagcaagagtgactttgagtgccaccggctgctggagctgtctgaggagctggtggagagctggtggttccacaagcagcaggaggccccagacctcttccagtggctgtgcagcgacagcctgaagctgtgctgcccagctggcaccttcggccccagctgcctgccctgccctgggggcacagagcggccctgtggcggctacggccagtgtgagggggagggcacccggggcggcagcggccactgtgactgccaggccggctatggaggagaggcctgtggccagtgtggcctgggctactttgaggccgagagaaatgccagccacctggtgtgcagcgcctgcttcggcccctgtgcccgctgcagcggccctgaggagagcaactgcctgcagtgcaagaagggctgggccctgcaccacctgaagtgtgtggacattgatgaatgtggcacagaaggagccaactgtggggctgaccagttctgtgtgaacacagagggcagctatgagtgccgggactgtgccaaggcctgcctgggctgcatgggcgccggccctggccgctgcaagaagtgcagccctggctaccagcaggtgggcagcaagtgcctggatgtggatgaatgtgaaacagaggtgtgccctggagagaacaagcagtgtgagaacacagagggcggctaccgctgcatctgtgccgagggctacaagcagatggagggcatctgtgtgaaggagcagatccctgagagcgctggcttcttcagcgagatgacagaagatgagctggtggtgctgcagcagatgttcttcggcatcatcatctgtgccctggccaccctggccgccaagggggacctggtgttcaccgccatcttcatcggggctgtggccgccatgacaggctactggctgtctgagaggagtgacagagtgctggagggcttcatcaagggccgctag

SEQ ID NO: 148935 - DNA, 1263 bp, synthetic construct; identical to SEQ ID NO: 148934
  misc_feature 1..1263: note = Description of Artificial Sequence: Synthetic coding sequence
  source 1..1263: mol_type = other DNA

SEQ ID NO: 148936 - DNA, 1263 bp, synthetic construct; identical to SEQ ID NO: 148934
  misc_feature 1..1263: note = Description of Artificial Sequence: Synthetic coding sequence
  source 1..1263: mol_type = other DNA

SEQ ID NO: 148937 - DNA, 1140 bp, synthetic construct
  misc_feature 1..1140: note = Description of Artificial Sequence: Synthetic coding sequence
  source 1..1140: mol_type = other DNA
atgagcagcagaattgcccgggccctggccctggtggtgaccctgctgcacctgacccggctggccctgagcacctgcccagctgcctgccactgccccctggaggcccccaagtgtgcccctggggtgggcctggtgagagatggctgcggctgctgcaaggtgtgtgccaagcagctgaatgaagactgcagcaagacccagccctgtgaccacaccaagggcctggagtgcaactttggagccagcagcacagccctgaagggcatctgccgggcccagagcgagggccggccctgtgagtacaacagccgcatctaccagaatggagagagcttccagcccaactgcaagcaccagtgcacctgcattgatggagctgtgggctgcatccccctgtgcccccaggagctgagcctgcccaacctgggctgccccaacccccggctggtgaaggtgacaggccagtgctgtgaggagtgggtgtgtgatgaagattccatcaaggaccccatggaggaccaggacggcctgctgggcaaggagctgggctttgatgccagcgaggtggagctgaccaggaacaatgagctgattgctgtgggcaagggcagcagcctgaagaggctgcctgtgtttggcatggagccccgcatcctgtacaaccccctgcagggccagaagtgcatcgtgcagaccacctcctggagccagtgcagcaagacctgtggcaccggcatcagcaccagggtgaccaatgacaacccagaatgtcggctggtgaaggagacccgcatctgtgaggtgcggccctgtggccagcctgtgtacagcagcctgaagaagggcaagaagtgcagcaagaccaagaagagccctgagcctgtgcgcttcacctacgccggctgcctgtctgtgaagaagtaccggcccaagtactgcggcagctgtgtggatggccgctgctgcaccccccagctgacccgctgtgaagatgctgtgcccctgcggcgctggggagacatcttccaggagagacatgatgatcctgtgaagtgcaactacaactgcccccacgccaatgaagctgccttccccttctaccgcctcttcaatgacatccacaagttccgggactag

SEQ ID NO: 148938 - DNA, 1146 bp, synthetic construct
  misc_feature 1..1146: note = Description of Artificial Sequence: Synthetic coding sequence
  source 1..1146: mol_type = other DNA
atgagcagcagaattgcccgggccctggccctggtggtgaccctgctgcacctgacccggctggccctgagcacctgcccagctgcctgccactgccccctggaggcccccaagtgtgcccctggggtgggcctggtgagagatggctgcggctgctgcaaggtgtgtgccaagcagctgaatgaagactgcagcaagacccagccctgtgaccacaccaagggcctggagtgcaactttggagccagcagcacagccctgaagggcatctgccgggcccagagcgagggccggccctgtgagtacaacagccgcatctaccagaatggagagagcttccagcccaactgcaagcaccagtgcacctgcattgatggagctgtgggctgcatccccctgtgcccccaggagctgagcctgcccaacctgggctgccccaacccccggctggtgaaggtgacaggccagtgctgtgaggagtgggtgtgtgatgaagattccatcaaggaccccatggaggaccaggacggcctgctgggcaaggagctgggctttgatgccagcgaggtggagctgaccaggaacaatgagctgattgctgtgggcaagggcagcagcctgaagaggctgcctgtgtttggcatggagccccgcatcctgtacaaccccctgcagggccagaagtgcatcgtgcagaccacctcctggagccagtgcagcaagacctgtggcaccggcatcagcaccagggtgaccaatgacaacccagaatgtcggctggtgaaggagacccgcatctgtgaggtgcggccctgtggccagcctgtgtacagcagcctgaagaagggcaagaagtgcagcaagaccaagaagagccctgagcctgtgcgcttcacctacgccggctgcctgtctgtgaagaagtaccggcccaagtactgcggcagctgtgtggatggccgctgctgcaccccccagctgaccaggacagtgaagatgaggttccgctgtgaagatggagagaccttcagcaagaatgtgatgatgatccagagctgcaagtgcaactacaactgcccccacgccaatgaagctgccttccccttctaccgcctcttcaatgacatccacaagttccgggactag

SEQ ID NO: 148939 - DNA, 1074 bp, synthetic construct
  misc_feature 1..1074: note = Description of Artificial Sequence: Synthetic coding sequence
  source 1..1074: mol_type = other DNA
atgagcagcagaattgcccgggccctggccctggtggtgaccctgctgcacctgacccggctggccctgagcacctgtggctgctgcaaggtgtgtgccaagcagctgaatgaagactgcagcaagacccagccctgtgaccacaccaagggcctggagtgcaactttggagccagcagcacagccctgaagggcatctgccgggcccagagcgagggccggccctgtgagtacaacagccgcatctaccagaatggagagagcttccagcccaactgcaagcaccagtgcacctgcattgatggagctgtgggctgcatccccctgtgcccccaggagctgagcctgcccaacctgggctgccccaacccccggctggtgaaggtgacaggccagtgctgtgaggagtgggtgtgtgatgaagattccatcaaggaccccatggaggaccaggacggcctgctgggcaaggagctgggctttgatgccagcgaggtggagctgaccaggaacaatgagctgattgctgtgggcaagggcagcagcctgaagaggctgcctgtgtttggcatggagccccgcatcctgtacaaccccctgcagggccagaagtgcatcgtgcagaccacctcctggagccagtgcagcaagacctgtggcaccggcatcagcaccagggtgaccaatgacaacccagaatgtcggctggtgaaggagacccgcatctgtgaggtgcggccctgtggccagcctgtgtacagcagcctgaagaagggcaagaagtgcagcaagaccaagaagagccctgagcctgtgcgcttcacctacgccggctgcctgtctgtgaagaagtaccggcccaagtactgcggcagctgtgtggatggccgctgctgcaccccccagctgaccaggacagtgaagatgaggttccgctgtgaagatggagagaccttcagcaagaatgtgatgatgatccagagctgcaagtgcaactacaactgcccccacgccaatgaagctgccttccccttctaccgcctcttcaatgacatccacaagttccgggactag

SEQ ID NO: 148940 - DNA, 1014 bp, synthetic construct
  misc_feature 1..1014: note = Description of Artificial Sequence: Synthetic coding sequence
  source 1..1014: mol_type = other DNA
atggatgagaccggcaacctgactgtgtcctctgccacctgccacgacaccattgatgacttcaggaaccaggtgtacagcaccctgtacagcatgatctctgtggtgggcttctttggaaatggatttgtgctgtatgtgctgatcaagacctaccacaagaagagcgccttccaggtgtacatgatcaacctggccgtggccgacctgctgtgtgtgtgcaccctgcccctgcgggtggtgtactacgtgcacaagggcatctggctgtttggagacttcctgtgccgcctgagcacctacgccctgtatgtgaacctgtactgcagcatcttcttcatgacagccatgtccttcttccgctgcatcgccatcgtgtttcctgtgcagaacatcaacctggtgacccagaagaaggccaggtttgtgtgtgtgggcatctggatcttcgtcatcctgaccagcagccccttcctgatggccaagccccagaaggatgagaagaacaacaccaagtgctttgagcccccccaggacaaccagaccaagaaccacgtgctggtgctgcactacgtgtccctgtttgtgggcttcatcatccccttcgtcatcatcatcgtgtgctacaccatgatcatcctgaccctgctgaagaagtccatgaagaagaacctgagcagccacaagaaggccatcggcatgatcatggtggtgacagctgccttcctggtgtccttcatgccctaccacatccagaggaccatccacctgcacttcctgcacaatgagaccaagccctgtgacagcgtgctgaggatgcagaagtctgtggtgatcaccctgagcctggccgccagcaactgctgctttgaccccctgctgtacttcttcagcggcggcaacttcaggaagaggctgagcaccttcaggaagcacagcctgagctctgtgacctacgtgcccaggaagaaggccagcctgcctgagaagggggaggagatctgcaaggtgtag

SEQ ID NO: 148941 - DNA, 1041 bp, synthetic construct
  misc_feature 1..1041: note = Description of Artificial Sequence: Synthetic coding sequence
  source 1..1041: mol_type = other DNA
atggagaggaagttcatgagcctgcagcccagcatctctgtgtctgagatggagcccaacggcaccttcagcaacaacaacagcaggaactgcaccatcgagaacttcaagcgggagttcttccccatcgtgtacctgatcatcttcttctggggcgtgctgggcaatggcctgagcatctacgtgttcctgcagccctacaagaagagcacctctgtgaatgtgttcatgctgaacctggccatcagtgacctgctcttcatcagcaccctgcccttccgggctgactactacctgcggggcagcaactggatctttggagacctggcctgccgcatcatgagctacagcctgtatgtgaacatgtacagcagcatctacttcctgactgtgctgtctgtggtgcgcttcctggccatggtgcaccccttccggctgctgcacgtgaccagcatccgcagcgcctggatcctgtgtggcatcatctggatcctgatcatggccagcagcatcatgctgctggacagcggcagcgagcagaatggatctgtgaccagctgcctggagctgaacctgtacaagatcgccaagctgcagaccatgaactacatcgccctggtggtgggctgcctgctgcccttcttcaccctgagcatctgctacctgctgatcatccgggtgctgctgaaggtggaggtgcctgagagcggcctgcgggtgagccacaggaaggccctgaccaccatcatcatcaccctcatcatcttcttcctgtgcttcctgccctaccacaccctgaggacagtgcacctgaccacctggaaggtgggcctgtgcaaggaccggctgcacaaggccctggtgatcaccctggccctggccgccgccaatgcctgcttcaaccccctgctgtactactttgctggggagaacttcaaggaccggctgaagagcgccctgaggaagggccacccccagaaggccaagaccaagtgtgtgtttcctgtgtctgtgtggctgaggaaggagaccagggtgtag

SEQ ID NO: 148942 - DNA, 2181 bp, synthetic construct
  misc_feature 1..2181: note = Description of Artificial Sequence: Synthetic coding sequence
  source 1..2181: mol_type = other DNA
atggctgacagcagcggccagcagggcaagggccggcgggtgcagccccagtggagccccccagctggcacccagccctgccgcctgcacctgtacaacagcctgaccaggaacaaggaggtgttcatcccccaggacggcaagaaggtgacctggtactgctgcggccccaccgtgtatgatgccagccacatgggccacgcccggagctacatcagctttgacatcctgcggcgggtgctgaaggactacttcaagtttgatgtgttctactgcatgaacatcacagacattgatgacaagatcatcaagagggcccggcagaaccacctgtttgagcagtaccgggagaagaggcctgaggccgcccagctgctggaggatgtgcaggccgccctgaagcccttctctgtgaagctgaatgagaccacagatcctgacaagaagcagatgctggagcgcatccagcacgctgtgcagctggccacagagcccctggagaaggctgtgcagagccggctgactggagaggaggtgaacagctgtgtggaggtgctgctggaggaggccaaggacctgctgagtgactggctggacagcaccctgggctgtgatgtgacagacaacagcatcttcagcaagctgcccaagttctgggagggggacttccaccgggacatggaggccctgaatgtgctgcccccagatgtgctgaccagggtgtctgaatatgtgcctgagatcgtgaactttgtgcagaagatcgtggacaatggctacggctacgtgtccaatggatctgtgtactttgacacagccaagtttgccagcagcgagaagcacagctatggcaagctggtgcctgaggccgtgggggaccagaaggccctgcaggagggggagggggacctgagcatctctgctgaccggctgtctgagaagaggagccccaatgactttgccctgtggaaggccagcaagccaggagagcccagctggccctgcccctggggcaagggccggcccggctggcacattgaatgttctgccatggccggcaccctgctgggcgcctccatggacatccatggaggcggctttgacctgcgcttcccccaccacgacaatgagctggcccagagcgaggcctactttgaaaatgactgctgggtgcgctacttcctgcacacaggccacctgaccatcgccggctgcaagatgagcaagagcctgaagaacttcatcaccatcaaggatgccctgaagaagcacagcgcccggcagctgcggctggccttcctgatgcacagctggaaggacaccctggactacagcagcaacaccatggagagcgccctgcagtatgagaagttcctgaatgagttcttcctgaatgtgaaggacatcctgcgggcccctgtggacatcaccggccagtttgagaagtggggcgaggaggaggccgagctgaacaagaacttctatgacaagaagacagccatccacaaggccctgtgtgacaacgtggacaccaggacagtgatggaggagatgagggccctggtgtcccagtgcaacctgtacatggccgccaggaaggctgtgaggaagaggcccaaccaggccctgctggagaacatcgccctgtacctgacccacatgctgaagatctttggagctgtggaggaggacagcagcctgggcttccctgtgggcggccctggcaccagcctgagcctggaggccaccgtgatgccctacctgcaggtgctgtctgagttccgggagggcgtgaggaagatcgcccgggagcagaaggtgcctgagatcctgcagctgagtgatgccctgcgggacaacatcctgcctgagctgggcgtgcgctttgaggaccacgagggcctgcccaccgtggtgaagctggtggacaggaacaccctgctgaaggagcgggaggagaagagaagagtggaggaggagaagaggaagaagaaggaggaggccgcccggaggaagcaggagcaggaggccgccaagctggccaagatgaagatcccccccagcgagatgttcctgtctgaaacagacaagtacagcaagtttgatgaaaatgtgtccatggtgtgcccccacatgacctggagggccaagagcagcgccaagggcaagcccaggagctag

SEQ ID NO: 148943 - DNA, 2496 bp, synthetic construct
  misc_feature 1..2496: note = Description of Artificial Sequence: Synthetic coding sequence
  source 1..2496: mol_type = other DNA
atggctgacagcagcggccagcaggccccagactaccgcagcatcctgagcatcagtgatgaggccgcccgggcccaggccctgaatgagcacctgagcaccaggagctatgtgcagggctacagcctgagccaggctgatgtggatgccttccggcagctgagcgcccctcctgctgacccccagctgttccacgtggcccgctggttccgccacatcgaggccctgctgggcagcccctgtgggaagggccagccctgccgcctgcaggccagcaaaggaagaagagtgcagccccagtggagccccccagctggcacccagccctgccgcctgcacctgtacaacagcctgaccaggaacaaggaggtgttcatcccccaggacggcaagaaggtgacctggtactgctgcggccccaccgtgtatgatgccagccacatgggccacgcccggagctacatcagctttgacatcctgcggcgggtgctgaaggactacttcaagtttgatgtgttctactgcatgaacatcacagacattgatgacaagatcatcaagagggcccggcagaaccacctgtttgagcagtaccgggagaagaggcctgaggccgcccagctgctggaggatgtgcaggccgccctgaagcccttctctgtgaagctgaatgagaccacagatcctgacaagaagcagatgctggagcgcatccagcacgctgtgcagctggccacagagcccctggagaaggctgtgcagagccggctgaccggggaggaggtgaacagctgtgtggaggtgctgctggaggaggccaaggacctgctgagtgactggctggacagcaccctgggctgtgatgtgacagacaacagcatcttcagcaagctgcccaagttctgggagggggacttccaccgggacatggaggccctgaatgtgctgcccccagatgtgctgaccagggtgtctgaatatgtgcctgagatcgtgaactttgtgcagaagatcgtggacaatggctacggctacgtgtccaatggatctgtgtactttgacacagccaagtttgccagcagcgagaagcacagctatggcaagctggtgcctgaggccgtgggggaccagaaggccctgcaggagggggagggggacctgagcatctctgctgaccggctgtctgagaagaggagccccaatgactttgccctgtggaaggccagcaagccaggagagcccagctggccctgcccctggggcaagggccggcccggctggcacatcgagtgcagcgccatggccggcaccctgctgggcgcctccatggacatccacggcggcggctttgacctgcgcttcccccaccacgacaatgagctggcccagagcgaggcctactttgaaaatgactgctgggtgcgctacttcctgcacacaggccacctgaccatcgccggctgcaagatgagcaagagcctgaagaacttcatcaccatcaaggatgccctgaagaagcacagcgcccggcagctgcggctggccttcctgatgcacagctggaaggacaccctggactacagcagcaacaccatggagagcgccctgcagtatgagaagttcctgaatgagttcttcctgaatgtgaaggacatcctgcgggcccctgtggacatcaccggccagtttgagaagtggggcgaggaggaggccgagctgaacaagaacttctatgacaagaagacagccatccacaaggccctgtgtgacaacgtggacaccaggacagtgatggaggagatgagggccctggtgtcccagtgcaacctgtacatggccgccaggaaggctgtgaggaagaggcccaaccaggccctgctggagaacatcgccctgtacctgacccacatgctgaagatctttggagctgtggaggaggacagcagcctgggcttccctgtgggcggccctggcaccagcctgagcctggaggccaccgtgatgccctacctgcaggtgctgtctgagttccgggagggcgtgaggaagatcgcccgggagcagaaggtgcctgagatcctgcagctgagtgatgccctgcgggacaacatcctgcctgagctgggcgtgcgctttgaagatcatgagggcctgcccaccgtggtgaagctggtggacaggaacaccctgctgaaggagcgggaggagaagagaagagtggaggaggagaagaggaagaagaaggaggaggccgcccggaggaagcaggagcaggaggccgccaagctggccaagatgaagatccccccatctgagatgttcctgtctgaaacagacaagtacagcaagtttgatgaaaatggcctgcccacccatgacatggagggcaaggagctgagcaagggccaggccaagaagctgaagaagctgtttgaggcccaggagaagctgtacaaggagtacctgcagatggcccagaatggcagcttccagtag

SEQ ID NO: 148944 - DNA, 2247 bp, synthetic construct
  misc_feature 1..2247: note = Description of Artificial Sequence: Synthetic coding sequence
  source 1..2247: mol_type = other DNA
atggctgacagcagcggccagcagggcaagggccggcgggtgcagccccagtggagccccccagctggcacccagccctgccgcctgcacctgtacaacagcctgaccaggaacaaggaggtgttcatcccccaggacggcaagaaggtgacctggtactgctgcggccccaccgtgtatgatgccagccacatgggccacgcccggagctacatcagctttgacatcctgcggcgggtgctgaaggactacttcaagtttgatgtgttctactgcatgaacatcacagacattgatgacaagatcatcaagagggcccggcagaaccacctgtttgagcagtaccgggagaagaggcctgaggccgcccagctgctggaggatgtgcaggccgccctgaagcccttctctgtgaagctgaatgagaccacagatcctgacaagaagcagatgctggagcgcatccagcacgctgtgcagctggccacagagcccctggagaaggctgtgcagagccggctgactggagaggaggtgaacagctgtgtggaggtgctgctggaggaggccaaggacctgctgagtgactggctggacagcaccctgggctgtgatgtgacagacaacagcatcttcagcaagctgcccaagttctgggagggggacttccaccgggacatggaggccctgaatgtgctgcccccagatgtgctgaccagggtgtctgaatatgtgcctgagatcgtgaactttgtgcagaagatcgtggacaatggctacggctacgtgtccaatggatctgtgtactttgacacagccaagtttgccagcagcgagaagcacagctatggcaagctggtgcctgaggccgtgggggaccagaaggccctgcaggagggggagggggacctgagcatctctgctgaccggctgtctgagaagaggagccccaatgactttgccctgtggaaggccagcaagccaggagagcccagctggccctgcccctggggcaagggccggcccggctggcacattgaatgttctgccatggccggcaccctgctgggcgcctccatggacatccatggaggcggctttgacctgcgcttcccccaccacgacaatgagctggcccagagcgaggcctactttgaaaatgactgctgggtgcgctacttcctgcacacaggccacctgaccatcgccggctgcaagatgagcaagagcctgaagaacttcatcaccatcaaggatgccctgaagaagcacagcgcccggcagctgcggctggccttcctgatgcacagctggaaggacaccctggactacagcagcaacaccatggagagcgccctgcagtatgagaagttcctgaatgagttcttcctgaatgtgaaggacatcctgcgggcccctgtggacatcaccggccagtttgagaagtggggcgaggaggaggccgagctgaacaagaacttctatgacaagaagacagccatccacaaggccctgtgtgacaacgtggacaccaggacagtgatggaggagatgagggccctggtgtcccagtgcaacctgtacatggccgccaggaaggctgtgaggaagaggcccaaccaggccctgctggagaacatcgccctgtacctgacccacatgctgaagatctttggagctgtggaggaggacagcagcctgggcttccctgtgggcggccctggcaccagcctgagcctggaggccaccgtgatgccctacctgcaggtgctgtctgagttccgggagggcgtgaggaagatcgcccgggagcagaaggtgcctgagatcctgcagctgagtgatgccctgcgggacaacatcctgcctgagctgggcgtgcgctttgaggaccacgagggcctgcccaccgtggtgaagctggtggacaggaacaccctgctgaaggagcgggaggagaagagaagagtggaggaggagaagaggaagaagaaggaggaggccgcccggaggaagcaggagcaggaggccgccaagctggccaagatgaagatcccccccagcgagatgttcctgtctgaaacagacaagtacagcaagtttgatgaaaatggcctgcccacccatgacatggagggcaaggagctgagcaagggccaggccaagaagctgaagaagctgtttgaggcccaggagaagctgtacaaggagtacctgcagatggcccagaatggcagcttccagtag

SEQ ID NO: 148945 - DNA, 2217 bp, synthetic construct
  misc_feature 1..2217: note = Description of Artificial Sequence: Synthetic coding sequence
  source 1..2217: mol_type = other DNA
atgcagaccccacccctgcagcagccccaccaggagcaggtgttcctggccttcctggtgattgtcatccccagcttcctgaccaaggaggtgttcatcccccaggacggcaagaaggtgacctggtactgctgcggccccaccgtgtatgatgccagccacatgggccacgcccggagctacatcagctttgacatcctgcggcgggtgctgaaggactacttcaagtttgatgtgttctactgcatgaacatcacagacattgatgacaagatcatcaagagggcccggcagaaccacctgtttgagcagtaccgggagaagaggcctgaggccgcccagctgctggaggatgtgcaggccgccctgaagcccttctctgtgaagctgaatgagaccacagatcctgacaagaagcagatgctggagcgcatccagcacgctgtgcagctggccacagagcccctggagaaggctgtgcagagccggctgactggagaggaggtgaacagctgtgtggaggtgctgctggaggaggccaaggacctgctgagtgactggctggacagcaccctgggctgtgatgtgacagacaacagcatcttcagcaagctgcccaagttctgggagggggacttccaccgggacatggaggccctgaatgtgctgcccccagatgtgctgaccagggtgtctgaatatgtgcctgagatcgtgaactttgtgcagaagatcgtggacaatggctacggctacgtgtccaatggatctgtgtactttgacacagccaagtttgccagcagcgagaagcacagctatggcaagctggtgcctgaggccgtgggggaccagaaggccctgcaggagggggagggggacctgagcatctctgctgaccggctgtctgagaagaggagccccaatgactttgccctgtggaaggccagcaagccaggagagcccagctggccctgcccctggggcaagggccggcccggctggcacattgaatgttctgccatggccggcaccctgctgggcgcctccatggacatccatggaggcggctttgacctgcgcttcccccaccacgacaatgagctggcccagagcgaggcctactttgaaaatgactgctgggtgcgctacttcctgcacacaggccacctgaccatcgccggctgcaagatgagcaagagcctgaagaacttcatcaccatcaaggatgccctgaagaagcacagcgcccggcagctgcggctggccttcctgatgcacagctggaaggacaccctggactacagcagcaacaccatggagagcgccctgcagtatgagaagttcctgaatgagttcttcctgaatgtgaaggacatcctgcgggcccctgtggacatcaccggccagtttgagaagtggggcgaggaggaggccgagctgaacaagaacttctatgacaagaagacagccatccacaaggccctgtgtgacaacgtggacaccaggacagtgatggaggagatgagggccctggtgtcccagtgcaacctgtacatggccgccaggaaggctgtgaggaagaggcccaaccaggccctgctggagaacatcgccctgtacctgacccacatgctgaagatctttggagctgtggaggaggacagcagcctgggcttccctgtgggcggccctggcaccagcctgagcctggaggccaccgtgatgccctacctgcaggtgctgtctgagttccgggagggcgtgaggaagatcgcccgggagcagaaggtgcctgagatcctgcagctgagtgatgccctgcgggacaacatcctgcctgagctgggcgtgcgctttgaggaccacgagggcctgcccaccgtggtgaagctggtggacaggaacaccctgctgaaggagcgggaggagaagagaagagtggaggaggagaagaggaagaagaaggaggaggccgcccggaggaagcaggagcaggaggccgccaagctggccaagatgaagatcccccccagcgagatgttcctgtctgaaacagacaagtacagcaagtttgatgaaaatggcctgcccacccatgacatggagggcaaggagctgagcaagggccaggccaagaagctgaagaagctgtttgaggcccaggagaagctgtacaaggagtacctgcagatggcccagaatggcagcttccagtag

SEQ ID NO: 148946 - DNA, 2220 bp, synthetic construct
  misc_feature 1..2220: note = Description of Artificial Sequence: Synthetic coding sequence
  source 1..2220: mol_type = other DNA
atggagcccaccagcggccccttcagaacagacctgggctaccacctggtgggctgcagcagtggaaaaggaagaagagtgcagccccagtggagccccccagctggcacccagccctgccgcctgcacctgtacaacagcctgaccaggaacaaggaggtgttcatcccccaggacggcaagaaggtgacctggtactgctgcggccccaccgtgtatgatgccagccacatgggccacgcccggagctacatcagctttgacatcctgcggcgggtgctgaaggactacttcaagtttgatgtgttctactgcatgaacatcacagacattgatgacaagatcatcaagagggcccggcagaaccacctgtttgagcagtaccgggagaagaggcctgaggccgcccagctgctggaggatgtgcaggccgccctgaagcccttctctgtgaagctgaatgagaccacagatcctgacaagaagcagatgctggagcgcatccagcacgctgtgcagctggccacagagcccctggagaaggctgtgcagagccggctgaccggggaggaggtgaacagctgtgtggaggtgctgctggaggaggccaaggacctgctgagtgactggctggacagcaccctgggctgtgatgtgacagacaacagcatcttcagcaagctgcccaagttctgggagggggacttccaccgggacatggaggccctgaatgtgctgcccccagatgtgctgaccagggtgtctgaatatgtgcctgagatcgtgaactttgtgcagaagatcgtggacaatggctacggctacgtgtccaatggatctgtgtactttgacacagccaagtttgccagcagcgagaagcacagctatggcaagctggtgcctgaggccgtgggggaccagaaggccctgcaggagggggagggggacctgagcatctctgctgaccggctgtctgagaagaggagccccaatgactttgccctgtggaaggccagcaagccaggagagcccagctggccctgcccctggggcaagggccggcccggctggcacatcgagtgcagcgccatggccggcaccctgctgggcgcctccatggacatccacggcggcggctttgacctgcgcttcccccaccacgacaatgagctggcccagagcgaggcctactttgaaaatgactgctgggtgcgctacttcctgcacacaggccacctgaccatcgccggctgcaagatgagcaagagcctgaagaacttcatcaccatcaaggatgccctgaagaagcacagcgcccggcagctgcggctggccttcctgatgcacagctggaaggacaccctggactacagcagcaacaccatggagagcgccctgcagtatgagaagttcctgaatgagttcttcctgaatgtgaaggacatcctgcgggcccctgtggacatcaccggccagtttgagaagtggggcgaggaggaggccgagctgaacaagaacttctatgacaagaagacagccatccacaaggccctgtgtgacaacgtggacaccaggacagtgatggaggagatgagggccctggtgtcccagtgcaacctgtacatggccgccaggaaggctgtgaggaagaggcccaaccaggccctgctggagaacatcgccctgtacctgacccacatgctgaagatctttggagctgtggaggaggacagcagcctgggcttccctgtgggcggccctggcaccagcctgagcctggaggccaccgtgatgccctacctgcaggtgctgtctgagttccgggagggcgtgaggaagatcgcccgggagcagaaggtgcctgagatcctgcagctgagtgatgccctgcgggacaacatcctgcctgagctgggcgtgcgctttgaagatcatgagggcctgcccaccgtggtgaagctggtggacaggaacaccctgctgaaggagcgggaggagaagagaagagtggaggaggagaagaggaagaagaaggaggaggccgcccggaggaagcaggagcaggaggccgccaagctggccaagatgaagatccccccatctgagatgttcctgtctgaaacagacaagtacagcaagtttgatgaaaatgtgtccatggtgtgcccccacatgacctggagggccaagagcagcgccaagggcaagcccaggagctag

SEQ ID NO: 148947 - DNA, 1695 bp, synthetic construct
  misc_feature 1..1695: note = Description of Artificial Sequence: Synthetic coding sequence
  source 1..1695: mol_type = other DNA
atgctgcggaccacccggggccctggcctgggcccccccctgctgcaggccgccctgggcctgggccgggccggctggcactggccagctggccgggccgccagcggcggccggggccgggcctggctgcagcccaccggccgggagaccggggtgcaggtgtacaacagcctgactggaaggaaggagcccctcatcgtggcccacgccgaggccgcctcctggtacagctgtggccccaccgtgtatgaccacgcccacctgggccacgcctgcagctatgtgcgctttgacatcatccgccgcatcctgaccaaggtgtttggctgcagcatcgtgatggtgatgggcatcacagatgtggatgacaagatcatcaagagggccaatgagatgaacatcagccctgccagcctggccagcctgtatgaggaggacttcaagcaggacatggccgccctgaaggtgctgccccccaccgtgtacctgcgggtgacagagaacatcccccagatcatctccttcatcgagggcatcatcgcccggggaaatgcctacagcacagccaagggaaatgtgtactttgacctgaagagcagaggagacaagtatggcaagctggtgggcgtggtgcccggccctgtgggggagcctgctgacagcgacaagagacatgccagtgactttgccctgtggaaggccgccaagccccaggaggtgttctgggccagcccctggggccctggccggcccggctggcacatcgagtgcagcgccatcgcctccatggtgtttggcagccagctggacatccacagcggcggcatcgacctggccttcccccaccatgaaaatgaaattgcccagtgtgaggtgttccaccagtgtgagcagtggggcaactacttcctgcacagcggccacctgcacgccaagggcaaggaggagaagatgagcaagagcctgaagaactacatcaccatcaaggacttcctgaagaccttctccccagatgtgttccgcttcttctgcctgcggagcagctacagaagtgccatcgactacagcgacagcgccatgctgcaggcccagcagctgctgctgggcctgggcagcttcctggaggatgcccgggcctacatgaagggccagctggcctgtggctctgtgcgggaggccatgctgtgggagcggctgagcagcaccaagagagctgtgaaggccgccctggctgatgactttgacaccccccgggtggtggatgccatcctgggcctggcccaccacggcaatggccagctgcgggccagcctgaaggagcctgagggccccaggagccctgctgtgtttggagccatcatctcctactttgagcagttctttgaaacagtgggcatcagcctggccaaccagcagtatgtgtctggagatggcagcgaggccaccctgcacggcgtggtggatgagctggtgcgcttccggcagaaggtgcggcagtttgccctggccatgcctgaggccactggagatgcccggcggcagcagctgctggagcggcagcccctgctggaggcctgtgacaccctgcggcggggcctgacagcccacggcatcaacatcaaggacaggagcagcaccaccagcacctgggagctgctggaccagaggaccaaggaccagaagtctgctggatag

SEQ ID NO: 148948 - DNA, 549 bp, synthetic construct
  misc_feature 1..549: note = Description of Artificial Sequence: Synthetic coding sequence
  source 1..549: mol_type = other DNA
atggtgtttggcagccagctggacatccacagcggcggcatcgacctggccttcccccaccatgaaaatgaaattgcccagtgtgaggtgttccaccagtgtgagcagtggggcaactacttcctgcacagcggccacctgcacgccaagggcaaggaggagaagatgagcaagagcctgaagaactacatcaccatcaaggacttcctgaagaccttctccccagatgtgttccgcttcttctgcctgcggagcagctacagaagtgccatcgactacagcgacagcgccatgctgcaggcccagcagctgctgctgggcctgggcagcttcctggaggatgcccgggcctacatgaagggccagctggcctgtggctctgtgcgggaggccatgctgtgggagcggctgagcagcaccaagagagctgtgaaggccgccctggctgatgactttgacaccccccgggtggtggatgccatcctgggcctggcccaccacggcaatggccagctgcgggccagcctgaagaagccaggcagcgcctag

SEQ ID NO: 148949 - DNA, 441 bp, synthetic construct
  misc_feature 1..441: note = Description of Artificial Sequence: Synthetic coding sequence
  source 1..441: mol_type = other DNA
atggcccagaagaggcctgcctgcaccctgaagccagaatgtgtgcagcagctgctggtgtgcagccaggaggccaagaagagcgcctactgcccctacagccacttccctgtgggcgccgccctgctgacccaggagggccgcatcttcaagggctgcaacattgaaaatgcctgctaccccctgggcatctgtgccgagaggacagccatccagaaggctgtgtctgagggctacaaggacttccgggccatcgccatcgccagtgacatgcaggatgacttcatcagcccctgtggggcctgccggcaggtgatgagggagtttggcaccaactggcctgtgtacatgaccaagccagatggcacctacatcgtgatgacagtgcaggagctgctgcccagcagctttggacctgaggacctgcagaagacccagtag

SEQ ID NO: 148950 - DNA, 687 bp, synthetic construct
  misc_feature 1..687: note = Description of Artificial Sequence: Synthetic coding sequence
  source 1..687: mol_type = other DNA
atgctgagccgctgccgcagcggcctgctgcacgtgctgggcctgtccttcctgctgcagacccggcggcccatcctgctgtgcagcccccggctgatgaagcccctggtggtgtttgtgctgggcggccctggggccggcaagggcacccagtgtgccagaattgtggagaagtatggctacacccacctgtctgctggggagctgctgagagatgagaggaagaacccagacagccagtatggagagctgattgagaagtacatcaaggagggcaagatcgtgcctgtggagatcaccatcagcctgctgaagcgggagatggaccagaccatggccgccaatgcccagaagaacaagttcctgattgatggcttccccaggaaccaggacaacctgcagggctggaacaagaccatggatggcaaggcagatgtgtcctttgtgctcttctttgactgcaacaatgagatctgcatcgagcgctgcctggagcggggcaagagcagcggccgcagtgatgacaaccgggagagcctggagaagaggatccagacctacctgcagagcaccaagcccatcatcgacctgtatgaggagatgggcaaggtgaagaagattgatgccagcaagtctgtggatgaggtgtttgatgaggtggtgcagatctttgacaaggagggctag

SEQ ID NO: 148951 - DNA, 540 bp, synthetic construct
  misc_feature 1..540: note = Description of Artificial Sequence: Synthetic coding sequence
  source 1..540: mol_type = other DNA
atgctgagccgctgccgcagcggcctgctgcacgtgctgggcctgtccttcctgctgcagacccggcggcccatcctgctgtgcagcccccggctgatgaagcccctggtggtgtttgtgctgggcggccctggggccggcaagggcacccagtgtgccagaattgtggaggagatggaccagaccatggccgccaatgcccagaagaacaagttcctgattgatggcttccccaggaaccaggacaacctgcagggctggaacaagaccatggatggcaaggcagatgtgtcctttgtgctcttctttgactgcaacaatgagatctgcatcgagcgctgcctggagcggggcaagagcagcggccgcagtgatgacaaccgggagagcctggagaagaggatccagacctacctgcagagcaccaagcccatcatcgacctgtatgaggagatgggcaaggtgaagaagattgatgccagcaagtctgtggatgaggtgtttgatgaggtggtgcagatctttgacaaggagggctag

SEQ ID NO: 148952 - DNA, 1230 bp, synthetic construct
  misc_feature 1..1230: note = Description of Artificial Sequence: Synthetic coding sequence
  source 1..1230: mol_type = other DNA
atggcctttgcccggcggctgctgcggggccccctgagcggccccctgctgggcagaagaggagtgtgtgccggggccatggcccccccaagaagatttgtgctggagctgcctgactgcaccctggcccactttgccctgggcgcagatgcccctggagatgctgatgccccagacccccggctggccgccctgctgggccccccagagaggagctacagcctgtgtgtgcctgtgaccccagatgctggctgtggggcccgggtgcgggccgcccggctgcaccagaggctgctgcaccagctgcggcggggccccttccagcgctgccagctgctgcggctgctgtgctactgccctgggggccaggccggcggggcccagcagggcttcctgctgcgggaccccctggatgatcctgacacccggcaggccctgctggagctgctgggcgcctgccaggaggccccccggccccacctgggggagtttgaggccgacccccggggccagctgtggcagaggctgtgggaggtgcaggatggaagaaggctgcaggtgggctgtgcccaggtggtgcctgtgcctgagccccccctgcaccctgtggtgcctgacctgcccagctctgtggtgtttcctgaccgggaggccgcccgggctgtgctggaggagtgcaccagcttcatccctgaggcccgggctgtgctggacctggtggaccagtgccccaagcagatccagaagggcaagttccaggtggtggccatcgagggcctggatgccaccgggaagaccaccgtgacccagagcgtggccgacagcctgaaggctgtgctgctgaagagcccccccagctgcatcggccagtggaggaagatctttgatgatgagcccaccatcatcagaagagccttctacagcctgggcaactacatcgtggccagcgagatcgccaaggagagcgccaagagccctgtgattgtggaccgctactggcacagcacagccacctacgccatcgccacagaggtgtctgggggcctgcagcacctgcccccagcccaccaccctgtgtaccagtggccagaggacctgctgaagccagacctgatcctgctgctgactgtgtccccagaggagcggctgcagaggctgcagggccggggcatggagaagacccgggaggaggccgagctggaggccaacagcgtcttccggcagaagtag

SEQ ID NO: 148953 - DNA, 1350 bp, synthetic construct
  misc_feature 1..1350: note = Description of Artificial Sequence: Synthetic coding sequence
  source 1..1350: mol_type = other DNA
atggcctttgcccggcggctgctgcggggccccctgagcggccccctgctgggcagaagaggagtgtgtgccggggccatggcccccccaagaagatttgtgctggagctgcctgactgcaccctggcccactttgccctgggcgcagatgcccctggagatgctgatgccccagacccccggctggccgccctgctgggccccccagagaggagctacagcctgtgtgtgcctgtgaccccagatgctggctgtggggcccgggtgcgggccgcccggctgcaccagaggctgctgcaccagctgcggcggggccccttccagcgctgccagctgctgcggctgctgtgctactgccctgggggccaggccggcggggcccagcagggcttcctgctgcgggaccccctggatgatcctgacacccggcaggccctgctggagctgctgggcgcctgccaggaggccccccggccccacctgggggagtttgaggccgacccccggggccagctgtggcagaggctgtgggaggtgcaggatggaagaaggctgcaggtgggctgtgcccaggtggtgcctgtgcctgagccccccctgcaccctgtggtgcctgacctgcccagctctgtggtgtttcctgaccgggaggccgcccgggctgtgctggaggagtgcaccagcttcatccctgaggcccgggctgtgctggacctggtggaccagtgccccaagcagatccagaagggcaagttccaggtggtggccatcgagggcctggatgccaccgggaagaccaccgtgacccagagcgtggccgacagcctgaaggctgtgctgctgaagagcccccccagctgcatcggccagtggaggaagatctttgatgatgagcccaccatcatcagaagagccttctacagcctgggcaactacatcgtggccagcgagatcgccaaggagagcgccaagagccctgtgattgtggaccgctactggcacagcacagccacctacgccatcgccacagaggtgtctgggggcctgcagcacctgcccccagcccaccaccctgtgtaccagtggccagaggacctgctgaagccagacctgatcctgctgctgactgtgtccccagaggagcggctgcagaggctgcagggccggggcatggagaagacccgggaggaggccgagctggaggccaacagcgtcttccggcagaaggtggagatgagctaccagaggatggagaaccctggctgccacgtggtggatgccagccccagccgggagaaggtgctgcagacagtgctgagcctcatccagaacagcttcagcgagccctag

SEQ ID NO: 148954 - DNA, 1101 bp, synthetic construct
  misc_feature 1..1101: note = Description of Artificial Sequence: Synthetic coding sequence
  source 1..1101: mol_type = other DNA
atggcctttgcccggcggctgctgcggggccccctgagcggccccctgctgggcagaagaggagtgtgtgccggggccatggcccccccaagaagatttgtgctggagctgcctgactgcaccctggcccactttgccctgggcgcagatgcccctggagatgctgatgccccagacccccggctggccgccctgctgggccccccagagaggagctacagcctgtgtgtgcctgtgaccccagatgctggctgtggggcccgggtgcgggccgcccggctgcaccagaggctgctgcaccagctgcggcggggccccttccagcgctgccagctgctgcggctgctgtgctactgccctgggggccaggccggcggggcccagcagggcttcctgctgcgggaccccctggatgatcctgacacccggcaggccctgctggagctgctgggcgcctgccaggaggccccccggccccacctgggggagtttgaggccgacccccggggccagctgtggcagaggctgtgggaggtgcaggatggaagaaggctgcaggtgggctgtgcccaggtggtgcctgtgcctgagccccccctgcaccctgtggtgcctgacctgcccagctctgtggtgtttcctgaccgggaggccgcccgggctgtgctggaggagtgcaccagcttcatccctgaggcccgggctgtgctggacctggtggaccagtgccccaagcagatccagaagggcaagttccaggtggtggccatcgagggcctggatgccaccgggaagaccaccgtgacccagagcgtggccgacagcctgaaggctgtgctgctgaagagcccccccagctgcatcggccagtggaggaagatctttgatgatgagcccaccatcatcagaagagccttctacagcctgggcaactacatcgtggccagcgagatcgccaaggagagcgccaagagccctgtgattgtggacaggagccagctgggcggcaccctgtaccaccccagcctgcacctgctgggcagcgaggtgtgtggcaccggcatcctggacagcagccacagcagccagggcctggagtag

SEQ ID NO: 148955 - DNA, 813 bp, synthetic construct
  misc_feature 1..813: note = Description of Artificial Sequence: Synthetic coding sequence
  source 1..813: mol_type = other DNA
atgggcaacaccagcagcgagagagctgccctggagcggcacggcggccacaagaccccaagaagagacagcagcggcggcaccaaggatggagaccggcccaagatcctgatggacagcccagaagatgctgacctcttccacagcgaggagatcaaggcccctgagaaggaggagttcctggcctggcagcacgacctggaggtgaatgacaaggccccagcccaggcccggcccaccgtcttccgctggacaggaggcggcaaggaggtgtacctgagcggcagcttcaacaactggagcaagctgcccctgaccaggagccacaacaactttgtggccatcctggacctgcctgagggggagcaccagtacaagttctttgtggatggccagtggacccatgaccccagcgagcccatcgtgaccagccagctgggcaccgtgaacaacatcatccaggtgaagaagacagactttgaggtgtttgatgccctgatggtggacagccagaagtgcagtgatgtgtctgagctgagcagcagccccccaggcccctaccaccaggagccctacgtgtgcaagccagaggagcgcttccgggccccacccatcctgcccccccacctgctgcaggtgatcctgaacaaggacaccggcatcagctgtgaccctgccctgctgcctgagcccaaccacgtgatgctgaaccacctgtatgccctgagcatcaaggatggagtgatggtgctgagcgccacccaccgctacaagaagaagtatgtgaccaccctgctgtacaagcccatctag

SEQ ID NO: 148956 - DNA, 588 bp, synthetic construct
  misc_feature 1..588: note = Description of Artificial Sequence: Synthetic coding sequence
  source 1..588: mol_type = other DNA
atgggccagatcgagtgggccatgtgggccaatgagcaggccctggccagcggcctcatcctgatcactggaggcatcgtggccacagctggccgcttcacccagtggtactttggagcctacagcatcgtggccggcgtgtttgtgtgcctgctggagtacccccggggcaagaggaagaagggcagcaccatggagcgctggggccagaagtacatgacagctgtggtgaagctgtttggccccttcaccaggaactactacgtgcgggctgtgctgcacctgctgctgtctgtgcctgctggcttcctgctggccaccatcctgggcacagcctgcctggccatcgccagcggcatctacctgctggccgctgtgcggggggagcagtggacccccatcgagcccaagccccgggagcggccccagatcggcggcaccatcaagcagccccccagcaaccccccacccaggcctcctgctgaggccaggaagaagcccagcgaggaggaggccgctgtggccgccggcggccccccaggcggcccccaggtgaaccccatccctgtgacagatgaggtggtgtag

SEQ ID NO: 148957 - DNA, 1713 bp, synthetic construct
  misc_feature 1..1713: note = Description of Artificial Sequence: Synthetic coding sequence
  source 1..1713: mol_type = other DNA
atgggcaactgggccgtgaatgaaggcctgagcatctttgtgatcctggtgtggctgggcctgaatgtgttcctgtttgtgtggtactacagagtgtatgacatcccccccaagttcttctacaccaggaagctgctgggcagcgccctggccctggcccgggccccagctgcctgcctgaacttcaactgcatgctgatcctgctgcctgtgtgcaggaacctgctgtccttcctgcggggcagcagcgcctgctgcagcaccagggtgcggcggcagctggacaggaacctgaccttccacaagatggtggcctggatgattgccctgcacagcgccatccacaccatcgcccacctgttcaacgtggagtggtgtgtgaatgcccgggtgaacaacagcgacccctacagcgtggccctgtctgagctgggggaccggcagaatgaaagctacctgaactttgccaggaagaggatcaagaaccctgagggcggcctgtacctggccgtgaccctgctggccggcatcaccggggtggtgatcaccctgtgcctgatcctgatcatcaccagcagcaccaagaccatccgccgcagctactttgaggtgttctggtacacccaccacctgtttgtgatcttcttcatcggcctggccatccacggggctgagagaattgtgcggggccagacagctgagagcctggccgtgcacaacatcaccgtgtgtgagcagaagatcagcgagtggggcaagatcaaggagtgccccatcccccagtttgctggcaacccccccatgacctggaagtggatcgtgggccccatgttcctgtacctgtgtgagcggctggtgcgcttctggaggagccagcagaaggtggtgatcaccaaggtggtgacccaccccttcaagaccatcgagctgcagatgaagaagaagggcttcaagatggaggtgggccagtacatctttgtgaagtgccccaaggtgtccaagctggagtggcaccccttcaccctgaccagcgcccctgaggaggacttcttcagcatccacatcagaattgtgggggactggacagagggcctcttcaatgcctgtggctgtgacaagcaggagttccaggatgcctggaagctgcccaagattgctgtggatggcccctttggaacagcctctgaagatgtgttctcctatgaggtggtgatgctggtgggcgccggcattggagtgaccccatttgccagcatcctgaagtctgtgtggtacaagtactgcaacaatgccaccaacctgaagctgaagaagatctacttctactggctgtgccgggacacccacgcctttgagtggtttgctgacctgctgcagctgctggagagccagatgcaggagaggaacaatgccggcttcctgagctacaacatctacctgaccggctgggatgagagccaggccaaccactttgctgtgcaccatgatgaggagaaggatgtgatcaccggcctgaagcagaagaccctgtatggccggcccaactgggacaatgagttcaagaccatcgccagccagcaccccaacacccgcatcggggtcttcctgtgtggccctgaggccctggccgagaccctgagcaagcagagcatcagcaacagcgagagcggcccccggggcgtgcacttcatcttcaacaaggagaacttctag

SEQ ID NO: 148958 - DNA, 912 bp, synthetic construct
  misc_feature 1..912: note = Description of Artificial Sequence: Synthetic coding sequence
  source 1..912: mol_type = other DNA
atgacctggaagtggatcgtgggccccatgttcctgtacctgtgtgagcggctggtgcgcttctggaggagccagcagaaggtggtgatcaccaaggtggtgacccaccccttcaagaccatcgagctgcagatgaagaagaagggcttcaagatggaggtgggccagtacatctttgtgaagtgccccaaggtgtccaagctggagtggcaccccttcaccctgaccagcgcccctgaggaggacttcttcagcatccacatccgcatcgtgggggactggacagagggcctcttcaatgcctgtggctgtgacaagcaggagttccaggatgcctggaagctgcccaagattgctgtggatggccccttcggcacagcctctgaagatgtgttctcctatgaggtggtgatgctggtgggcgccggcatcggcgtgaccccatttgccagcatcctgaagtctgtgtggtacaagtactgcaacaatgccaccaacctgaagctgaagaagatctacttctactggctgtgccgggacacccacgcctttgagtggtttgctgacctgctgcagctgctggagagccagatgcaggagagaaataatgccggcttcctgagctacaacatctacctgaccggctgggatgagagccaggccaaccactttgctgtgcaccatgatgaggagaaggatgtgatcaccggcctgaagcagaagaccctgtatggccggcccaactgggacaatgagttcaagaccatcgccagccagcaccccaacaccagaattggagtcttcctgtgtggccctgaggccctggccgagaccctgagcaagcagagcatcagcaacagcgagagcggcccccggggcgtgcacttcatcttcaacaaggagaacttctag

SEQ ID NO: 148959 - DNA, 1617 bp, synthetic construct
  misc_feature 1..1617: note = Description of Artificial Sequence: Synthetic coding sequence
  source 1..1617: mol_type = other DNA
atgggcaactgggccgtgaatgaaggcctgagcatctttgtgatcagcgccctggccctggcccgggccccagctgcctgcctgaacttcaactgcatgctgatcctgctgcctgtgtgcaggaacctgctgtccttcctgcggggcagcagcgcctgctgcagcaccagggtgcggcggcagctggacaggaacctgaccttccacaagatggtggcctggatgattgccctgcacagcgccatccacaccatcgcccacctgttcaacgtggagtggtgtgtgaatgcccgggtgaacaacagcgacccctacagcgtggccctgtctgagctgggggaccggcagaatgaaagctacctgaactttgccaggaagaggatcaagaaccctgagggcggcctgtacctggccgtgaccctgctggccggcatcaccggggtggtgatcaccctgtgcctgatcctgatcatcaccagcagcaccaagaccatccgccgcagctactttgaggtgttctggtacacccaccacctgtttgtgatcttcttcatcggcctggccatccacggggctgagagaattgtgcggggccagacagctgagagcctggccgtgcacaacatcaccgtgtgtgagcagaagatcagcgagtggggcaagatcaaggagtgccccatcccccagtttgctggcaacccccccatgacctggaagtggatcgtgggccccatgttcctgtacctgtgtgagcggctggtgcgcttctggaggagccagcagaaggtggtgatcaccaaggtggtgacccaccccttcaagaccatcgagctgcagatgaagaagaagggcttcaagatggaggtgggccagtacatctttgtgaagtgccccaaggtgtccaagctggagtggcaccccttcaccctgaccagcgcccctgaggaggacttcttcagcatccacatcagaattgtgggggactggacagagggcctcttcaatgcctgtggctgtgacaagcaggagttccaggatgcctggaagctgcccaagattgctgtggatggcccctttggaacagcctctgaagatgtgttctcctatgaggtggtgatgctggtgggcgccggcattggagtgaccccatttgccagcatcctgaagtctgtgtggtacaagtactgcaacaatgccaccaacctgaagctgaagaagatctacttctactggctgtgccgggacacccacgcctttgagtggtttgctgacctgctgcagctgctggagagccagatgcaggagaggaacaatgccggcttcctgagctacaacatctacctgaccggctgggatgagagccaggccaaccactttgctgtgcaccatgatgaggagaaggatgtgatcaccggcctgaagcagaagaccctgtatggccggcccaactgggacaatgagttcaagaccatcgccagccagcaccccaacacccgcatcggggtcttcctgtgtggccctgaggccctggccgagaccctgagcaagcagagcatcagcaacagcgagagcggcccccggggcgtgcacttcatcttcaacaaggagaacttctag

SEQ ID NO: 148960 - DNA, 714 bp, synthetic construct
  misc_feature 1..714: note = Description of Artificial Sequence: Synthetic coding sequence
  source 1..714: mol_type = other DNA
atgaacagcagaagaagagagcccatcaccctgcaggaccctgaggccaagtaccccctgcccctgattgagaaggagaagatcagccacaacacccggcgcttccgcttcggcctgcccagcccagaccacgtgctgggcctgcctgtgggcaactacgtgcagctgctggccaagattgacaatgagctggtggtgcgggcctacacccctgtgtccagtgatgatgaccggggctttgtggacctgatcatcaagatctacttcaagaatgtgcacccccagtacccagagggcggcaagatgacccagtacctggagaacatgaagattggagagaccatcttcttccggggcccccggggccgcctcttctaccacggccctggcaacctgggcatccggccagaccagaccagcgagcccaagaagaccctggccgaccacctgggcatgattgctgggggcaccggcatcacccccatgctgcagctgatccgccacatcaccaaggaccccagcgacaggaccaggatgagcctcatctttgccaaccagacagaggaggacatcctggtgaggaaggagctggaggagatcgcccggacccacccagaccagttcaacctgtggtacaccctggacaggcctcccatcggcccctggagcgctgagggcgccaccctgctgagcaacagcgcccagttccactag

SEQ ID NO: 148961 - DNA, 831 bp, synthetic construct
  misc_feature 1..831: note = Description of Artificial Sequence: Synthetic coding sequence
  source 1..831: mol_type = other DNA
atgaacagcagaagaagagagcccatcaccctgcaggaccctgaggccaagtaccccctgcccctgattgagaaggagaagatcagccacaacacccggcgcttccgcttcggcctgcccagcccagaccacgtgctgggcctgcctgtgggcaactacgtgcagctgctggccaagattgacaatgagctggtggtgcgggcctacacccctgtgtccagtgatgatgaccggggctttgtggacctgatcatcaagatctacttcaagaatgtgcacccccagtacccagagggcggcaagatgacccagtacctggagaacatgaagattggagagaccatcttcttccggggcccccggggccgcctcttctaccacggccctggcaacctgggcatccggccagaccagaccagcgagcccaagaagaccctggccgaccacctgggcatgattgctgggggcaccggcatcacccccatgctgcagctgatccgccacatcaccaaggaccccagcgacaggaccaggatgagcctcatctttgccaaccagacagaggaggacatcctggtgaggaaggagctggaggagatcgcccggacccacccagaccagttcaacctgtggtacaccctggacaggcctcccatcggctggaagtacagcagcggctttgtgacagctgacatgatcaaggagcacctgcccccaccagccaagagcaccctcatcctggtgtgtggccccccacccctcatccagacagctgcccaccccaacctggagaagctgggctacacccaggacatgatcttcacctactag

SEQ ID NO: 148962 - DNA, 351 bp, synthetic construct
  misc_feature 1..351: note = Description of Artificial Sequence: Synthetic coding sequence
  source 1..351: mol_type = other DNA
atgaacagcagaagaagagagcccatcaccctgcaggaccctgaggccaagtaccccctgcccctgattgagaaggagaagatcagccacaacacccggcgcttccgcttcggcctgcccagcccagaccacgtgctgggcctgcctgtgggcaactacgtgcagctgctggccaagattgacaatgagctggtggtgcgggcctacacccctgtgtccagtgatgatgaccggggctttgtggacctgatcatcaagatctacttcaagaatgtgcacccccagtacccagagggcggcaagatgacccagtacctggagaacatgaagattggagagaccatcttctag

SEQ ID NO: 148963 - DNA, 714 bp, synthetic construct; identical to SEQ ID NO: 148960
  misc_feature 1..714: note = Description of Artificial Sequence: Synthetic coding sequence
  source 1..714: mol_type = other DNA

SEQ ID NO: 148964 - DNA, 441 bp, synthetic construct
  misc_feature 1..441: note = Description of Artificial Sequence: Synthetic coding sequence
  source 1..441: mol_type = other DNA
atgaacagcagaagaagagagcccatcaccctgcaggaccctgaggccaagtaccccctgcccctgattgagaaggagaagatcagccacaacacccggcgcttccgcttcggcctgcccagcccagaccacgtgctgggcctgcctgtgggcaactacgtgcagctgctggccaagattgacaatgagctggtggtgcgggcctacacccctgtgtccagtgatgatgaccggggctttgtggacctgatcatcaagatctacttcaagaatgtgcacccccagtacccagagggcggcaagatgacccagtacctggagaacatgaagattggagagaccatcttcttccggggcccccggggccgcctcttctaccacggccctggcaacctgggcatccggccagaccagaccagcgagcccaagaagaccctgtag

SEQ ID NO: 148965 - DNA, 516 bp, synthetic construct
  misc_feature 1..516: note = Description of Artificial Sequence: Synthetic coding sequence
  source 1..516: mol_type = other DNA
atgaacagcagaagaagagagcccatcaccctgcaggaccctgaggccaagtaccccctgcccctgattgagaaggagaagatcagccacaacacccggcgcttccgcttcggcctgcccagcccagaccacgtgctgggcctgcctgtgggcaactacgtgcagctgctggccaagattgacaatgagctggtggtgcgggcctacacccctgtgtccagtgatgatgaccggggctttgtggacctgatcatcaagatctacttcaagaatgtgcacccccagtacccagagggcggcaagatgacccagtacctggagaacatgaagattggagagaccatcttcttccggggcccccggggccgcctcttctaccacggccctggcaacctgggcatccggccagaccagaccagcgagcccaagaagaccctggccgaccacctgggcatgattgctgggggcaccggcatcacccccatgctgcagctgatccgccacatcaccaagtag

SEQ ID NO: 148966 - DNA, 831 bp, synthetic construct; identical to SEQ ID NO: 148961
  misc_feature 1..831: note = Description of Artificial Sequence: Synthetic coding sequence
  source 1..831: mol_type = other DNA

SEQ ID NO: 148967 - DNA, 906 bp, synthetic construct
  misc_feature 1..906: note = Description of Artificial Sequence: Synthetic coding sequence
  source 1..906: mol_type = other DNA
atgggcgcccagctgagcaccctgggccacatggtgctcttccctgtgtggttcctgtacagcctgctgatgaagctgttccagaggagcaccccagccatcaccctggagagcccagacatcaagtaccccctgcggctgattgaccgggagatcatcagccatgacacccggcgcttccgctttgccctgcccagcccccagcacatcctgggcctgcctgtgggccagcacatctacctgagcgccagaattgatggcaacctggtggtgcggccctacacccccatcagcagtgatgatgacaagggctttgtggacctggtgatcaaggtgtacttcaaggacacccaccccaagtttcctgctgggggcaagatgagccagtacctggagagcatgcagatcggggacaccatcgagttccggggccccagcggcctgctggtgtaccagggcaagggcaagtttgccatccggccagacaagaagagcaaccccatcatcagaacagtgaagtctgtgggcatgattgctgggggcaccggcatcacccccatgctgcaggtgatccgggccatcatgaaggaccctgatgaccacacagtgtgccacctgctgtttgccaaccagacagagaaggacatcctgctgcggcctgagctggaggagctgaggaacaagcacagcgcccgcttcaagctgtggtacaccctggaccgggcccctgaggcctgggactatggccagggctttgtgaatgaggagatgatccgggaccacctgcccccacctgaggaggagcccctggtgctgatgtgtggccccccacccatgatccagtatgcctgcctgcccaacctggaccacgtgggccaccccacagagcgctgctttgtgttctag

SEQ ID NO: 148968 - DNA, 1005 bp, synthetic construct
  misc_feature 1..1005: note = Description of Artificial Sequence: Synthetic coding sequence
  source 1..1005: mol_type = other DNA
atgaacagaagcctgctggtgggctgcatgcagagcaaggacatctggggccgggaggagagcatctgtgagcggctgaagcaggacggcctggatgtggagcgggcagagagctgggagctgggccacatggtgctcttccctgtgtggttcctgtacagcctgctgatgaagctgttccagaggagcaccccagccatcaccctggagagcccagacatcaagtaccccctgcggctgattgaccgggagatcatcagccatgacacccggcgcttccgctttgccctgcccagcccccagcacatcctgggcctgcctgtgggccagcacatctacctgagcgccagaattgatggcaacctggtggtgcggccctacacccccatcagcagtgatgatgacaagggctttgtggacctggtgatcaaggtgtacttcaaggacacccaccccaagtttcctgctgggggcaagatgagccagtacctggagagcatgcagattggagacaccatcgagttccggggccccagcggcctgctggtgtaccagggcaagggcaagtttgccatccggccagacaagaagagcaaccccatcatcagaacagtgaagtctgtgggcatgattgctgggggcaccggcatcacccccatgctgcaggtgatccgggccatcatgaaggaccctgatgaccacacagtgtgccacctgctgtttgccaaccagacagagaaggacatcctgctgcggcctgagctggaggagctgaggaacaagcacagcgcccgcttcaagctgtggtacaccctggaccgggcccctgaggcctgggactatggccagggctttgtgaatgaggagatgatccgggaccacctgcccccacctgaggaggagcccctggtgctgatgtgtggccccccacccatgatccagtatgcctgcctgcccaacctggaccacgtgggccaccccacagagcgctgctttgtgttctag

SEQ ID NO: 148969 - DNA, 837 bp, synthetic construct
  misc_feature 1..837: note = Description of Artificial Sequence: Synthetic coding sequence
  source 1..837: mol_type = other DNA
atgaagctgttccagaggagcaccccagccatcaccctggagagcccagacatcaagtaccccctgcggctgattgaccgggagatcatcagccatgacacccggcgcttccgctttgccctgcccagcccccagcacatcctgggcctgcctgtgggccagcacatctacctgagcgccagaattgatggcaacctggtggtgcggccctacacccccatcagcagtgatgatgacaagggctttgtggacctggtgatcaaggtgtacttcaaggacacccaccccaagtttcctgctgggggcaagatgagccagtacctggagagcatgcagattggagacaccatcgagttccggggccccagcggcctgctggtgtaccagggcaagggcaagtttgccatccggccagacaagaagagcaaccccatcatcagaacagtgaagtctgtgggcatgattgctgggggcaccggcatcacccccatgctgcaggtgatccgggccatcatgaaggaccctgatgaccacacagtgtgccacctgctgtttgccaaccagacagagaaggacatcctgctgcggcctgagctggaggagctgaggaacaagcacagcgcccgcttcaagctgtggtacaccctggaccgggcccctgaggcctgggactatggccagggctttgtgaatgaggagatgatccgggaccacctgcccccacctgaggaggagcccctggtgctgatgtgtggccccccacccatgatccagtatgcctgcctgcccaacctggaccacgtgggccaccccacagagcgctgctttgtgttctag

SEQ ID NO: 148970 - DNA, 837 bp, synthetic construct; identical to SEQ ID NO: 148969
  misc_feature 1..837: note = Description of Artificial Sequence: Synthetic coding sequence
  source 1..837: mol_type = other DNA

SEQ ID NO: 148971 - DNA, 837 bp, synthetic construct; identical to SEQ ID NO: 148969
  misc_feature 1..837: note = Description of Artificial Sequence: Synthetic coding sequence
  source 1..837: mol_type = other DNA

SEQ ID NO: 148972 - DNA, 837 bp, synthetic construct; identical to SEQ ID NO: 148969
  misc_feature 1..837: note = Description of Artificial Sequence: Synthetic coding sequence
  source 1..837: mol_type = other DNA

SEQ ID NO: 148973 - DNA, 444 bp, synthetic construct
  misc_feature 1..444: note = Description of Artificial Sequence: Synthetic coding sequence
  source 1..444: mol_type = other DNA
atgaagctgttccagaggagcaccccagccatcaccctggagagcccagacatcaagtaccccctgcggctgattgaccgggagatcatcagccatgacacccggcgcttccgctttgccctgcccagcccccagcacatcctgggcctgcctgtgggccagcacatctacctgagcgccagaattgatggcaacctggtggtgcggccctacacccccatcagcagtgatgatgacaagggctttgtggacctggtgatcaaggtgtacttcaaggacacccaccccaagtttcctgctgggggcaagatgagccagtacctggagagcatgcagattggagacaccatcgagttccggggccccagcggcctgctggtgtaccagggcaagggcaagtttgccatccggccagacaagaagagcaaccccatcatcagatag

SEQ ID NO: 148974 - DNA, 330 bp, synthetic construct
  misc_feature 1..330: note = Description of Artificial Sequence: Synthetic coding sequence
  source 1..330: mol_type = other DNA
atggactggatccggctgaccaagagcggcaaggacctgaccggcctgaagggccgcctgattgaggtgacagaggaggagctgaagaagcacaacaagaaggatgactgctggatctgcatccggggctttgtgtacaacgtgagcccctacatggagtaccaccctggaggagaagatgagctgatgagagctgctggcagtgatggaacagagctgtttgaccaggtgcaccgctgggtgaactatgaatccatgctgaaggaatgtctggtgggccgcatggccatcaagccagctgtgctgaagggcaagctgtggcacctgtag

SEQ ID NO: 148975 - DNA, 1566 bp, synthetic construct
  misc_feature 1..1566: note = Description of Artificial Sequence: Synthetic coding sequence
  source 1..1566: mol_type = other DNA
atgctgaatgtgcccagccagagcttccctgcccccaggagccagcagagggtggccagcggcggccgcagcaaggtgcccctgaagcagggccgcagcctgatggactggatccggctgaccaagagcggcaaggacctgaccggcctgaagggccgcctgattgaggtgacagaggaggagctgaagaagcacaacaagaaggatgactgctggatctgcatccggggctttgtgtacaacgtgagcccctacatggagtaccaccctggaggagaagatgagctgatgagagctgctggcagtgatggaacagagctgtttgaccaggtgcaccgctgggtgaactatgaatccatgctgaaggaatgtctggtgggccgcatggccatcaagccagctgtgctgaaggactaccgggaggaggagaagaaggtgctgaatggcatgctgcccaagagccaggtgacagacaccctggccaaggagggccccagctaccccagctatgactggttccagacagacagcctggtgaccatcgccatctacaccaagcagaaggacatcaacctggacagcatcatcgtggaccaccagaatgacagcttccgggcagagaccatcatcaaggactgcctgtacctgatccacatcggcctgagccatgaggtgcaggaggacttctctgtgcgggtggtggagagcgtgggcaagattgagatcgtgctgcagaagaaggagaacacctcctgggacttcctgggccaccccctgaagaaccacaacagcctcatccccaggaaggacaccggcctgtactacaggaagtgccagctgatcagcaaggaggatgtgacccatgacaccaggctcttctgcctgatgctgccccccagcacccacctgcaggtgcccatcggccagcacgtgtacctgaagctgcccatcaccggcacagagatcgtgaagccctacacccctgtgtctggcagcctgctgtctgagttcaaggagcctgtgctgcccaacaacaagtacatctacttcctgatcaagatctaccccaccggcctcttcaccccagagctggaccggctgcagattggagactttgtgtctgtgagcagccctgagggcaacttcaagatcagcaagttccaggagctggaggacctcttcctgctggccgccggcaccggcttcacccccatggtgaagatcctgaactatgccctgacagacatccccagcctgaggaaggtgaagctgatgttcttcaacaagacagaagatgacatcatctggaggagccagctggagaagctggccttcaaggacaagaggctggatgtggagtttgtgctgagcgcccccatcagcgagtggaatggcaagcagggccacatcagccctgccctgctgtctgagttcctgaagaggaacctggacaagagcaaggtgctggtgtgcatctgtggccctgtgcccttcacagagcagggcgtgcggctgctgcatgacctgaacttcagcaagaatgagatccacagcttcaccgcctag

SEQ ID NO: 148976 - DNA, 297 bp, synthetic construct
  misc_feature 1..297: note = Description of Artificial Sequence: Synthetic coding sequence
  source 1..297: mol_type = other DNA
atggccgagcagagtgatgaggccgtgaagtactacaccctggaggagatccagaagcacaaccacagcaagagcacctggctgatcctgcaccacaaggtgtatgacctgaccaagttcctggaggagcaccctggaggagaggaggtgctgcgggagcaggccggaggagatgccacagaaaattttgaagatgtgggccacagcacagatgcccgggagatgagcaagaccttcatcattggagagctgcacccagatgaccggcccaagctgaacaagccacccaagccctag

SEQ ID NO: 148977 - DNA, 405 bp, synthetic construct
  misc_feature 1..405: note = Description of Artificial Sequence: Synthetic coding sequence
  source 1..405: mol_type = other DNA
atggccgagcagagtgatgaggccgtgaagtactacaccctggaggagatccagaagcacaaccacagcaagagcacctggctgatcctgcaccacaaggtgtatgacctgaccaagttcctggaggagcaccctggaggagaggaggtgctgcgggagcaggccggaggagatgccacagaaaattttgaagatgtgggccacagcacagatgcccgggagatgagcaagaccttcatcattggagagctgcacccagatgaccggcccaagctgaacaagcccccagagaccctcatcaccaccatcgacagcagcagctcctggtggaccaactgggtgatcccagccatctctgctgtggccgtggccctgatgtaccgcctgtacatggctgaagattag

SEQ ID NO: 148978 - DNA, 375 bp, synthetic construct
  misc_feature 1..375: note = Description of Artificial Sequence: Synthetic coding sequence
  source 1..375: mol_type = other DNA
atggccgagcagagtgatgaggccgtgaagtactacaccctggaggagatccagaagcacaaccacagcaagagcacctggctgatcctgcaccacaaggtgtatgacctgaccaagttcctggaggagcaccctggaggagaggaggtgctgcgggagcaggccggaggagatgccacagaaaattttgaagatgtgggccacagcacagatgcccgggagatgagcaagaccttcatcattggagagctgcaccctgagaccctcatcaccaccatcgacagcagcagctcctggtggaccaactgggtgatcccagccatctctgctgtggccgtggccctgatgtaccgcctgtacatggctgaagattag

SEQ ID NO: 148979 - DNA, 297 bp, synthetic construct
  misc_feature 1..297: note = Description of Artificial Sequence: Synthetic coding sequence
  source 1..297: mol_type = other DNA
atggccgagcagagtgatgaggccgtgaagtactacaccctggaggagatccagaagcacaaccacagcaagagcacctggctgatcctgcaccacaaggtgtatgacctgaccaagttcctggaggagcaccctggaggagaggaggtgctgcgggagcaggccggaggagatgccacagaaaattttgaagatgtgggccacagcacagatgcccgggagatgagcaagaccttcatcattggagagctgcacccagatgaccggcccaagctgaacaagcccccagagccctag

SEQ ID NO: 148980 - DNA, 453 bp, synthetic construct
  misc_feature 1..453: note = Description of Artificial Sequence: Synthetic coding sequence
  source 1..453: mol_type = other DNA
atgagcggctccatggccacagctgaggccagcggcagtgatggcaagggccaggaggtggagacctctgtgacctactaccgcctggaggaggtggccaagaggaacagcctgaaggagctgtggctggtgatccacggccgggtgtatgatgtgacccgcttcctgaatgagcaccctggaggagaggaggtgctgctggagcaggccggcgtggatgccagcgagagctttgaagatgtgggccacagcagtgatgcccgggagatgctgaagcagtactacatcggggacatccaccccagcgacctgaagccagagagcggcagcaaggaccccagcaagaatgacacctgcaagagctgctgggcctactggatcctgcccatcattggagctgtgctgctgggcttcctgtaccgctactacaccagcgagagcaagagcagctag

SEQ ID NO: 148981 - DNA, 441 bp, synthetic construct
  misc_feature 1..441: note = Description of Artificial Sequence: Synthetic coding sequence
  source 1..441: mol_type = other DNA
atggccacagctgaggccagcggcagtgatggcaagggccaggaggtggagacctctgtgacctactaccgcctggaggaggtggccaagaggaacagcctgaaggagctgtggctggtgatccacggccgggtgtatgatgtgacccgcttcctgaatgagcaccctggaggagaggaggtgctgctggagcaggccggcgtggatgccagcgagagctttgaagatgtgggccacagcagtgatgcccgggagatgctgaagcagtactacatcggggacatccaccccagcgacctgaagccagagagcggcagcaaggaccccagcaagaatgacacctgcaagagctgctgggcctactggatcctgcccatcattggagctgtgctgctgggcttcctgtaccgctactacaccagcgagagcaagagcagctag

SEQ ID NO: 148982 - DNA, 756 bp, synthetic construct
  misc_feature 1..756: note = Description of Artificial Sequence: Synthetic coding sequence
  source 1..756: mol_type = other DNA
atggagggcggcgctgctgctgccacccccacagccctgccctactacgtggccttcagccagctgctgggcctgaccctggtggccatgactggagcctggctgggcctgtaccggggcggcatcgcctgggagagtgacctgcagttcaatgcccaccccctgtgcatggtgattggcctcatcttcctgcagggcaatgccctgctggtgtacagagtcttcagaaatgaggccaagaggaccaccaaggtgctgcacggcctgctgcacatctttgccctggtgattgccctggtgggcctggtggccgtgtttgactaccacaggaagaagggctatgctgacctgtacagcctgcacagctggtgtggcatcctggtgtttgtgctgtactttgtgcagtggctggtgggcttctccttcttcctgtttcctggggccagcttcagcctgcggagccgctaccggccccagcacatcttctttggagccaccatcttcctgctgtctgtgggcacagccctgctgggcctgaaggaggccctgctcttcaacctgggcggcaagtacagcgcctttgagcctgagggcgtgctggccaacgtgctgggcctgctgctggcctgctttggaggagctgtgctgtacatcctgaccagggctgactggaagaggcccagccaggccgaggagcaggccctgtccatggacttcaagaccctgacagaaggagacagccctggcagccagtag

SEQ ID NO: 148983 - DNA, 756 bp, synthetic construct; identical to SEQ ID NO: 148982
  misc_feature 1..756: note = Description of Artificial Sequence: Synthetic coding sequence
  source 1..756: mol_type = other DNA

SEQ ID NO: 148984 - DNA, 756 bp, synthetic construct; identical to SEQ ID NO: 148982
  misc_feature 1..756: note = Description of Artificial Sequence: Synthetic coding sequence
  source 1..756: mol_type = other DNA

SEQ ID NO: 148985 - DNA, 417 bp, synthetic construct
  misc_feature 1..417: note = Description of Artificial Sequence: Synthetic coding sequence
  source 1..417: mol_type = other DNA
atggagggcggcgctgctgctgccacccccacagccctgccctactacgtggccttcagccagctgctgggcctgaccctggtggccatgactggagcctggctgggcctgtaccggggcggcatcgcctgggagagtgacctgcagttcaatgcccaccccctgtgcatggtgattggcctcatcttcctgcagggcaatgccctgctggtgtacagagtcttcagaaatgaggccaagaggaccaccaaggtgctgcacggcctgctgcacatctttgccctggtgattgccctggtgggcctggtggccgtgtttgactaccacaggaagaagggctatgctgacctgtacagcctgcacagctggtgtggcatcctggtgtttgtgctgtactttgtgcagggccaggtgtag

SEQ ID NO: 148986 - DNA, 957 bp, synthetic construct
  misc_feature 1..957: note = Description of Artificial Sequence: Synthetic coding sequence
  source 1..957: mol_type = other DNA
atgaagcagaagaccaagccaggcaccggccccctgagcagcctggagtttggagtgtccttcctggcccccagcccccacatggagctgctggccagctgccccaggagccggctgagcccctggggcggctgggcccccccacccagccacagccgggacctgcggcccctgccccaggatgatggagtgtgcctgtccatggagggcggcgctgctgctgccacccccacagccctgccctactacgtggccttcagccagctgctgggcctgaccctggtggccatgaccggggcctggctgggcctgtacagaggaggcatcgcctgggagagtgacctgcagttcaatgcccaccccctgtgcatggtgattggcctcatcttcctgcagggcaatgccctgctggtgtacagagtcttcagaaatgaggccaagaggaccaccaaggtgctgcacggcctgctgcacatctttgccctggtgattgccctggtgggcctggtggccgtgtttgactaccacaggaagaagggctacgccgacctgtacagcctgcacagctggtgtggcatcctggtgtttgtgctgtactttgtgcagtggctggtgggcttctccttcttcctgtttcctggggccagcttcagcctgcggagccgctaccggccccagcacatcttcttcggggccaccatcttcctgctgtctgtgggcacagccctgctgggcctgaaggaggccctgctcttcaacctgggcggcaagtacagcgcctttgagcctgagggcgtgctggccaacgtgctgggcctgctgctggcctgcttcggcggcgctgtgctgtacatcctgaccagggctgactggaagaggcccagccaggccgaggagcaggccctgtccatggacttcaagaccctgacagaaggagacagccctggcagccagtag

SEQ ID NO: 148987 - DNA, 1143 bp, synthetic construct
  misc_feature 1..1143: note = Description of Artificial Sequence: Synthetic coding sequence
  source 1..1143: mol_type = other DNA
atgggcagcggctgcagaattgagtgcatcttcttcagcgagttccaccccaccctgggccccaagatcacctaccaggtgcctgaggacttcatcagccgggagctgtttgacacagtgcaggtgtacatcatcaccaagccagagctgcagaacaagctgatcaccgtgacagccatggagaagaagctgattggctgccctgtgtgcatcgagcacaagaagtacagcagaaatgccctgctcttcaacctgggctttgtgtgtgatgcccaggccaagacctgtgccctggagcccatcgtgaagaagctggccggctacctgaccaccctggagctggagagcagctttgtgtccatggaggagagcaagcagaagctggtgcccatcatgaccatcctgctggaggagctgaatgccagcggccgctgcaccctgcccattgatgagagcaacaccatccacctgaaggtgattgagcagaggccagacccccctgtggcccaggagtatgatgtgcctgtgttcaccaaggacaaggaggacttcttcaacagccagtgggacctgaccacccagcagatcctgccctacattgatggcttccgccacatccagaagatctctgctgaggctgatgtggagctgaacctggtgcgcatcgccatccagaacctgctgtactacggcgtggtgaccctggtgtccatcctgcagtacagcaatgtgtactgccccacccccaaggtgcaggacctggtggatgacaagagcctgcaggaggcctgcctgtcctatgtgaccaagcagggccacaagagggccagcctgagagatgtgttccagctgtactgcagcctgagccctggcaccaccgtgcgggacctgattggccgccacccccagcagctgcagcacgtggatgagaggaagctgatccagtttggcctgatgaagaacctgatccggcggctgcagaagtaccctgtgcgggtgacccgggaggagcagagccacccagcccggctgtacacaggctgccacagctatgatgagatctgctgcaagacaggcatgagctaccacgagctggatgagcggctggagaatgaccccaacatcatcatctgctggaagtag

SEQ ID NO: 148988 - DNA, 669 bp, synthetic construct
  misc_feature 1..669: note = Description of Artificial Sequence: Synthetic coding sequence
  source 1..669: mol_type = other DNA
atggccctgtctgctgagacagagagccacatctaccgggccctgaggacagccagcggggccgccgcccacctggtggccctgggcttcaccatctttgtggccgtgctggcccggcccggcagcagcctcttctcctggcaccctgtgctgatgagcctggccttctccttcctgatgacagaggccctgctggtgttcagccctgagagcagcctgctgcacagcctgagcaggaagggccgggcccgctgccactgggtgctgcagctgctggccctgctgtgtgccctgctgggcctgggcctggtgatcctgcacaaggagcagctgggcaaggcccacctggtgaccaggcatggccaggccggcctgctggccgtgctgtgggccggcctgcagtgcagcggcggcgtgggcctgctgtaccccaagctgctgccccgctggcccctggccaagctgaagctgtaccacgccaccagcggcctggtgggctacctgctgggcagcgccagcctgctgctgggcatgtgcagcctgtggttcaccgcctctgtgactggagctgcctggtacctggccgtgctgtgccctgtgctgaccagcctggtgatcatgaaccaggtgtccaatgcctacctgtacaggaagaggatccagccctag

SEQ ID NO: 148989 - DNA, 669 bp, synthetic construct; identical to SEQ ID NO: 148988
  misc_feature 1..669: note = Description of Artificial Sequence: Synthetic coding sequence
  source 1..669: mol_type = other DNA

SEQ ID NO: 148990 - DNA, 669 bp, synthetic construct; identical to SEQ ID NO: 148988
  misc_feature 1..669: note = Description of Artificial Sequence: Synthetic coding sequence
  source 1..669: mol_type = other DNA

SEQ ID NO: 148991 - DNA, 696 bp, synthetic construct
  misc_feature 1..696: note = Description of Artificial Sequence: Synthetic coding sequence
  source 1..696: mol_type = other DNA
atgggcggcctgtggaggcctggctggaggtgtgtgcccttctgtggctggcgctggatccaccctggcagccccaccagggctgctgagcgggtggagcccttcctgcggcctgagtggagcggcactggaggagctgagcggggcctgcgctggctgggcacctggaagcgctgcagcctgcgggcccggcacccagccctgcagcccccccggcggcccaagagcagcaaccccttcacccgggcccaggaggaggagcggcggcggcagaacaagaccaccctgacctacgtggccgctgtggccgtgggcatgctgggcgccagctatgctgctgtgcccctgtaccgcctgtactgccagaccaccggcctgggcggcagcgctgtggccggccacgccagtgacaagattgagaacatggtgcctgtgaaggaccgcatcatcaagatctccttcaatgctgatgtgcacgccagcctgcagtggaacttccggccccagcagacagagatctacgtggtgcctggagaaacagccctggccttctaccgggccaagaaccccacagacaagcctgtgattggcatcagcacctacaacatcgtgccctttgaggccggccagtacttcaacaagatccaggccagcaagctgcaccgggtgtatgtgctggagagctggcacctgtag

SEQ ID NO: 148992 - DNA, 510 bp, synthetic construct
  misc_feature 1..510: note = Description of Artificial Sequence: Synthetic coding sequence
  source 1..510: mol_type = other DNA
atgctggccaccagggtcttcagcctggtgggcaagagggccatcagcacctctgtgtgtgtgcgggcccacgagagcgtggtgaagtctgaggacttcagcctgcctgcctacatggacagaagagaccaccccctgcctgaggtggcccacgtgaagcacctgagcgccagccagaaggccctgaaggagaaggagaaggcctcctggagcagcctgtccatggatgagaaggtggagctgtaccgcatcaagttcaaggagagctttgctgagatgaacagaggcagcaatgagtggaagacagtggtgggcggggccatgttcttcatcggcttcaccgccctggtgatcatgtggcagaagcactacgtgtatggccccctgccccagagctttgacaaggagtgggtggccaagcagaccaagaggatgctggacatgaaggtgaaccccatccagggcctggccagcaagtgggactatgagaagaatgagtggaagaagtag

SEQ ID NO: 148993 - DNA, 516 bp, synthetic construct
  misc_feature 1..516: note = Description of Artificial Sequence: Synthetic coding sequence
  source 1..516: mol_type = other DNA
atgctgcccagggctgcctggagcctggtgctgaggaaaggaggcggcggccggcggggcatgcacagcagcgagggcaccacccggggcggcggcaagatgagcccctacaccaactgctacgcccagcgctactaccccatgcctgaggagcccttctgcacagagctgaatgctgaggagcaggccctgaaggagaaggagaagggctcctggacccagctgacccacgccgagaaggtggccctgtaccgcctgcagttcaatgagacctttgctgagatgaacagaagaagcaatgagtggaagacagtgatgggctgtgtgttcttcttcatcggctttgctgccctggtgatctggtggcagagggtgtatgtgtttcctcccaagcccatcaccctgacagatgagaggaaggcccagcagctgcagaggatgctggacatgaaggtgaaccctgtgcagggcctggccagccgctgggactatgagaagaagcagtggaagaagtag

SEQ ID NO: 148994 - DNA, 390 bp, synthetic construct
  misc_feature 1..390: note = Description of Artificial Sequence: Synthetic coding sequence
  source 1..390: mol_type = other DNA
atggccagccggctgctgcggggagctggcaccctggccgcccaggccctgcgggcccggggccccagcggggccgccgccatgaggtccatggccagcggcggcggcgtgcccacagatgaggagcaggccaccggcctggagcgggagatcatgctggccgccaagaagggcctggacccctacaacgtgctggcccccaagggggccagcggcacccgggaggaccccaacctggtgcccagcatcagcaacaagagaattgtgggctgcatctgtgaggaggacaacacctctgtggtgtggttctggctgcacaagggggaggcccagcgctgcccccgctgtggggcccactacaagctggtgccccagcagctggcccactag

SEQ ID NO: 148995 - DNA, 606 bp, synthetic construct
  misc_feature 1..606: note = Description of Artificial Sequence: Synthetic coding sequence
  source 1..606: mol_type = other DNA
atggcccgggactatgaccacctgttcaagctgctgatcatcggggacagcggcgtgggcaagagcagcctgctgctgcgctttgctgacaacaccttcagcggcagctacatcaccaccatcggcgtggacttcaagatcagaacagtggagatcaatggagagaaggtgaagctgcagatctgggacacagctggccaggagcgcttccgcaccatcaccagcacctactaccggggcacccacggcgtgattgtggtgtatgatgtgaccagcgctgagagctttgtgaatgtgaagcgctggctgcacgagatcaaccagaactgtgatgatgtgtgccgcatcctggtgggcaacaagaatgatgatcctgagaggaaggtggtggagacagaagatgcctacaagtttgctggccagatgggcatccagctgtttgagaccagcgccaaggaaaatgtgaatgtggaggagatgttcaactgcatcacagagctggtgctgcgggccaagaaggacaacctggccaagcagcagcagcagcagcagaatgatgtggtgaagctgaccaagaacagcaagaggaagaagcgctgctgctag

SEQ ID NO: 148996 - DNA, 261 bp, synthetic construct
  misc_feature 1..261: note = Description of Artificial Sequence: Synthetic coding sequence
  source 1..261: mol_type = other DNA
atggccgaggacatggagaccaagatcaagaactacaagacagccccctttgacagccgcttccccaaccagaaccagaccaggaactgctggcagaactacctggacttccaccgctgccagaaggccatgacagccaagggcggggacatctctgtgtgtgagtggtaccagagggtgtaccagagcctgtgccccacctcctgggtgacagactgggatgagcagagagctgagggcaccttccctgggaagatctag

SEQ ID NO: 148997 - DNA, 312 bp, synthetic construct
  misc_feature 1..312: note = Description of Artificial Sequence: Synthetic coding sequence
  source 1..312: mol_type = other DNA
atgcacccccacccccagatccctggccgggacctggccggcttcagcaccatggccgaggacatggagaccaagatcaagaactacaagacagccccctttgacagccgcttccccaaccagaaccagaccaggaactgctggcagaactacctggacttccaccgctgccagaaggccatgacagccaagggcggggacatctctgtgtgtgagtggtaccagagggtgtaccagagcctgtgccccacctcctgggtgacagactgggatgagcagagagctgagggcaccttccctgggaagatctag

SEQ ID NO: 148998 - DNA, 228 bp, synthetic construct
  misc_feature 1..228: note = Description of Artificial Sequence: Synthetic coding sequence
  source 1..228: mol_type = other DNA
atggcccctgaggtgctgcccaagcccaggatgaggggcctgctggcccggcggctgaggaaccacatggctgtggcctttgtgctgagcctgggcgtggccgccctgtacaagttccgggtggccgaccagaggaagaaggcctatgctgacttctacagaaattatgatgtgatgaaggactttgaggagatgaggaaggccggcatcttccagagcgtgaagtag

SEQ ID NO: 148999 - DNA, 228 bp, synthetic construct; identical to SEQ ID NO: 148998
  misc_feature 1..228: note = Description of Artificial Sequence: Synthetic coding sequence
  source 1..228: mol_type = other DNA

SEQ ID NO: 149000 - DNA, 228 bp, synthetic construct; identical to SEQ ID NO: 148998
  misc_feature 1..228: note = Description of Artificial Sequence: Synthetic coding sequence
  source 1..228: mol_type = other DNA

SEQ ID NO: 149001 - DNA, 228 bp, synthetic construct; identical to SEQ ID NO: 148998
  misc_feature 1..228: note = Description of Artificial Sequence: Synthetic coding sequence
  source 1..228: mol_type = other DNA

SEQ ID NO: 149002 - DNA, 228 bp, synthetic construct; identical to SEQ ID NO: 148998
  misc_feature 1..228: note = Description of Artificial Sequence: Synthetic coding sequence
  source 1..228: mol_type = other DNA

SEQ ID NO: 149003 - DNA, 228 bp, synthetic construct; identical to SEQ ID NO: 148998
  misc_feature 1..228: note = Description of Artificial Sequence: Synthetic coding sequence
  source 1..228: mol_type = other DNA

SEQ ID NO: 149004 - DNA, 228 bp, synthetic construct; identical to SEQ ID NO: 148998
  misc_feature 1..228: note = Description of Artificial Sequence: Synthetic coding sequence
  source 1..228: mol_type = other DNA

SEQ ID NO: 149005 - DNA, 228 bp, synthetic construct; identical to SEQ ID NO: 148998
  misc_feature 1..228: note = Description of Artificial Sequence: Synthetic coding sequence
  source 1..228: mol_type = other DNA

SEQ ID NO: 149006 - DNA, 228 bp, synthetic construct; identical to SEQ ID NO: 148998
  misc_feature 1..228: note = Description of Artificial Sequence: Synthetic coding sequence
  source 1..228: mol_type = other DNA

SEQ ID NO: 149007 - DNA, 228 bp, synthetic construct; identical to SEQ ID NO: 148998
  misc_feature 1..228: note = Description of Artificial Sequence: Synthetic coding sequence
  source 1..228: mol_type = other DNA

SEQ ID NO: 149008 - DNA, 240 bp, synthetic construct
  misc_feature 1..240: note = Description of Artificial Sequence: Synthetic coding sequence
  source 1..240: mol_type = other DNA
atgcaggccctgcgggtgtcccaggccctgatccgctccttcagcagcacagccaggaaccgcttccagaacagagtgcgggagaagcagaagctgttccaggaggacaatgacatccccctgtacctgaagggcggcatcgtggacaacatcctgtacagagtgaccatgaccctgtgcctgggcggcaccgtgtacagcctgtacagcctgggctgggccagcttccccaggaactag

SEQ ID NO: 149009 - DNA, 330 bp, synthetic construct
  misc_feature 1..330: note = Description of Artificial Sequence: Synthetic coding sequence
  source 1..330: mol_type = other DNA
tgaagcttctgggtgctgagcctgcccggccccagccggcagcccggccacccccaggcccggctgcagggcgagagcccccccaacccagctggcagcagccgggtgtcccaggccctgatccgctccttcagcagcacagccaggaaccgcttccagaacagagtgcgggagaagcagaagctgttccaggaggacaatgacatccccctgtacctgaagggcggcatcgtggacaacatcctgtacagagtgaccatgaccctgtgcctgggcggcaccgtgtacagcctgtacagcctgggctgggccagcttccccaggaactag

SEQ ID NO: 149010 - DNA, 2775 bp, synthetic construct
  misc_feature 1..2775: note = Description of Artificial Sequence: Synthetic coding sequence
  source 1..2775: mol_type = other DNA
atgagccgcagccggcagccccccctggtgacaggcatcagccccaatgaaggcatcccctggaccaaggtgaccatcagaggagagaacctgggcaccggccccacagacctgattggcctgaccatctgtggccacaactgcctgctgacagctgagtggatgtctgccagcaagatcgtgtgccgggtgggccaggccaagaatgacaagggggacatcatcgtgaccaccaagagcggcggccggggcaccagcacagtgtccttcaagctgctgaagccagagaagattggcatcctggaccagagcgctgtgtgggtggatgagatgaactactatgacatgaggacagacaggaacaagggcatcccccccctgagcctgcggcctgccaaccccctgggcattgaaattgagaagagcaagttcagccagaaggacctggagatgctgttccacggcatgtctgctgacttcaccagcgagaacttctctgctgcctggtacctgattgagaaccacagcaacaccagctttgagcagctgaagatggctgtgaccaacctgaagaggcaggccaacaagaagtctgagggcagcctggcctacgtgaagggcggcctgagcaccttctttgaggcccaggatgccctgagcgccatccaccagaagctggaggctgatggaacagagaaggtggagggctccatgacccagaagctggagaatgtgctgaacagagccagcaacacagctgacaccctcttccaggaggtgctgggcaggaaggacaaggctgacagcaccagaaatgccctgaatgtgctgcagcgcttcaagttcctgttcaacctgcccctgaacatcgagaggaacatccagaagggggactatgatgtggtgatcaatgactatgagaaggccaagagcctgtttgggaagacagaggtgcaggtgttcaagaagtactatgcagaggtggagacccgcatcgaggccctgcgggagctgctgctggacaagctgctggagacccccagcaccctgcatgaccagaagcgctacatccgctacctgagtgacctgcacgccagcggggaccctgcctggcagtgcatcggggcccagcacaagtggatcctgcagctgatgcacagctgcaaggagggctacgtgaaggacctgaagggcaaccctggcctgcacagccccatgctggacctggacaatgacacccggcccagcgtgctgggccacctgagccagacagccagcctgaagaggggcagcagcttccagagcggcagagatgacacctggagatacaagaccccccaccgggtggcctttgtggagaagctgaccaagctggtgctgagccagctgcccaacttctggaagctgtggatctcctatgtgaatggcagcctcttcagcgagacagctgagaagagcggccagatcgagaggagcaagaatgtgcggcagaggcagaatgacttcaagaagatgatccaggaggtgatgcacagcctggtgaagctgaccaggggggccctgctgcccctgagcatcagagatggagaggccaagcagtatggaggctgggaggtgaagtgtgagctgagcggccagtggctggcccacgccatccagacagtgcggctgacccatgagagcctgacagccctggagatccccaatgacctgctgcagaccatccaggacctgatcctggacctgcgggtgcgctgtgtgatggccaccctgcagcacacagctgaggagatcaagaggctggccgagaaggaggactggatcgtggacaatgaaggcctgaccagcctgccctgccagtttgagcagtgcatcgtgtgcagcctgcagagcctgaagggcgtgctggagtgcaagccaggagaggccagcgtcttccagcagcccaagacccaggaggaggtgtgccagctgagcatcaacatcatgcaggtgttcatctactgcctggagcagctgagcaccaagccagatgctgacatcgacaccacccacctgtctgtggatgtgagcagcccagacctgtttggcagcatccacgaggacttcagcctgaccagcgagcagaggctgctgattgtgctgagcaactgctgctacctggagcggcacaccttcctgaacattgctgagcactttgagaagcacaacttccagggcatcgagaagatcacccaggtgtccatggccagcctgaaggagctggaccagaggctgtttgagaactacatcgagctgaaggctgaccccatcgtgggcagcctggagcccggcatctatgccggctactttgactggaaggactgcctgcccccaactggagtgaggaactacctgaaggaggccctggtgaacatcatcgctgtgcatgctgaggtgttcaccatcagcaaggagctggtgccccgggtgctgagcaaggtgattgaagctgtgtctgaggagctgagccggctgatgcagtgtgtgtcctccttcagcaagaatggagccctgcaggcccggctggagatctgtgccctgcgggacacagtggccgtgtacctgaccccagagagcaagagcagcttcaagcaggccctggaggccctgccccagctgagcagtggagctgacaagaagctgctggaggagctgctgaacaagttcaagagctccatgcacctgcagctgacctgcttccaggccgccagcagcaccatgatgaagacctag

SEQ ID NO: 149011 - DNA, 348 bp, synthetic construct
  misc_feature 1..348: note = Description of Artificial Sequence: Synthetic coding sequence
  source 1..348: mol_type = other DNA
atgcacacccaggacagcgaggtggtgcctgtgcctgcctggcccttcagcctggtggtgttcagctgtggcggctgctggagcgtgacagccaagatgctgaggaacctgctggccctgcggcagatcggccagaggaccatcagcacagccagcagaagacacttcaagaacaaggtgcctgagaagcagaagctgttccaggaggatgatgagatccccctgtacctgaagggcggcgtggctgatgccctgctgtaccgggccaccatgatcctgactgtgggcggcacagcctatgccatctatgagctggccgtggccagcttccccaagaagcaggagtag

SEQ ID NO: 149012 - DNA, 348 bp, synthetic construct; identical to SEQ ID NO: 149011
  misc_feature 1..348: note = Description of Artificial Sequence: Synthetic coding sequence
  source 1..348: mol_type = other DNA

SEQ ID NO: 149013 - DNA, 1734 bp, synthetic construct
  misc_feature 1..1734: note = Description of Artificial Sequence: Synthetic coding sequence
  source 1..1734: mol_type = other DNA
atgagcaagccagagctgaaggaggacaagatgctggaggtgcactttgtgggagatgatgatgtgctgaaccacatcctggaccgggagggcggggccaagctgaagaaggagcgggcccagctgctggtgaaccccaagaagatcatcaagaagccagaatatgacctggaggaggatgaccaggaggtgctgaaggaccagaactacgtggagatcatgggcagagatgtgcaggagagcctgaagaatggcagcgccaccggcggcggcaacaaggtgtacagcttccagaacaggaagcacagcgagaagatggccaagctggccagcgagctggccaagaccccccagaagtctgtgtccttcagcctgaagaatgaccctgagatcaccatcaacgtgccccagagcagcaagggccacagcgccagtgacaaggtgcagcccaagaacaatgacaagtctgagttcctgagcacagcccccaggagcctgaggaagaggctgattgtgcccaggagccacagcgacagcgagagcgagtacagcgccagcaacagtgaagatgatgaaggagtggcccaggagcacgaggaggacaccaatgctgtgatcttcagccagaagatccaggcccagaacagagtggtgtctgcccctgtgggcaaggagacccccagcaagaggatgaagagggacaagaccagtgacctggtggaggagtactttgaggcccacagcagcagcaaggtgctgaccagtgacaggaccctgcagaagctgaagagggccaagctggaccagcagaccctgaggaacctgctgagcaaggtgagccccagcttctctgctgagctgaagcagctgaaccagcagtatgagaagctgttccacaagtggatgctgcagctgcacctgggcttcaacatcgtgctgtatggcctgggcagcaagagggacctgctggagcgcttccgcaccaccatgctgcaggacagcatccacgtggtgatcaatggcttcttccctggcatctctgtgaagtctgtgctgaacagcatcacagaggaggtgctggaccacatgggcaccttccgcagcatcctggaccagctggactggatcgtgaacaagttcaaggaggacagcagcctggagctgttcctgctgatccacaacctggacagccagatgctgcggggggagaagagccagcagatcatcggccagctgagcagcctgcacaacatctacctgattgccagcattgaccacctgaatgcccccctgatgtgggaccacgccaagcagagcctcttcaactggctgtggtatgagaccaccacctacagcccctacacagaggagaccagctatgagaacagcctgctggtgaagcagagcggcagcctgcccctgagcagcctgacccacgtgctgcggagcctgaccccaaatgcccggggcatcttccggctgctgatcaagtaccagctggacaaccaggacaaccccagctacatcggcctgtccttccaggacttctaccagcagtgccgggaggccttcctggtgaacagcgacctgaccctgcgggcccagctgacagagttccgggaccacaagctgatccgcaccaagaagggcacagatggagtggagtacctgctgatccctgtggacaatggcaccctgacagacttcctggagaaggaggaggaggaggcctag

SEQ ID NO: 149014 - DNA, 345 bp, synthetic construct
  misc_feature 1..345: note = Description of Artificial Sequence: Synthetic coding sequence
  source 1..345: mol_type = other DNA
atgtactacaagttcagcggcttcacccagaagctggccggggcctgggccagcgaggcctacagcccccagggcctgaagcctgtggtgtccacagaggccccacccatcatctttgccacccccaccaagctgaccagtgacagcacagtgtatgactatgccggcaagaacaaggtgcctgagctgcagaagttcttccagaaggcagatggagtgcctgtgtacctgaagaggggcctgcctgaccagatgctgtaccgcaccaccatggccctgactgtgggcggcaccatctactgcctgattgccctgtacatggccagccagcccaagaacaagtag

SEQ ID NO: 149015 - DNA, 246 bp, synthetic construct
  misc_feature 1..246: note = Description of Artificial Sequence: Synthetic coding sequence
  source 1..246: mol_type = other DNA
atgatgttccccctggccagaaatgccctgagcagcctgaagatccagagcatcctgcagagcatggcccggcacagccacgtgaagcacagcccagacttccatgacaagtatggaaatgctgtgctggccagcggcacagccttctgtgtggccacctgggtgttcaccgccacccagattggaattgagtggaacctgagccctgtgggccgggtgacccccaaggagtggaagcaccagtag

SEQ ID NO: 149016 - DNA, 246 bp, synthetic construct; identical to SEQ ID NO: 149015
  misc_feature 1..246: note = Description of Artificial Sequence: Synthetic coding sequence
  source 1..246: mol_type = other DNA

SEQ ID NO: 149017 - DNA, 246 bp, synthetic construct; identical to SEQ ID NO: 149015
  misc_feature 1..246: note = Description of Artificial Sequence: Synthetic coding sequence
  source 1..246: mol_type = other DNA

SEQ ID NO: 149018 - DNA, 99 bp, synthetic construct
  misc_feature 1..99: note = Description of Artificial Sequence: Synthetic coding sequence
  source 1..99: mol_type = other DNA
atgatgttccccctggccagaaatgccctgagcagcctgaagatccagagcatcctgcagagcatggcccggcacagccacgtgaagcacagcccctag

SEQ ID NO: 149019 - DNA, 243 bp, synthetic construct
  misc_feature 1..243: note = Description of Artificial Sequence: Synthetic coding sequence
  source 1..243: mol_type = other DNA
atgttccccctggccagaaatgccctgagcagcctgaagatccagagcatcctgcagagcatggcccggcacagccacgtgaagcacagcccagacttccatgacaagtatggaaatgctgtgctggccagcggcacagccttctgtgtggccacctgggtgttcaccgccacccagatcggcatcgagtggaacctgagccctgtgggccgggtgacccccaaggagtggaagcaccagtag

SEQ ID NO: 149020 - DNA, 192 bp, synthetic construct
  misc_feature 1..192: note = Description of Artificial Sequence: Synthetic coding sequence
  source 1..192: mol_type = other DNA
atgctgggccagagcatccgccgcttcaccacctctgtggtgagaagaagccactatgaggagggccctgggaagaacctgcccttctctgtggagaacaagtggagcctgctggccaagatgtgcctgtactttggaagtgcctttgccacccccttcctggtggtgcgccaccagctgctgaagacctag

SEQ ID NO: 149021 - DNA, 192 bp, synthetic construct; identical to SEQ ID NO: 149020
  misc_feature 1..192: note = Description of Artificial Sequence: Synthetic coding sequence
  source 1..192: mol_type = other DNA

SEQ ID NO: 149022 - DNA, 978 bp, synthetic construct
  misc_feature 1..978: note = Description of Artificial Sequence: Synthetic coding sequence
  source 1..978: mol_type = other DNA
atggctgctgctgctgccagcctgcggggcgtggtgctgggccccaggggggccggcctgcccggggcccgggcccggggcctgctgtgcagcgcccggcccggccagctgcccctgcggaccccccaggccgtggccctgagcagcaagagcggcctgagccggggcaggaaggtgatgctgagcgccctgggcatgctggccgccggcggggccggcctggccatggccctgcacagcgctgtgtctgccagtgacctggagctgcaccccccatcctacccctggagccaccggggcctgctgagcagcctggaccacaccagcatcagaagaggcttccaggtgtacaagcaggtgtgtgccagctgccacagcatggactttgtggcctaccgccacctggtgggcgtgtgctacacagaagatgaggccaaggagctggccgctgaggtggaggtgcaggacggccccaatgaagatggagagatgttcatgaggcctgggaagctgtttgactacttccccaagccctaccccaacagcgaggccgcccgggccgccaacaacggggccctgcccccagacctgagctacatcgtgcgggcccggcatggaggagaggactatgtgttcagcctgctgaccggctactgtgagcccccaactggagtgtccctgcgggagggcctgtacttcaacccctacttccctggccaggccatcgccatggccccacccatctacacagatgtgctggagtttgatgatggcaccccagccaccatgagccagatcgccaaggatgtgtgcaccttcctgcgctgggccagcgagcctgagcatgaccacaggaagaggatgggcctgaagatgctgatgatgatggccctgctggtgcccctggtgtacaccatcaagaggcacaagtggagcgtgctgaagagcaggaagctggcctacagaccacccaagtag

SEQ ID NO: 149023 - DNA, 252 bp, synthetic construct
  misc_feature 1..252: note = Description of Artificial Sequence: Synthetic coding sequence
  source 1..252: mol_type = other DNA
atggagccctttgtggtgctggtgctgtgcctgtccttcatgctgctcttcagcctgtggaggcagagctgcagaagaaggaagctgcccccaggccccacccccctgcccatcatcggcaacatgctgcagattgatgtgaaggacatctgcaagagcttcaccaacgtgtccctgccctacgtgcccccagccaactgcaagggcagccagaagtccatggtgctgtgcagcccctgcatcctggcctag

SEQ ID NO: 149024 - DNA, 219 bp, synthetic construct
  misc_feature 1..219: note = Description of Artificial Sequence: Synthetic coding sequence
  source 1..219: mol_type = other DNA
atggagccctttgtggtgctggtgctgtgcctgtccttcatgctgctcttcagcctgtggaggcagagctgcagaagaaggaagctgcccccaggccccacccccctgcccatcatcggcaacatgctgcagattgatgtgaaggacatctgcaagagcttcaccaacgtgtccctgccctacgtgcccccagccaactgcaagggcgtgctgctgtag

SEQ ID NO: 149025 - DNA, 423 bp, synthetic construct
  misc_feature 1..423: note = Description of Artificial Sequence: Synthetic coding sequence
  source 1..423: mol_type = other DNA
atggacctgatccccaacctggccgtggagacctggctgctgctggccgtgtccctggtgctgctgtacctgtatggcaccaggacccacggcctcttcaagaggctgggcatccctggccccacccccctgcccctgctgggcaatgtgctgagctaccggcagggcctgtggaagtttgacacagagtgctacaagaagtatggcaagatgtggggcacctatgagggccagctgcctgtgctggccatcacagatcctgatgtgatcagaacagtgctggtgaaggagtgctacagcgtcttcaccaacagacgcatctgtgccaccaccagcaccatcaagatgcagacccacagcgtgaccatgtggctgcccccagctgtgctgcagagccagcacggcgtgtgcctcttcctgtag

SEQ ID NO: 149026 - DNA, 1563 bp, synthetic construct
  misc_feature 1..1563: note = Description of Artificial Sequence: Synthetic coding sequence
  source 1..1563: mol_type = other DNA
atgccccagctgagcctgagcagcctgggcctgtggcccatggccgccagcccctggctgctgctgctgctggtgggcgcctcctggctgctggcccgcatcctggcctggacctacaccttctatgacaactgctgccgcctgcgctgcttcccccagccccccaagaggaactggttcctgggccacctgggcctggtgacccccacagagcagggcatgagggtgctgacccagctggtggccacctacccccagggcttcaaggtgtggatgggccccatcttccctgtgatccgcttctgccaccccaacatcatccgcagcgtcatcaatgccagcgctgccatcgtgcccaaggacaaggtgttctacagcttcctgaagccctggctgggagatggcctgctgctgtctgctggggagaagtggagccgccacaggaggatgctgaccccagccttccacttcaacatcctgaagccctacatgaagatcttcaatgaatctgtgaacatcatgcacgccaagtggcagctgctggccagcgagggcagcgcccggctggacatgtttgagcacatcagcctgatgaccctggacagcctgcagaagtgtgtgttctcctttgacagccactgccaggagaagcccagcgagtacatcgccgccatcctggagctgagcgccctggtgaccaagaggcaccagcagatcctgctgtacatcgacttcctgtactacctgaccccagatggccagcgcttcagaagagcctgccgcctggtgcatgacttcacagatgctgtgatccaggagaggaggaggaccctgcccagccagggcgtggatgacttcctgcaggccaaggccaagagcaagaccctggacttcattgatgtgctgctgctgagcaaggatgaagatggcaagaagctgagtgatgaggacatccgggcagaggccgacaccttcatgtttgagggccatgacaccacagccagcggcctgtcctgggtgctgtaccacctggccaagcaccctgagtaccaggagcgctgccggcaggaggtgcaggagctgctgaaggaccgggagcccaaggagattgagtgggatgacctggcccagctgcccttcctgaccatgtgcatcaaggagagcctgcggctgcacccccctgtgcctgctgtgagccgctgctgcacccaggacatcgtgctgcctgatggccgggtcatccccaagggcatcatctgcctgatctctgtgtttggcacccaccacaacccagctgtgtggccagaccctgaggtgtatgaccccttccgctttgaccccaagaacatcaaggagaggagccccctggccttcatccccttctctgctggccccaggaactgcatcggccaggcctttgccatggccgagatgaaggtggtgctgggcctgaccctgctgcgcttccgggtgctgcctgaccacacagagcccaggaggaagccagagctggtgctgcgggcagagggcggcctgtggctgcgggtggagcccctgtcctag

SEQ ID NO: 149027 - DNA, 1455 bp, synthetic construct
  misc_feature 1..1455: note = Description of Artificial Sequence: Synthetic coding sequence
  source 1..1455: mol_type = other DNA
atgctgttccccatctccatgtctgccacagagttcctgctggccagcgtcatcttctgcctggtgttctgggtgatccgggccagccggccccaggtgcccaagggcctgaagaaccccccaggcccctggggctggcccctgattggccacatgctgaccctgggcaagaacccccacctggccctgagcaggatgagccagcagtatggagatgtgctgcagatccgcatcggcagcacccctgtggtggtgctgagcggcctggacaccatccggcaggccctggtgcggcagggagatgacttcaagggccgcccagacctgtacaccttcaccctcatcagcaatggccagagcatgtccttctccccagattctggccctgtgtgggccgcccggcggcggctggcccagaatggcctgaagagcttcagcatcgccagtgaccctgccagcagcaccagctgctacctggaggagcacgtgtccaaggaggccgaggtgctgatcagcaccctgcaggagctgatggccggccctggccacttcaacccctaccgctacgtggtggtgtctgtgaccaacgtcatctgtgccatctgctttggaagaagatatgaccacaaccaccaggagctgctgagcctggtgaacctgaatgccttcaaggacctgaatgagaagttctacagcttcatgcagaagatggtgaaggagcactacaagacctttgagaagggccacatccgggacatcacagacagcctcatcgagcactgccaggagaagcagctggatgaaaatgccaacgtgcagctgagtgatgagaagatcatcaacatcgtgctggacctgtttggagctggctttgacacagtgaccacagccatctcctggagcctgatgtacctggtgatgaacccccgggtgcagaggaagatccaggaggagctggacacagtgattggccgcagcagaagaccccggctgagtgacaggagccacctgccctacatggaggccttcatcctggagaccttccgccacagcagctttgtgcccttcaccatcccccacagcaccacccgggacaccagcctgaagggcttctacatccccaagggccgctgtgtgtttgtgaaccagtggcagatcaaccacgaccagaagctgtgggtgaaccccagcgagttcctgcctgagcgcttcctgaccccagatggagccatcgacaaggtgctgtctgagaaggtgatcatcttcggcatgggcaagaggaagtgcatcggggagaccatcgcccgctgggaggtgttcctgttcctggccatcctgctgcagagggtggagttctctgtgcccctgggcgtgaaggtggacatgacccccatctacggcctgaccatgaagcacgcctgctgtgagcacttccagatgcagctgcggagctag

SEQ ID NO: 149028 - DNA, 1539 bp, synthetic construct
  misc_feature 1..1539: note = Description of Artificial Sequence: Synthetic coding sequence
  source 1..1539: mol_type = other DNA
atgctgttccccatctccatgtctgccacagagttcctgctggccagcgtcatcttctgcctggtgttctgggtgatccgggccagccggccccaggtgcccaagggcctgaagaaccccccaggcccctggggctggcccctgattggccacatgctgaccctgggcaagaacccccacctggccctgagcaggatgagccagcagtatggagatgtgctgcagatccgcatcggcagcacccctgtggtggtgctgagcggcctggacaccatccggcaggccctggtgcggcagggagatgacttcaagggccgcccagacctgtacaccttcaccctcatcagcaatggccagagcatgtccttctccccagattctggccctgtgtgggccgcccggcggcggctggcccagaatggcctgaagagcttcagcatcgccagtgaccctgccagcagcaccagctgctacctggaggagcacgtgtccaaggaggccgaggtgctgatcagcaccctgcaggagctgatggccggccctggccacttcaacccctaccgctacgtggtggtgtctgtgaccaacgtcatctgtgccatctgctttggaagaagatatgaccacaaccaccaggagctgctgagcctggtgaacctgaacaacaactttggagaggtggtgggcagcggcaacccagctgacttcatccccatcctgcgctacctgcccaaccccagcctgaatgccttcaaggacctgaatgagaagttctacagcttcatgcagaagatggtgaaggagcactacaagacctttgagaagggccacatccgggacatcacagacagcctcatcgagcactgccaggagaagcagctggatgaaaatgccaacgtgcagctgagtgatgagaagatcatcaacatcgtgctggacctgtttggagctggctttgacacagtgaccacagccatctcctggagcctgatgtacctggtgatgaacccccgggtgcagaggaagatccaggaggagctggacacagtgattggccgcagcagaagaccccggctgagtgacaggagccacctgccctacatggaggccttcatcctggagaccttccgccacagcagctttgtgcccttcaccatcccccacagcaccacccgggacaccagcctgaagggcttctacatccccaagggccgctgtgtgtttgtgaaccagtggcagatcaaccacgaccagaagctgtgggtgaaccccagcgagttcctgcctgagcgcttcctgaccccagatggagccatcgacaaggtgctgtctgagaaggtgatcatcttcggcatgggcaagaggaagtgcatcggggagaccatcgcccgctgggaggtgttcctgttcctggccatcctgctgcagagggtggagttctctgtgcccctgggcgtgaaggtggacatgacccccatctacggcctgaccatgaagcacgcctgctgtgagcacttccagatgcagctgcggagctag

SEQ ID NO: 149029 - DNA, 1539 bp, synthetic construct; identical to SEQ ID NO: 149028
  misc_feature 1..1539: note = Description of Artificial Sequence: Synthetic coding sequence
  source 1..1539: mol_type = other DNA

SEQ ID NO: 149030 - DNA, 1452 bp, synthetic construct
  misc_feature 1..1452: note = Description of Artificial Sequence: Synthetic coding sequence
  source 1..1452: mol_type = other DNA
atgctgttccccatctccatgtctgccacagagttcctgctggccagcgtcatcttctgcctggtgttctgggtgatccgggccagccggccccaggtgcccaagggcctgaagaaccccccaggcccctggggctggcccctgattggccacatgctgaccctgggcaagaacccccacctggccctgagcaggatgagccagcagtatggagatgtgctgcagatccgcatcggcagcacccctgtggtggtgctgagcggcctggacaccatccggcaggccctggtgcggcagggagatgacttcaagggccgcccagacctgtacaccttcaccctcatcagcaatggccagagcatgtccttctccccagattctggccctgtgtgggccgcccggcggcggctggcccagaatggcctgaagagcttcagcatcgccagtgaccctgccagcagcaccagctgctacctggaggagcacgtgtccaaggaggccgaggtgctgatcagcaccctgcaggagctgatggccggccctggccacttcaacccctaccgctacgtggtggtgtctgtgaccaacgtcatctgtgccatctgctttggaagaagatatgaccacaaccaccaggagctgctgagcctggtgaacctgaacaacaactttggagaggtggtgggcagcggcaacccagctgacttcatccccatcctgcgctacctgcccaaccccagcctgaatgccttcaaggacctgaatgagaagttctacagcttcatgcagaagatggtgaaggagcactacaagacctttgagaagggccacatccgggacatcacagacagcctcatcgagcactgccaggagaagcagctggatgaaaatgccaacgtgcagctgagtgatgagaagatcatcaacatcgtgctggacctgtttggagctggctttgacacagtgaccacagccatctcctggagcctgatgtacctggtgatgaacccccgggtgcagaggaagatccaggaggagctggacacagtgattggccgcagcagaagaccccggctgagtgacaggagccacctgccctacatggaggccttcatcctggagaccttccgccacagcagctttgtgcccttcaccatcccccacaggaagctgtgggtgaaccccagcgagttcctgcctgagcgcttcctgaccccagatggagccatcgacaaggtgctgtctgagaaggtgatcatcttcggcatgggcaagaggaaatgtattggagagaccatcgcccgctgggaggtgttcctgttcctggccatcctgctgcagagggtggagttctctgtgcccctgggcgtgaaggtggacatgacccccatctacggcctgaccatgaagcacgcctgctgtgagcacttccagatgcagctgcggagctag

SEQ ID NO: 149031 - DNA, 1551 bp, synthetic construct
  misc_feature 1..1551: note = Description of Artificial Sequence: Synthetic coding sequence
  source 1..1551: mol_type = other DNA
atggccctgagccagagcgtgcccttcagcgccacagagctgctgctggccagcgccatcttctgcctggtgttctgggtgctgaagggcctgcggccccgggtgcccaagggcctgaagagccccccagagccctggggctggcccctgctgggccacgtgctgaccctgggcaagaacccccacctggccctgagcaggatgagccagagatatggagatgtgctgcagatccgcatcggcagcacccctgtgctggtgctgagccggctggacaccatccggcaggccctggtgcggcagggagatgacttcaagggccgcccagacctgtacaccagcaccctcatcacagatggccagagcctgaccttcagcacagattctggccctgtgtgggccgcccggcggcggctggcccagaatgccctgaacaccttcagcatcgccagtgaccctgccagcagcagcagctgctacctggaggagcacgtgtccaaggaggccaaggccctgatcagccggctgcaggagctgatggccggccctggccactttgacccctacaaccaggtggtggtgtctgtggccaacgtcatcggggccatgtgcttcggccagcacttccctgagagcagtgatgagatgctgagcctggtgaagaacacccatgaatttgtggagacagccagcagcggcaaccccctggacttcttccccatcctgcgctacctgcccaacccagccctgcagcgcttcaaggccttcaaccagcgcttcctgtggttcctgcagaagacagtgcaggagcactaccaggactttgacaagaacagcgtgcgggacatcaccggggccctcttcaagcacagcaagaagggcccccgggccagcggcaacctgatcccccaggagaagatcgtgaacctggtgaatgacatctttggagctggctttgacacagtgaccacagccatctcctggagcctgatgtacctggtgaccaagccagagatccagaggaagatccagaaggagctggacacagtgattggccgggagcggcggccccggctgagtgaccggccccagctgccctacctggaggccttcatcctggagaccttccgccacagcagcttcctgcccttcaccatcccccacagcaccacccgggacaccaccctgaatggcttctacatccccaagaagtgctgcgtgtttgtgaaccagtggcaggtgaaccacgaccctgagctgtgggaggaccccagcgagttccggcctgagcgcttcctgacagcagatggaacagccatcaacaagcccctgtctgagaagatgatgctgtttggcatgggcaagaggcgctgcattggagaggtgctggccaagtgggagatcttcctgttcctggccatcctgctgcagcagctggagttctctgtgcccccaggagtgaaggtggacctgacccccatctacggcctgaccatgaagcacgcccgctgtgagcacgtgcaggcccggctgcgcttcagcatcaactag

SEQ ID NO: 149032 - DNA, 1512 bp, synthetic construct
  misc_feature 1..1512: note = Description of Artificial Sequence: Synthetic coding sequence
  source 1..1512: mol_type = other DNA
atggccctgcgggccaaggccgaggtgtgcatggctgtgccctggctgagcctgcagagggcccaggccctgggcacccgggccgcccgggtgcccaggacagtgctgccctttgaggccatgcccaggaggcctggcaaccgctggctgcggctgctgcagatctggagggagcagggctatgaggacctgcacctggaggtgcaccagaccttccaggagctgggccccatcttccgctatgacctgggcggggccggcatggtgtgtgtgatgctgcctgaagatgtggagaagctgcagcaggtggacagcctgcacccccacaggatgagcctggagccctgggtggcctaccggcagcaccggggccacaagtgtggggtcttcctgctgaatggacctgagtggaggttcaaccggctgcggctgaaccctgaggtgctgagccccaatgctgtgcagcgcttcctgcccatggtggatgctgtggcccgggacttcagccaggccctgaagaagaaggtgctgcagaatgcccggggcagcctgaccctggatgtgcagcccagcatcttccactacaccatcgaggccagcaacctggccctgtttggagagcggctgggcctggtgggccacagccccagcagcgccagcctgaacttcctgcacgccctggaggtgatgttcaagagcacagtgcagctgatgttcatgcccaggagcctgagccgctggaccagccccaaggtgtggaaggagcactttgaggcctgggactgcatcttccagtacggggacaactgcatccagaagatctaccaggagctggccttcagccggccccagcagtacaccagcatcgtggccgagctgctgctgaatgctgagctgagcccagatgccatcaaggccaacagcatggagctgacagctggctctgtggacaccaccgtcttccccctgctgatgaccctgtttgagctggccaggaaccccaacgtgcagcaggccctgcggcaggagagcctggccgccgccgccagcatcagcgagcacccccagaaggccaccacagagctgcccctgctgcgggccgccctgaaggagaccctgcggctgtaccctgtgggcctcttcctggagcgggtggccagcagtgacctggtgctgcagaactaccacatcccagctggcaccctggtgcgggtcttcctgtacagcctgggcaggaacccagccctcttccccaggcctgagcgctacaacccccagcgctggctggacatccggggcagcggcaggaacttctaccacgtgccctttggatttggcatgaggcagtgcctgggccgccgcctggccgaggccgagatgctgctgctgctgcaccacgtgctgaagcacctgcaggtggagaccctgacccaggaggacatcaagatggtgtacagcttcatcctgcggcccagcatgttccccctgctgaccttccgggccatcaactag

SEQ ID NO: 149033 - DNA, 1314 bp, synthetic construct
  misc_feature 1..1314: note = Description of Artificial Sequence: Synthetic coding sequence
  source 1..1314: mol_type = other DNA
atggccctgcgggccaaggccgaggtgtgcatggctgtgccctggctgagcctgcagagggcccaggccctgggcacccgggccgcccgggtgcccaggacagtgctgccctttgaggccatgcccaggaggcctggcaaccgctggctgcggctgctgcagatctggagggagcagggctatgaggacctgcacctggaggtgcaccagaccttccaggagctgggccccatcttccgctatgacctgggcggggccggcatggtgtgtgtgatgctgcctgaagatgtggagaagctgcagcaggtggacagcctgcacccccacaggatgagcctggagccctgggtggcctaccggcagcaccggggccacaagtgtggggtcttcctgctgaatggacctgagtggaggttcaaccggctgcggctgaaccctgaggtgctgagccccaatgctgtgcagcgcttcctgcccatggtggatgctgtggcccgggacttcagccaggccctgaagaagaaggtgctgcagaatgcccggggcagcctgaccctggatgtgcagcccagcatcttccactacaccatcgaggccagcaacctggccctgtttggagagcggctgggcctggtgggccacagccccagcagcgccagcctgaacttcctgcacgccctggaggtgatgttcaagagcacagtgcagctgatgttcatgcccaggagcctgagccgctggaccagccccaaggtgtggaaggagcactttgaggcctgggactgcatcttccagtacggggacaactgcatccagaagatctaccaggagctggccttcagccggccccagcagtacaccagcatcgtggccgagctgctgctgaatgctgagctgagcccagatgccatcaaggccaacagcatggagctgacagctggctctgtggacaccaccgtcttccccctgctgatgaccctgtttgagctggccaggaaccccaacgtgcagcaggccctgcggcaggagagcctggccgccgccgccagcatcagcgagcacccccagaaggccaccacagagctgcccctgctgcgggccgccctgaaggagaccctgcggctgtaccctgtgggcctcttcctggagcgggtggccagcagtgacctggtgctgcagaactaccacatcccagctggggtgctgaagcacctgcaggtggagaccctgacccaggaggacatcaagatggtgtacagcttcatcctgcggcccagcatgttccccctgctgaccttccgggccatcaactag

SEQ ID NO: 149034 - DNA, 1512 bp, synthetic construct
  misc_feature 1..1512: note = Description of Artificial Sequence: Synthetic coding sequence
  source 1..1512: mol_type = other DNA
atggccctgcgggccaaggccgaggtgtgtgtggccgccccctggctgagcctgcagagggcccgggccctgggcacccgggccgcccgggcccccaggacagtgctgccctttgaggccatgccccagcaccctggcaaccgctggctgcggctgctgcagatctggagggagcagggctatgagcacctgcacctggagatgcaccagaccttccaggagctgggccccatcttccgctacaacctgggcggccccaggatggtgtgtgtgatgctgcctgaagatgtggagaagctgcagcaggtggacagcctgcacccctgcaggatgatcctggagccctgggtggcctaccggcagcaccggggccacaagtgtggggtcttcctgctgaatggacctgagtggaggttcaaccggctgcggctgaacccagatgtgctgagccccaaggctgtgcagcgcttcctgcccatggtggatgctgtggcccgggacttcagccaggccctgaagaagaaggtgctgcagaatgcccggggcagcctgaccctggatgtgcagcccagcatcttccactacaccatcgaggccagcaacctggccctgtttggagagcggctgggcctggtgggccacagccccagcagcgccagcctgaacttcctgcacgccctggaggtgatgttcaagagcacagtgcagctgatgttcatgcccaggagcctgagccgctggatcagccccaaggtgtggaaggagcactttgaggcctgggactgcatcttccagtacggggacaactgcatccagaagatctaccaggagctggccttcaaccggccccagcactacacaggaattgtggccgagctgctgctgaaggccgagctgagcctggaggccatcaaggccaacagcatggagctgacagctggctctgtggacaccacagccttccccctgctgatgaccctgtttgagctggccaggaacccagatgtgcagcagatcctgcggcaggagagcctggccgccgccgccagcatcagcgagcacccccagaaggccaccacagagctgcccctgctgcgggccgccctgaaggagaccctgcggctgtaccctgtgggcctcttcctggagcgggtggtgtccagtgacctggtgctgcagaactaccacatcccagctggcaccctggtgcaggtgttcctgtacagcctgggcagaaatgctgccctcttccccaggcctgagcgctacaacccccagcgctggctggacatccggggcagcggcaggaacttccaccacgtgccctttggatttggcatgaggcagtgcctgggccgccgcctggccgaggccgagatgctgctgctgctgcaccacgtgctgaagcacttcctggtggagaccctgacccaggaggacatcaagatggtgtacagcttcatcctgcggcccggcaccagccccctgctgaccttccgggccatcaactag

SEQ ID NO: 149035 - DNA, 1527 bp, synthetic construct
  misc_feature 1..1527: note = Description of Artificial Sequence: Synthetic coding sequence
  source 1..1527: mol_type = other DNA
atgtgggagctggtggccctgctgctgctgaccctggcctacctgttctggcccaagaggcgctgccctggggccaagtaccccaagagcctgctgagcctgcccctggtgggcagcctgcccttcctgcccaggcatggccacatgcacaacaacttcttcaagctgcagaagaagtatggccccatctacagcgtgaggatgggcaccaagaccaccgtgattgtgggccaccaccagctggccaaggaggtgctgatcaagaagggcaaggacttcagcggccggccccagatggccaccctggacatcgccagcaacaacaggaagggcatcgcctttgctgacagcggggcccactggcagctgcaccggcggctggccatggccacctttgccctcttcaaggatggagaccagaagctggagaagatcatctgccaggagatcagcaccctgtgtgacatgctggccacccacaacggccagagcattgacatctccttccctgtgtttgtggccgtgaccaacgtcatcagcctcatctgcttcaacaccagctacaagaatggagaccctgagctgaatgtcatccagaactacaatgaaggcatcatcgacaacctgagcaaggacagcctggtggacctggtgccctggctgaagatcttccccaacaagaccctggagaagctgaagagccacgtgaagatcagaaatgacctgctgaacaagatcctggagaactacaaggagaagttcagaagtgacagcatcaccaacatgctggacaccctgatgcaggccaagatgaacagcgacaatggaaatgccggccctgaccaggacagcgagctgctgagtgacaaccacatcctgaccaccatcggggacatctttggagctggggtggagaccaccacctctgtggtgaagtggaccctggccttcctgctgcacaacccccaggtgaagaagaagctgtatgaggagattgaccagaatgtgggcttcagcaggacccccaccatcagtgacaggaaccggctgctgctgctggaggccaccatccgggaggtgctgcggctgcggcctgtggcccccatgctgatcccccacaaggccaacgtggacagcagcattggagaatttgctgtggacaagggcacagaggtgatcatcaacctgtgggccctgcaccacaatgagaaggagtggcaccagcctgaccagttcatgcctgagcgcttcctgaacccagctggcacccagctgatcagccccagcgtgtcctacctgccctttggagctggccccaggagctgcattggagagatcctggcccggcaggagctgttcctgatcatggcctggctgctgcagagatttgacctggaggtgcctgatgatggccagctgcccagcctggagggcatccccaaggtggtgttcctgattgacagcttcaaggtgaagatcaaggtgcggcaggcctggagggaggcccaggccgagggcagcacctag

SEQ ID NO: 149036 - DNA, 1512 bp, synthetic construct
  misc_feature 1..1512: note = Description of Artificial Sequence: Synthetic coding sequence
  source 1..1512: mol_type = other DNA
atggtgctggagatgctgaaccccatccactacaacatcaccagcatcgtgcctgaggccatgcctgctgccaccatgcctgtgctgctgctgaccggcctcttcctgctggtgtggaactatgagggcaccagcagcatccctggccctggctactgcatgggcatcggccccctcatcagccacggccgcttcctgtggatgggcatcggcagcgcctgcaactactacaacagagtgtatggagagttcatgagggtgtggatcagcggggaggagaccctcatcatcagcaagagcagctccatgttccacatcatgaagcacaaccactacagcagccgcttcggcagcaagctgggcctgcagtgcatcggcatgcatgagaagggcatcatcttcaacaacaaccctgagctgtggaagaccacccggcccttcttcatgaaggccctgagcggccctggcctggtgaggatggtgacagtgtgtgccgagagcctgaagacccacctggaccggctggaggaggtgaccaatgaaagtggctacgtggatgtgctgaccctgctgcggcgggtgatgctggacaccagcaacaccctcttcctgcgcatccccctggatgaaagtgccatcgtggtgaagatccagggctactttgatgcctggcaggccctgctgatcaagccagacatcttcttcaagatctcctggctgtacaagaagtatgagaagtctgtgaaggacctgaaggatgccatcgaggtgctgattgctgagaagagaagacgcatcagcacagaggagaagctggaggagtgcatggactttgccacagagctgatcctggccgagaagagaggagacctgacccgggagaatgtgaaccagtgcatcctggagatgctgattgctgccccagacaccatgtctgtgtccctcttcttcatgctgttcctgattgccaagcaccccaacgtggaggaggccatcatcaaggagatccagaccgtcatcggggagcgggacatcaagattgatgacatccagaagctgaaggtgatggagaacttcatctatgaatccatgagataccagcctgtggtggacctggtgatgaggaaggccctggaggatgatgtgattgatggctaccctgtgaagaagggcaccaacatcatcctgaacatcggccgcatgcaccggctggagttcttccccaagcccaatgagttcaccctggagaactttgccaagaatgtgccctaccgctacttccagcccttcggcttcggcccccggggctgtgccggcaagtacatcgccatggtgatgatgaaggccatcctggtgaccctgctgcggcgcttccacgtgaagaccctgcagggccagtgtgtggagagcatccagaagatccatgacctgagcctgcacccagatgagaccaagaacatgctggagatgatcttcaccccaagaaacagcgaccgctgcctggagcactag

SEQ ID NO: 149037 - DNA, 1512 bp, synthetic construct; identical to SEQ ID NO: 149036
  misc_feature 1..1512: note = Description of Artificial Sequence: Synthetic coding sequence
  source 1..1512: mol_type = other DNA

SEQ ID NO: 149038 - DNA, 1512 bp, synthetic construct; identical to SEQ ID NO: 149036
  misc_feature 1..1512: note = Description of Artificial Sequence: Synthetic coding sequence
  source 1..1512: mol_type = other DNA

SEQ ID NO: 149039 - DNA, 501 bp, synthetic construct
  misc_feature 1..501: note = Description of Artificial Sequence: Synthetic coding sequence
  source 1..501: mol_type = other DNA
atggtgctggagatgctgaaccccatccactacaacatcaccagcatcgtgcctgaggccatgcctgctgccaccatgcctgtgctgctgctgaccggcctcttcctgctggtgtggaactatgagggcaccagcagcatccctggccctggctactgcatgggcatcggccccctcatcagccacggccgcttcctgtggatgggcatcggcagcgcctgcaactactacaacagagtgtatggagagttcatgagggtgtggatcagcggggaggagaccctcatcatcagcaagagcagctccatgttccacatcatgaagcacaaccactacagcagccgcttcggcagcaagctgggcctgcagtgcatcggcatgcatgagaagggcatcatcttcaacaacaaccctgagctgtggaagaccacccggcccttcttcatgaaggccctgagcggccctggcctggtgaggatggtgacagtgtgtgccgagtag

SEQ ID NO: 149040 - DNA, 657 bp, synthetic construct
  misc_feature 1..657: note = Description of Artificial Sequence: Synthetic coding sequence
  source 1..657: mol_type = other DNA
atggtgctggagatgctgaaccccatccactacaacatcaccagcatcgtgcctgaggccatgcctgctgccaccatgcctgtgctgctgctgaccggcctcttcctgctggtgtggaactatgagggcaccagcagcatccctggccctggctactgcatgggcatcggccccctcatcagccacggccgcttcctgtggatgggcatcggcagcgcctgcaactactacaacagagtgtatggagagttcatgagggtgtggatcagcggggaggagaccctcatcatcagcaagagcagctccatgttccacatcatgaagcacaaccactacagcagccgcttcggcagcaagctgggcctgcagtgcatcggcatgcatgagaagggcatcatcttcaacaacaaccctgagctgtggaagaccacccggcccttcttcatgaaggccctgagcggccctggcctggtgaggatggtgacagtgtgtgccgagagcctgaagacccacctggaccggctggaggaggtgaccaatgaaagtggctacgtggatgtgctgaccctgctgcggcgggtgatgctggacaccagcaacaccctcttcctgcgcatccccctggatggaacagagatcttcaccctgaccagctag

SEQ ID NO: 149041 - DNA, 1080 bp, synthetic construct
  misc_feature 1..1080: note = Description of Artificial Sequence: Synthetic coding sequence
  source 1..1080: mol_type = other DNA
atggtgctggagatgctgaaccccatccactacaacatcaccagcatcgtgcctgaggccatgcctgctgccaccatgcctgtgctgctgctgaccggcctcttcctgctggtgtggaactatgagggcaccagcagcatccctggccctggctactgcatgggcatcggccccctcatcagccacggccgcttcctgtggatgggcatcggcagcgcctgcaactactacaacagagtgtatggagagttcatgagggtgtggatcagcggggaggagaccctcatcatcagcaagagcagctccatgttccacatcatgaagcacaaccactacagcagccgcttcggcagcaagctgggcctgcagtgcatcggcatgcatgagaagggcatcatcttcaacaacaaccctgagctgtggaagaccacccggcccttcttcatgaaggccctgagcggccctggcctggtgaggatggtgacagtgtgtgccgagagcctgaagacccacctggaccggctggaggaggtgaccaatgaaagtggctacgtggatgtgctgaccctgctgcggcgggtgatgctggacaccagcaacaccctcttcctgcgcatccccctggatgaaagtgccatcgtggtgaagatccagggctactttgatgcctggcaggccctgctgatcaagccagacatcttcttcaagatctcctggctgtacaagaagtatgagaagtctgtgaaggacctgaaggatgccatcgaggtgctgattgctgagaagagaagacgcatcagcacagaggagaagctggaggagtgcatggactttgccacagagctgatcctggccgagaagagaggagacctgacccgggagaatgtgaaccagtgcatcctggagatgctgattgctgccccagacaccatgtctgtgtccctcttcttcatgctgttcctgattgccaagcaccccaacgtggaggaggccatcatcaaggagatccagaccgtcatcggggagcgggacatcaagattgatgacatccagaagctgaagaagcatgatgccaagtag

SEQ ID NO: 149042 - DNA, 1059 bp, synthetic construct
  misc_feature 1..1059: note = Description of Artificial Sequence: Synthetic coding sequence
  source 1..1059: mol_type = other DNA
atggtgctggagatgctgaaccccatccactacaacatcaccagcatcgtgcctgaggccatgcctgctgccaccatgcctgtgctgctgctgaccggcctcttcctgctggtgtggaactatgagggcaccagcagcatccctggccctggctactgcatgggcatcggccccctcatcagccacggccgcttcctgtggatgggcatcggcagcgcctgcaactactacaacagagtgtatggagagttcatgagggtgtggatcagcggggaggagaccctcatcatcagcaagagcagctccatgttccacatcatgaagcacaaccactacagcagccgcttcggcagcaagctgggcctgcagtgcatcggcatgcatgagaagggcatcatcttcaacaacaaccctgagctgtggaagaccacccggcccttcttcatgaaggccctgagcggccctggcctggtgaggatggtgacagtgtgtgccgagagcctgaagacccacctggaccggctggaggaggtgaccaatgaaagtggctacgtggatgtgctgaccctgctgcggcgggtgatgctggacaccagcaacaccctcttcctgcgcatccccctggatgaaagtgccatcgtggtgaagatccagggctactttgatgcctggcaggccctgctgatcaagccagacatcttcttcaagatctcctggctgtacaagaagtatgagaagtctgtgaaggacctgaaggatgccatcgaggtgctgattgctgagaagagaagacgcatcagcacagaggagaagctggaggagtgcatggactttgccacagagctgatcctggccgagaagagaggagacctgacccgggagaatgtgaaccagtgcatcctggagatgctgattgctgccccagacaccatgtctgtgtccctcttcttcatgctgttcctgattgccaagcaccccaacgtggaggaggccatcatcaaggagatccagaccgtcatcggggagcgggacatcaagattgatgacatccagaagtag

SEQ ID NO: 149043 - DNA, 729 bp, synthetic construct
  misc_feature 1..729: note = Description of Artificial Sequence: Synthetic coding sequence
  source 1..729: mol_type = other DNA
atggtgctggagatgctgaaccccatccactacaacatcaccagcatcgtgcctgaggccatgcctgctgccaccatgcctgtgctgctgctgaccggcctcttcctgctggtgtggaactatgagggcaccagcagcatccctggccctggctactgcatgggcatcggccccctcatcagccacggccgcttcctgtggatgggcatcggcagcgcctgcaactactacaacagagtgtatggagagttcatgagggtgtggatcagcggggaggagaccctcatcatcagcaagagcagctccatgttccacatcatgaagcacaaccactacagcagccgcttcggcagcaagctgggcctgcagtgcatcggcatgcatgagaagggcatcatcttcaacaacaaccctgagctgtggaagaccacccggcccttcttcatgaaggccctgagcggccctggcctggtgaggatggtgacagtgtgtgccgagagcctgaagacccacctggaccggctggaggaggtgaccaatgaaagtggctacgtggatgtgctgaccctgctgcggcgggtgatgctggacaccagcaacaccctcttcctgcgcatccccctggatgaaagtgccatcgtggtgaagatccagggctactttgatgcctggcaggccctgctgatcaagccagacatcttcttcaagatctcctggctgtacaagtag

SEQ ID NO: 149044 - DNA, 546 bp, synthetic construct
  misc_feature 1..546: note = Description of Artificial Sequence: Synthetic coding sequence
  source 1..546: mol_type = other DNA
atggtgctggagatgctgaaccccatccactacaacatcaccagcatcgtgcctgaggccatgcctgctgccaccatgcctgtgctgctgctgaccggcctcttcctgctggtgtggaactatgagggcaccagcagcatccctggccctggctactgcatgggcatcggccccctcatcagccacggccgcttcctgtggatgggcatcggcagcgcctgcaactactacaacagagtgtatggagagttcatgagggtgtggatcagcggggaggagaccctcatcatcagcaagagcagctccatgttccacatcatgaagcacaaccactacagcagccgcttcggcagcaagctgggcctgcagtgcatcggcatgcatgagaagggcatcatcttcaacaacaaccctgagctgtggaagaccacccggcccttcttcatgaaggccctgagcggccctggcctggtgaggatggtgacagtgtgtgccgagagcctgaagacccacctgctgctcttcaccccagcctctgtgaactag

SEQ ID NO: 149045 - DNA, 657 bp, synthetic construct; identical to SEQ ID NO: 149040
  misc_feature 1..657: note = Description of Artificial Sequence: Synthetic coding sequence
  source 1..657: mol_type = other DNA

SEQ ID NO: 149046 - DNA, 1059 bp, synthetic construct; identical to SEQ ID NO: 149042
  misc_feature 1..1059: note = Description of Artificial Sequence: Synthetic coding sequence
  source 1..1059: mol_type = other DNA

SEQ ID NO: 149047 - DNA, 852 bp, synthetic construct
  misc_feature 1..852: note = Description of Artificial Sequence: Synthetic coding sequence
  source 1..852: mol_type = other DNA
atggtgctggagatgctgaaccccatccactacaacatcaccagcatcgtgcctgaggccatgcctgctgccaccatgcctgtgctgctgctgaccggcctcttcctgctggtgtggaactatgagggcaccagcagcatccctggccctggctactgcatgggcatcggccccctcatcagccacggccgcttcctgtggatgggcatcggcagcgcctgcaactactacaacagagtgtatggagagttcatgagggtgtggatcagcggggaggagaccctcatcatcagcaagagcagctccatgttccacatcatgaagcacaaccactacagcagccgcttcggcagcaagctgggcctgcagtgcatcggcatgcatgagaagggcatcatcttcaacaacaaccctgagctgtggaagaccacccggcccttcttcatgaaggccctgagcggccctggcctggtgaggatggtgacagtgtgtgccgagagcctgaagacccacctggaccggctggaggaggtgaccaatgaaagtggctacgtggatgtgctgaccctgctgcggcgggtgatgctggacaccagcaacaccctcttcctgcgcatccccctggatgaaagtgccatcgtggtgaagatccagggctactttgatgcctggcaggccctgctgatcaagccagacatcttcttcaagatctcctggctgtacaagaagtatgagaagtctgtgaaggacctgaaggatgccatcgaggtgctgattgctgagaagagaagacgcatcagcacagaggagaagctggaggagtgcatggactttgccacagagctgatctag

SEQ ID NO: 149048 - DNA, 498 bp, synthetic construct
  misc_feature 1..498: note = Description of Artificial Sequence: Synthetic coding sequence
  source 1..498: mol_type = other DNA
atggtgctggagatgctgaaccccatccactacaacatcaccagcatcgtgcctgaggccatgcctgctgccaccatgcctgtgctgctgctgaccggcctcttcctgctggtgtggaactatgagggcaccagcagcatccctggccctggctactgcatgggcatcggccccctcatcagccacggccgcttcctgtggatgggcatcggcagcgcctgcaactactacaacagagtgtatggagagttcatgagggtgtggatcagcggggaggagaccctcatcatcagcaagagcagctccatgttccacatcatgaagcacaaccactacagcagccgcttcggcagcaagctgggcctgcagtgcatcggcatgcatgagaagggcatcatcttcaacaacaaccctgagctgtggaagaccacccggcccttcttcatgaaggccctgagcggccctggcctggtgaggatggtgacagtgtgtgcctag

SEQ ID NO: 149049 - DNA, 1512 bp, synthetic construct; identical to SEQ ID NO: 149036
  misc_feature 1..1512: note = Description of Artificial Sequence: Synthetic coding sequence
  source 1..1512: mol_type = other DNA

SEQ ID NO: 149050 - DNA, 519 bp, synthetic construct
  misc_feature 1..519: note = Description of Artificial Sequence: Synthetic coding sequence
  source 1..519: mol_type = other DNA
atggtgctggagatgctgaaccccatccactacaacatcaccagcatcgtgcctgaggccatgcctgctgccaccatgcctgtgctgctgctgaccggcctcttcctgctggtgtggaactatgagggcaccagcagcatccctggccctggctactgcatgggcatcggccccctcatcagccacggccgcttcctgtggatgggcatcggcagcgcctgcaactactacaacagagtgtatggagagttcatgagggtgtggatcagcggggaggagaccctcatcatcagcaagagcagctccatgttccacatcatgaagcacaaccactacagcagccgcttcggcagcaagctgggcctgcagtgcatcggcatgcatgagaagggcatcatcttcaacaacaaccctgagctgtggaagaccacccggcccttcttcatgaaggccctgagcggccctggcctggtgaggatggtgacagtgtgtgccgagagcctgaagacccacctgtag

SEQ ID NO: 149051 - DNA, 735 bp, synthetic construct
  misc_feature 1..735: note = Description of Artificial Sequence: Synthetic coding sequence
  source 1..735: mol_type = other DNA
atggtgctggagatgctgaaccccatccactacaacatcaccagcatcgtgcctgaggccatgcctgctgccaccatgcctgtgctgctgctgaccggcctcttcctgctggtgtggaactatgagggcaccagcagcatccctggccctggctactgcatgggcatcggccccctcatcagccacggccgcttcctgtggatgggcatcggcagcgcctgcaactactacaacagagtgtatggagagttcatgagggtgtggatcagcggggaggagaccctcatcatcagcaagagcagctccatgttccacatcatgaagcacaaccactacagcagccgcttcggcagcaagctgggcctgcagtgcatcggcatgcatgagaagggcatcatcttcaacaacaaccctgagctgtggaagaccacccggcccttcttcatgaaggagagcgccatcgtggtgaagatccagggctactttgatgcctggcaggccctgctgatcaagccagacatcttcttcaagatctcctggctgtacaagaagtatgagaagtctgtgaaggacctgaaggatgccatcgaggtgctgattgctgagaagagaagacgcatcagcacagaggagaagctggaggagtgcatggactttgccacagagctgatcctggccgagaagagaggagacctgaccagagaaaatgtgaaccagtgcatcctggagatgtag

SEQ ID NO: 149052 - DNA, 1485 bp, synthetic construct
  misc_feature 1..1485: note = Description of Artificial Sequence: Synthetic coding sequence
  source 1..1485: mol_type = other DNA
atgctggccagcggcctgctgctggtgaccctgctggcctgcctgactgtgatggtgctgatgtctgtgtggaggcagaggaagagccggggcaagctgcccccaggccccacccccctgcccttcatcggcaactacctgcagctgaacacagagcagatgtacaacagcctgatgaagatcagcgagagatatggccctgtgttcaccatccacctgggcccccggcgggtggtggtgctgtgtggccatgatgctgtgaaggaggccctggtggaccaggccgaggagttcagcggccgcggggagcaggccacctttgactggctgttcaagggctacggcgtggccttcagcaatggagagcgggccaagcagctgcggcgcttcagcatcgccaccctgcggggcttcggcgtgggcaagaggggcatcgaggagcgcatccaggaggaggccggcttcctgattgatgccctgcggggcacccacggggccaacatcgaccccaccttcttcctgagcaggacagtgtccaatgtcatcagcagcatcgtgtttggagacagatttgattatgaggacaaggagttcctgagcctgctgaggatgatgctgggcagcttccagttcaccgccaccagcacaggccagctgtatgagatgttcagctctgtgatgaagcacctgcccggcccccagcagcaggccttcaaggagctgcagggcctggaggacttcatcgccaagaaggtggagcacaaccagaggaccctggaccccaacagcccccgggacttcatcgacagcttcctgatccgcatgcaggaggaggagaagaaccccaacacagagttctacctgaagaacctggtgatgaccaccctgaacctcttctttgctggaacagaaacagtgtccaccaccctgcgctatggcttcctgctgctgatgaagcaccctgaggtggaggccaaggtgcatgaggagattgacagagtgattggcaagaaccggcagcccaagtttgaggaccgggccaagatgccctacacagaggccgtcatccacgagatccagagatttggagacatgctgcccatgggcctggcccaccgggtgaacaaggacaccaagttccgggacttcttcctgcccaagggcacagaggtgttccccatgctgggctctgtgctgcgggacccccgcttcttcagcaacccccgggacttcaacccccagcacttcctggacaagaagggccagttcaagaagagtgatgcctttgtgcccttcagcatcggcaagcgctactgcttcggggagggcctggccaggatggagctgttcctgttcttcaccaccatcatgcagaacttccgcttcaagagcccccagagccccaaggacattgatgtgagccccaagcacgtgggctttgccaccatccccaggaactacaccatgtccttcctgcccaggtag

SEQ ID NO: 149053 - DNA, 1485 bp, synthetic construct
  misc_feature 1..1485: note = Description of Artificial Sequence: Synthetic coding sequence
  source 1..1485: mol_type = other DNA
atgctggccagcggcatgctgctggtggccctgctggtgtgcctgactgtgatggtgctgatgtctgtgtggcagcagaggaagagcaagggcaagctgcccccaggccccacccccctgcccttcatcggcaactacctgcagctgaacacagagcagatgtacaacagcctgatgaagatcagcgagagatatggccctgtgttcaccatccacctgggcccccggcgggtggtggtgctgtgtggccatgatgctgtgcgggaggccctggtggaccaggccgaggagttcagcggccgcggggagcaggccacctttgactgggtgttcaagggctacggcgtggtgttcagcaatggagagcgggccaagcagctgcggcgcttcagcatcgccaccctgcgggactttggagtgggcaagaggggcatcgaggagcgcatccaggaggaggccggcttcctgattgatgccctgcggggcactggaggagccaacatcgaccccaccttcttcctgagcaggacagtgtccaatgtcatcagcagcatcgtgtttggagacagatttgactacaaggacaaggagttcctgagcctgctgaggatgatgctgggcatcttccagttcaccagcaccagcacaggccagctgtatgagatgttcagctctgtgatgaagcacctgcccggcccccagcagcaggccttccagctgctgcagggcctggaggacttcatcgccaagaaggtggagcacaaccagaggaccctggaccccaacagcccccgggacttcatcgacagcttcctgatccgcatgcaggaggaggagaagaaccccaacacagagttctacctgaagaacctggtgatgaccaccctgaacctcttcatcggcggcacagaaacagtgtccaccaccctgcgctatggcttcctgctgctgatgaagcaccctgaggtggaggccaaggtgcatgaggagattgacagagtgattggcaagaaccggcagcccaagtttgaggaccgggccaagatgccctacatggaggccgtcatccacgagatccagagatttggagatgtgatccccatgagcctggcccggcgggtgaagaaggacaccaagttccgggacttcttcctgcccaagggcacagaggtgttccccatgctgggctctgtgctgcgggaccccagcttcttcagcaacccccaggacttcaacccccagcacttcctgaatgagaagggccagttcaagaagagtgatgcctttgtgcccttcagcatcggcaagaggaactgcttcggggagggcctggccaggatggagctgttcctgttcttcaccaccgtgatgcagaacttccggctgaagagcagccagagccccaaggacattgatgtgagccccaagcacgtgggctttgccaccatccccaggaactacaccatgtccttcctgcccaggtag

SEQ ID NO: 149054 - DNA, 1332 bp, synthetic construct
  misc_feature 1..1332: note = Description of Artificial Sequence: Synthetic coding sequence
  source 1..1332: mol_type = other DNA
atgctggccagcggcctgctgctggtggccctgctggcctgcctgactgtgatggtgctgatgtctgtgtggcagcagaggaagagccggggcaagctgcccccaggccccacccccctgcccttcatcggcaactacctgcagctgaacacagagcacatctgtgacagcatcatgaaggtgtcccagggcgtggccttcagcaatggagagcgggccaagcagctgctgcgctttgccatcgccaccctgcgggactttggagtgggcaagaggggcatcgaggagcgcatccaggaggagagcggcttcctgattgaggccatccgcagcacccatggagccaacatcgaccccaccttcttcctgagcaggacagtgtccaatgtcatcagcagcatcgtgtttggagacagatttgattatgaggacaaggagttcctgagcctgctgtccatgatgctgggcatcttccagttcaccagcaccagcacaggccagctgtatgagatgttcagctctgtgatgaagcacctgcccggcccccagcagcaggccttcaagctgctgcagggcctggaggacttcatcgccaagaaggtggagcacaaccagaggaccctggaccccaacagcccccaggacttcatcgacagcttcctgatccacatgcaggaggaggagaagaaccccaacacagagttctacctgaagaacctgatgatgagcaccctgaacctcttcatcgccggcacagagaccgtgtccaccaccctgcgctatggcttcctgctgctgatgaagcaccctgaggtggaggccaaggtgcatgaggagattgacagagtcatcggcaagaaccggcagcccaagtttgaggacaggaccaagatgccctacatggaggccgtcatccacgagatccagagatttggagatgtgatccccatgagcctggccaggagagtgaagaaggacaccaagttccgggacttcttcctgcccaagggcacagaggtgttccccatgctgggctctgtgctgcgggaccccagcttcttcagcaacccccaggacttcaacccccagcacttcctggatgacaagggccagttcaagaagagtgatgcctttgtgcccttcagcatcggcaagaggaactgctttggagagggcctggccaggatggagctgttcctgttcttcaccaccgtgatgcagaacttccggctgaagagcagccagagccccaaggacattgatgtgagccccaagcacgtggtgtttgccaccatccccaggaactacaccatgtccttcctgcccaggtag

SEQ ID NO: 149055 - DNA, 1485 bp, synthetic construct
  misc_feature 1..1485: note = Description of Artificial Sequence: Synthetic coding sequence
  source 1..1485: mol_type = other DNA
atgctggccagcggcctgctgctggtggccctgctggcctgcctgactgtgatggtgctgatgtctgtgtggcagcagaggaagagccggggcaagctgcccccaggccccacccccctgcccttcatcggcaactacctgcagctgaacacagagcacatctgtgacagcatcatgaagttctctgaatgttatggccctgtgttcaccatccacctgggcccccggcgggtggtggtgctgtgtggccatgatgctgtgcgggaggccctggtggaccaggccgaggagttcagcggccgcggggagcaggccacctttgactgggtgttcaagggctacggcgtggccttcagcaatggagagcgggccaagcagctgctgcgctttgccatcgccaccctgcgggactttggagtgggcaagaggggcatcgaggagcgcatccaggaggagagcggcttcctgattgaggccatccgcagcacccacggggccaacatcgaccccaccttcttcctgagcaggacagtgtccaatgtcatcagcagcatcgtgtttggagacagatttgattatgaggacaaggagttcctgagcctgctgtccatgatgctgggcatcttccagttcaccagcaccagcacaggccagctgtatgagatgttcagctctgtgatgaagcacctgcccggcccccagcagcaggccttcaagctgctgcagggcctggaggacttcatcgccaagaaggtggagcacaaccagaggaccctggaccccaacagcccccaggacttcatcgacagcttcctgatccacatgcaggaggaggagaagaaccccaacacagagttctacctgaagaacctgatgatgagcaccctgaacctcttcatcgccggcacagaaacagtgtccaccaccctgcgctatggcttcctgctgctgatgaagcaccctgaggtggaggccaaggtgcatgaggagattgacagagtgattggcaagaaccggcagcccaagtttgaggacaggaccaagatgccctacatggaggccgtcatccacgagatccagagatttggagatgtgatccccatgagcctggcccggcgggtgaagaaggacaccaagttccgggacttcttcctgcccaagggcacagaggtgttccccatgctgggctctgtgctgcgggaccccagcttcttcagcaacccccaggacttcaacccccagcacttcctggatgacaagggccagttcaagaagagtgatgcctttgtgcccttcagcatcggcaagaggaactgcttcggggagggcctggccaggatggagctgttcctgttcttcaccaccgtgatgcagaacttccggctgaagagcagccagagccccaaggacattgatgtgagccccaagcacgtggtgtttgccaccatccccaggaactacaccatgtccttcctgcccaggtag

SEQ ID NO: 149056 - DNA, 1476 bp, synthetic construct
  misc_feature 1..1476: note = Description of Artificial Sequence: Synthetic coding sequence
  source 1..1476: mol_type = other DNA
atggagctgtctgtgctgctcttcctggccctgctgaccggcctgctgctgctgctggtgcagaggcaccccaacacccatgaccggctgcccccaggcccccggcccctgcccctgctgggcaacctgctgcagatggaccggcggggcctgctgaagagcttcctgcgcttccgggagaagtatggagatgtgttcaccgtgcacctgggccccaggcctgtggtgatgctgtgtggggtggaggccatccgggaggccctggtggacaaggccgaggccttcagcggccggggcaagatcgccatggtggaccccttcttccggggctatggagtcatctttgccaatggaaaccgctggaaggtgctgcggcgcttctctgtgaccaccatgagggactttggcatgggcaagaggtctgtggaggagcgcatccaggaggaggcccagtgcctgattgaggagctgaggaagagcaaaggagccctgatggaccccaccttcctgttccagagcatcacagccaacatcatctgcagcatcgtgtttgggaagcgcttccactaccaggaccaggagttcctgaagatgctgaacctcttctaccagaccttcagcctcatcagctctgtgtttggccagctgtttgagctgttcagcggcttcctgaagtacttccctggggcccaccggcaggtgtacaagaacctgcaggagatcaatgcctacatcggccacagcgtggagaagcaccgggagaccctggaccccagcgcccccaaggacctgattgacacctacctgctgcacatggagaaggagaagagcaatgcccacagcgagttcagccaccagaacctgaacctgaacaccctgagcctcttctttgctggaacagagaccaccagcaccaccctgcgctatggcttcctgctgatgctgaagtacccccacgtggccgagcgggtgtaccgggagattgagcaggtgattggcccccacaggcctcctgagctgcatgaccgggccaagatgccctacacagaagctgtgatctatgagatccagcgcttcagtgacctgctgcccatgggcgtgccccacatcgtgacccagcacaccagcttccggggctacatcatccccaaggacacagaggtgttcctgatcctgagcacagccctgcatgacccccactactttgagaagccagatgccttcaacccagaccacttcctggatgccaatggagccctgaagaagacagaggccttcatccccttcagcctgggcaagaggatctgcctgggggagggcatcgcccgggcagagctgttcctgttcttcaccaccatcctgcagaacttctccatggccagccctgtggcccctgaggacatcgacctgaccccccaggagtgtggggtgggcaagatcccccccacctaccagatccgcttcctgcccaggtag

SEQ ID NO: 149057 - DNA, 876 bp, synthetic construct
  misc_feature 1..876: note = Description of Artificial Sequence: Synthetic coding sequence
  source 1..876: mol_type = other DNA
atgcgctgcatgctgaccaacagccacccctggtgtggctgtgactggcagttccgggagaagtatggagatgtgttcaccgtgcacctgggccccaggcctgtggtgatgctgtgtggggtggaggccatccgggaggccctggtggacaaggccgaggccttcagcggccggggcaagatcgccatggtggaccccttcttccggggctatggagtcatctttgccaatggaaaccgctggaaggtgctgcggcgcttctctgtgaccaccatgagggactttggcatgggcaagaggtctgtggaggagcgcatccaggaggaggcccagtgcctgattgaggagctgaggaagagcaaggagcgggtgtaccgggagattgagcaggtgattggcccccacaggcctcctgagctgcatgaccgggccaagatgccctacacagaagctgtgatctatgagatccagcgcttcagtgacctgctgcccatgggcgtgccccacatcgtgacccagcacaccagcttccggggctacatcatccccaaggacacagaggtgttcctgatcctgagcacagccctgcatgacccccactactttgagaagccagatgccttcaacccagaccacttcctggatgccaatggagccctgaagaagacagaggccttcatccccttcagcctgggcaagaggatctgcctgggggagggcatcgcccgggcagagctgttcctgttcttcaccaccatcctgcagaacttctccatggccagccctgtggcccctgaggacatcgacctgaccccccaggagtgtggggtgggcaagatcccccccacctaccagatccgcttcctgcccaggtag

SEQ ID NO: 149058 - DNA, 1473 bp, synthetic construct
  misc_feature 1..1473: note = Description of Artificial Sequence: Synthetic coding sequence
  source 1..1473: mol_type = other DNA
atggacccctttgtggtgctggtgctgtgcctgagctgcctgctgctgctgagcatctggaggcagagcagcggccggggcaagctgcccccaggccccacccccctgcctgtgattggcaacatcctgcagattgacatcaaggatgtgtccaagagcctgaccaacctgagcaagatctacggccctgtgttcaccctgtacttcggcctggagaggatggtggtgctgcacggctatgaggtggtgaaggaggccctgattgacctgggggaggagttcagcggccggggccacttccccctggccgagcgggccaacagaggcttcggcatcgtgttcagcaatggcaagcgctggaaggagatccgccgcttcagcctgatgaccctgaggaactttggcatgggcaagaggagcattgaggacagagtgcaggaggaggcccgctgcctggtggaggagctgaggaagaccaaggccagcccctgtgaccccaccttcatcctgggctgtgccccctgcaacgtcatctgcagcatcatcttccagaagagatttgactacaaggaccagcagttcctgaacctgatggagaagctgaatgaaaacatcagaattgtgtccaccccctggatccagatctgcaacaacttccccaccatcatcgactacttccctggcacccacaacaagctgctgaagaacctggccttcatggagagtgacatcctggagaaggtgaaggagcaccaggagagcatggacatcaacaacccccgggacttcatcgactgcttcctgatcaagatggagaaggagaagcagaaccagcagagcgagttcaccatcgagaacctggtgatcacagctgctgacctgctgggcgccggcacagagaccaccagcaccaccctgcgctatgccctgctgctgctgctgaagcaccctgaggtgacagccaaggtgcaggaggagattgagcgggtggtgggcaggaacagaagcccctgcatgcaggaccggggccacatgccctacacagatgctgtggtgcatgaggtgcagcgctacatcgacctgatccccaccagcctgccccatgctgtgacctgtgatgtgaagttcaggaactacctgatccccaagggcaccaccatcctgaccagcctgacctctgtgctgcatgacaacaaggagttccccaaccctgagatgtttgaccccaggcacttcctggatgagggcggcaacttcaagaagagcaactacttcatgcccttctctgctgggaagaggatctgtgtgggggagggcctggccaggatggagctgttcctgttcctgaccttcatcctgcagaacttcaacctgaagagcctgattgaccccaaggacctggacaccacccctgtggtgaatggatttgcctctgtgccccccttctaccagctgtgcttcatccctgtgtag

SEQ ID NO: 149059 - DNA, 1473 bp, synthetic construct
  misc_feature 1..1473: note = Description of Artificial Sequence: Synthetic coding sequence
  source 1..1473: mol_type = other DNA
atggagccctttgtggtgctggtgctgtgcctgtccttcatgctgctcttcagcctgtggaggcagagctgcagaagaaggaagctgcccccaggccccacccccctgcccatcatcggcaacatgctgcagattgatgtgaaggacatctgcaagagcttcaccaacttcagcaaggtgtatggccctgtgttcaccgtgtacttcggcatgaaccccatcgtggtgttccacggctatgaggccgtgaaggaggccctgattgacaacggggaggagttcagcggccggggcaacagccccatcagccagaggatcaccaagggcctgggcatcatcagcagcaatggcaagcgctggaaggagatccgccgcttcagcctgaccaccctgaggaactttggcatgggcaagaggagcattgaggacagagtgcaggaggaggcccactgcctggtggaggagctgaggaagaccaaggccagcccctgtgaccccaccttcatcctgggctgtgccccctgcaacgtcatctgcagcgtggtgttccagaagagatttgactacaaggaccagaacttcctgaccctgatgaagcgcttcaatgaaaacttccgcatcctgaacagcccctggatccaggtgtgcaacaacttccccctgctgattgactgcttccctggcacccacaacaaggtgctgaagaatgtggccctgaccaggagctacatccgggagaaggtgaaggagcaccaggccagcctggatgtgaacaacccccgggacttcatcgactgcttcctgatcaagatggagcaggagaaggacaaccagaagtctgagttcaacatcgagaacctggtgggcaccgtggccgacctgtttgtggccggcacagagaccaccagcaccaccctgcgctatggcctgctgctgctgctgaagcaccctgaggtgacagccaaggtgcaggaggagattgaccacgtgattggccgccacaggagcccctgcatgcaggacaggagccacatgccctacacagatgctgtggtgcatgagatccagcgctacagcgacctggtgcccaccggggtgccccatgctgtgaccacagacaccaagttcaggaactacctgatccccaagggcaccaccatcatggccctgctgacctctgtgctgcatgatgacaaggagttccccaaccccaacatctttgatcctggccacttcctggacaagaatggaaacttcaagaagagtgactacttcatgcccttctctgctgggaagaggatctgtgccggggagggcctggccaggatggagctgttcctgttcctgaccaccatcctgcagaacttcaacctgaagtctgtggatgacctgaagaacctgaacaccacagctgtgaccaagggcatcgtgtccctgccccccagctaccagatctgcttcatccctgtgtag

SEQ ID NO: 149060 - DNA, 1374 bp, synthetic construct
  misc_feature 1..1374: note = Description of Artificial Sequence: Synthetic coding sequence
  source 1..1374: mol_type = other DNA
atggagaggagcttcctggaggaggccatcccccagtacctgaaggagctgctgaaggacctggtgggcgcccacatctctgtgtctgccctggtgactggagtgcggggcatggagaacagagccctgaagagcttctctgctgagctgagcctgagcgcctggctgcccagcgtggccgccctgagcagcctggccgtgaacagccccagcttctgccccttcttcctgggcatcatcagcagcaatggcaagcgctggaaggagatccgccgcttcagcctgaccaccctgaggaactttggcatgggcaagaggagcattgaagatagagtgcaggaggaggcccactgcctggtggaggagctgaggaagaccaaggccagcccctgtgaccccaccttcatcctgggctgtgccccctgcaacgtcatctgcagcgtggtgttccagaagagatttgactacaaggaccagaacttcctgaccctgatgaagcgcttcaatgaaaacttccgcatcctgaacagcccctggatccaggtgtgcaacaacttccccctgctgattgactgcttccctggcacccacaacaaggtgctgaagaatgtggccctgaccaggagctacatccgggagaaggtgaaggagcaccaggccagcctggatgtgaacaacccccgggacttcatcgactgcttcctgatcaagatggagcaggagaaggacaaccagaagtctgagttcaacatcgagaacctggtgggcaccgtggccgacctgtttgtggccggcacagagaccaccagcaccaccctgcgctatggcctgctgctgctgctgaagcaccctgaggtgacagccaaggtgcaggaggagattgaccacgtgattggccgccacaggagcccctgcatgcaggacaggagccacatgccctacacagatgctgtggtgcatgagatccagcgctacagcgacctggtgcccactggagtgccccatgctgtgaccacagacaccaagttcaggaactacctgatccccaagggcaccaccatcatggccctgctgacctctgtgctgcatgatgacaaggagttccccaaccccaacatctttgaccccggccacttcctggacaagaatggaaacttcaagaagagtgactacttcatgcccttctctgctgggaagaggatctgtgccggggagggcctggccaggatggagctgttcctgttcctgaccaccatcctgcagaacttcaacctgaagtctgtggatgacctgaagaacctgaacaccacagctgtgaccaagggcatcgtgtccctgcccccatcctaccagatctgcttcatccctgtgtag

SEQ ID NO: 149061 - DNA, 1167 bp, synthetic construct
  misc_feature 1..1167: note = Description of Artificial Sequence: Synthetic coding sequence
  source 1..1167: mol_type = other DNA
atgttcctgcagcccatcgccaagggcatcatcagcagcaatggcaagcgctggaaggagatccgccgcttcagcctgaccaccctgaggaactttggcatgggcaagaggagcattgaggacagagtgcaggaggaggcccactgcctggtggaggagctgaggaagaccaaggccagcccctgtgaccccaccttcatcctgggctgtgccccctgcaacgtcatctgcagcgtggtgttccagaagagatttgactacaaggaccagaacttcctgaccctgatgaagcgcttcaatgaaaacttccgcatcctgaacagcccctggatccaggtgtgcaacaacttccccctgctgattgactgcttccctggcacccacaacaaggtgctgaagaatgtggccctgaccaggagctacatccgggagaaggtgaaggagcaccaggccagcctggatgtgaacaacccccgggacttcatcgactgcttcctgatcaagatggagcaggagaaggacaaccagaagtctgagttcaacatcgagaacctggtgggcaccgtggccgacctgtttgtggccggcacagagaccaccagcaccaccctgcgctatggcctgctgctgctgctgaagcaccctgaggtgacagccaaggtgcaggaggagattgaccacgtgattggccgccacaggagcccctgcatgcaggacaggagccacatgccctacacagatgctgtggtgcatgagatccagcgctacagcgacctggtgcccaccggggtgccccatgctgtgaccacagacaccaagttcaggaactacctgatccccaagggcaccaccatcatggccctgctgacctctgtgctgcatgatgacaaggagttccccaaccccaacatctttgatcctggccacttcctggacaagaatggaaacttcaagaagagtgactacttcatgcccttctctgctgggaagaggatctgtgccggggagggcctggccaggatggagctgttcctgttcctgaccaccatcctgcagaacttcaacctgaagtctgtggatgacctgaagaacctgaacaccacagctgtgaccaagggcatcgtgtccctgccccccagctaccagatctgcttcatccctgtgtag

SEQ ID NO: 149062 - DNA, 924 bp, synthetic construct
  misc_feature 1..924: note = Description of Artificial Sequence: Synthetic coding sequence
  source 1..924: mol_type = other DNA
atggccgccaagtgctgcagcaccttcttcctgggctgtgagttcagccagttcctgcccctcttcctgctgggcatcatcagcagcaatggcaagcgctggaaggagatccgccgcttcagcctgaccaccctgaggaactttggcatgggcaagaggagcattgaggacagagtgcaggaggaggcccactgcctggtggaggagctgaggaagaccaaggccagcccctgtgaccccaccttcatcctgggctgtgccccctgcaacgtcatctgcagcgtggtgttccagaagagatttgactacaaggaccagaacttcctgaccctgatgaagcgcttcaatgaaaacttccgcatcctgaacagcccctggatccaggtgtgcaacaacttccccctgctgattgactgcttccctggcacccacaacaaggtgctgaagaatgtggccctgaccaggagctacatccgggagaaggtgaaggagcaccaggccagcctggatgtgaacaacccccgggacttcatcgactgcttcctgatcaagatggagcaggagaaggacaaccagaagtctgagttcaacatcgagaacctggtgggcaccgtggccgacctgtttgtggccggcacagagaccaccagcaccaccctgcgctatggcctgctgctgctgctgaagcaccctgaggtgacagccaaggtgcaggaggagattgaccacgtgattggccgccacaggagcccctgcatgcaggacaggagccacatgccctacacagatgctgtggtgcatgagatccagcgctacagcgacctggtgcccaccggggtgccccatgctgtgaccacagacaccaagttcaggaactacctgatccccaagagctttgacaacaagatcatgctggccgcctag

SEQ ID NO: 149063 - DNA, 1473 bp, synthetic construct
  misc_feature 1..1473: note = Description of Artificial Sequence: Synthetic coding sequence
  source 1..1473: mol_type = other DNA
atggacagcctggtggtgctggtgctgtgcctgagctgcctgctgctgctgagcctgtggaggcagagcagcggccggggcaagctgcccccaggccccacccccctgcctgtgattggcaacatcctgcagatcggcatcaaggacatcagcaagagcctgaccaacctgagcaaggtgtatggccctgtgttcaccctgtacttcggcctgaagcccatcgtggtgctgcacggctatgaggccgtgaaggaggccctgattgacctgggggaggagttcagcggccggggcatcttccccctggccgagcgggccaacagaggcttcggcatcgtgttcagcaatggcaagaagtggaaggagatccgccgcttcagcctgatgaccctgaggaactttggcatgggcaagaggagcattgaggacagagtgcaggaggaggcccgctgcctggtggaggagctgaggaagaccaaggccagcccctgtgaccccaccttcatcctgggctgtgccccctgcaacgtcatctgcagcatcatcttccacaagagatttgactacaaggaccagcagttcctgaacctgatggagaagctgaatgaaaacatcaagatcctgagcagcccctggatccagatctgcaacaacttcagccccatcatcgactacttccctggcacccacaacaagctgctgaagaatgtggccttcatgaagagctacatcctggagaaggtgaaggagcaccaggagagcatggacatgaacaacccccaggacttcatcgactgcttcctgatgaagatggagaaggagaagcacaaccagcccagcgagttcaccatcgagagcctggagaacacagctgtggacctgtttggagctggaacagagaccaccagcaccaccctgcgctatgccctgctgctgctgctgaagcaccctgaggtgacagccaaggtgcaggaggagattgagcgggtgattggaagaaacagaagcccctgcatgcaggacaggagccacatgccctacacagatgctgtggtgcatgaggtgcagcgctacatcgacctgctgcccaccagcctgccccatgctgtgacctgtgacatcaagttcaggaactacctgatccccaagggcaccaccatcctgatcagcctgacctctgtgctgcatgacaacaaggagttccccaaccctgagatgtttgacccccaccacttcctggatgagggcggcaacttcaagaagagcaagtacttcatgcccttctctgctgggaagaggatctgtgtgggggaggccctggccggcatggagctgttcctgttcctgaccagcatcctgcagaacttcaacctgaagagcctggtggaccccaagaacctggacaccacccctgtggtgaatggatttgcctctgtgccccccttctaccagctgtgcttcatccctgtgtag

SEQ ID NO: 149064 - DNA, 1362 bp, synthetic construct
  misc_feature 1..1362: note = Description of Artificial Sequence: Synthetic coding sequence
  source 1..1362: mol_type = other DNA
atggacagcctggtggtgctggtgctgtgcctgagctgcctgctgctgctgagcctgtggaggcagagcagcggccggggcaagctgcccccaggccccacccccctgcctgtgattggcaacatcctgcagatcggcatcaaggacatcagcaagagcctgaccaacctgagcaaggtgtatggccctgtgttcaccctgtacttcggcctgaagcccatcgtggtgctgcacggctatgaggccgtgaaggaggccctgattgacctgggggaggagttcagcggccggggcatcttccccctggccgagcgggccaacagaggcttcggcatcgtgttcagcaatggcaagaagtggaaggagatccgccgcttcagcctgatgaccctgaggaactttggcatgggcaagaggagcattgaggacagagtgcaggaggaggcccgctgcctggtggaggagctgaggaagaccaaggccagcccctgtgaccccaccttcatcctgggctgtgccccctgcaacgtcatctgcagcatcatcttccacaagagatttgactacaaggaccagcagttcctgaacctgatggagaagctgaatgaaaacatcaagatcctgagcagcccctggatccagatctgcaacaacttcagccccatcatcgactacttccctggcacccacaacaagctgctgaagaatgtggccttcatgaagagctacatcctggagaaggtgaaggagcaccaggagagcatggacatgaacaacccccaggacttcatcgactgcttcctgatgaagatggagaaggagaagcacaaccagcccagcgagttcaccatcgagagcctggagaacacagctgtggacctgtttggagctggaacagagaccaccagcaccaccctgcgctatgccctgctgctgctgctgaagcaccctgaggtgacagccaaggtgcaggaggagattgagcgggtgattggaagaaacagaagcccctgcatgcaggacaggagccacatgccctacacagatgctgtggtgcatgaggtgcagcgctacatcgacctgctgcccaccagcctgccccatgctgtgacctgtgacatcaagttcaggaactacctgatccccaagggcaccaccatcctgatcagcctgacctctgtgctgcatgacaacaaggagttccccaaccctgagatgtttgacccccaccacttcctggatgagggcggcaacttcaagaagagcaagtacttcatgctggtgctgaagatgatcagaacagagaggaccaagaggaagagggtgggcaagctgttctgggtgtctgtgcgggtgacctag

SEQ ID NO: 149065 - DNA, 1341 bp, synthetic construct
  misc_feature 1..1341: note = Description of Artificial Sequence: Synthetic coding sequence
  source 1..1341: mol_type = other DNA
atgggcctggaggccctggtgcccctggccgtcatcgtggccatcttcctgctgctggtggacctgatgcaccggcggcagcgctgggccgcccgctacccacctggccccctgcccctgcccggcctgggcaacctgctgcacgtggacttccagaacaccccctactgctttgaccagctgcggaggagatttggagatgtgttcagcctgcagctggcctggacccctgtggtggtgctgaatggcctggccgctgtgcgggaggccctggtgacccacggggaggacacagctgaccggccccctgtgcccatcacccagatcctgggcttcggccccaggagccagggccggcccttccggcccaacggcctgctggacaaggctgtgtccaatgtgattgccagcctgacctgtggccgccgctttgaatatgatgacccccgcttcctgcggctgctggacctggcccaggagggcctgaaggaggagagcggcttcctgcgggaggtgctgaatgctgtgcctgtgctgctgcacatcccagccctggccggcaaggtgctgcgcttccagaaggccttcctgacccagctggatgagctgctgacagagcacaggatgacctgggaccctgcccagcccccccgggacctgacagaggccttcctggccgagatggagaaggccaagggcaaccctgagagcagcttcaatgatgagaacctgtgcatcgtggtggccgacctcttctctgctggcatggtgaccaccagcaccaccctggcctggggcctgctgctgatgatcctgcacccagatgtgcagaggagagtgcagcaggagattgatgatgtgattggccaggtgcggcggcctgagatgggagaccaggcccacatgccctacaccacagctgtgatccacgaggtgcagagatttggagacatcgtgcccctgggcgtgacccacatgaccagccgggacatcgaggtgcagggcttccgcatccccaagggcaccaccctcatcaccaacctgagctctgtgctgaaggatgaggccgtgtgggagaagcccttccgcttccaccctgagcacttcctggatgcccagggccactttgtgaagccagaggccttcctgcccttctctgctggaagaagagcctgcctgggggagcccctggccaggatggagctgttcctgttcttcaccagcctgctgcagcacttctccttctctgtgcccaccggccagccccggcccagccaccacggcgtgtttgccttcctggtgacccccagcccctatgagctgtgtgctgtgcccaggtag

SEQ ID NO: 149066 - DNA, 1494 bp, synthetic construct
  misc_feature 1..1494: note = Description of Artificial Sequence: Synthetic coding sequence
  source 1..1494: mol_type = other DNA
atgggcctggaggccctggtgcccctggccgtcatcgtggccatcttcctgctgctggtggacctgatgcaccggcggcagcgctgggccgcccgctacccacctggccccctgcccctgcccggcctgggcaacctgctgcacgtggacttccagaacaccccctactgctttgaccagctgcggaggagatttggagatgtgttcagcctgcagctggcctggacccctgtggtggtgctgaatggcctggccgctgtgcgggaggccctggtgacccacggggaggacacagctgaccggccccctgtgcccatcacccagatcctgggcttcggccccaggagccagggcgtcttcctggcccgctatggccctgcctggagggagcagaggcgcttctctgtgtccaccctgaggaacctgggcctgggcaagaagagcctggagcagtgggtgacagaggaggccgcctgcctgtgtgccgcctttgccaaccacagcggccggcccttccggcccaacggcctgctggacaaggctgtgtccaatgtcatcgccagcctgacctgtggcagaagatttgaatatgatgacccccgcttcctgcggctgctggacctggcccaggagggcctgaaggaggagagcggcttcctgcgggaggtgctgaatgctgtgcctgtgctgctgcacatcccagccctggccggcaaggtgctgcgcttccagaaggccttcctgacccagctggatgagctgctgacagagcacaggatgacctgggaccctgcccagcccccccgggacctgacagaggccttcctggccgagatggagaaggccaagggcaaccctgagagcagcttcaatgatgagaacctgtgcatcgtggtggccgacctcttctctgctggcatggtgaccaccagcaccaccctggcctggggcctgctgctgatgatcctgcacccagatgtgcagaggagagtgcagcaggagattgatgatgtgattggccaggtgagaagacctgagatgggagaccaggcccacatgccctacaccacagctgtgattcatgaggtgcagagatttggagacatcgtgcccctgggcgtgacccacatgaccagccgggacatcgaggtgcagggcttccgcatccccaagggcaccaccctcatcaccaacctgagctctgtgctgaaggatgaagctgtgtgggagaagcccttccgcttccaccctgagcacttcctggatgcccagggccactttgtgaagccagaggccttcctgcccttctctgctggccggcgggcctgcctgggggagcccctggccaggatggagctgttcctgttcttcaccagcctgctgcagcacttctccttctctgtgcccaccggccagccccggcccagccaccacggcgtgtttgccttcctggtgacccccagcccctatgagctgtgtgctgtgcccaggtag

SEQ ID NO: 149067 - DNA, 1494 bp, synthetic construct
  misc_feature 1..1494: note = Description of Artificial Sequence: Synthetic coding sequence
  source 1..1494: mol_type = other DNA
atgggcctggaggccctggtgcccctggccgtcatcgtggccatcttcctgctgctggtggacctgatgcaccggcggcagcgctgggccgcccgctacccacctggccccctgcccctgcccggcctgggcaacctgctgcacgtggacttccagaacaccccctactgctttgaccagctgcggaggagatttggagatgtgttcagcctgcagctggcctggacccctgtggtggtgctgaatggcctggccgctgtgcgggaggccctggtgacccacggggaggacacagctgaccggccccctgtgcccatcacccagatcctgggcttcggcccccggggccagggcgtcttcctggcccgctatggccctgcctggagggagcagaggcgcttctctgtgtccaccctgaggaacctgggcctgggcaagaagagcctggagcagtgggtgacagaggaggccgcctgcctgtgtgccgcctttgccaaccacagcggccggcccttccggcccaacggcctgctggacaaggctgtgtccaatgtcatcgccagcctgacctgtggcagaagatttgaatatgatgacccccgcttcctgcggctgctggacctggcccaggagggcctgaaggaggagagcggcttcctgcgggaggtgctgaatgctgtgcctgtgctgctgcacatcccagccctggccggcaaggtgctgcgcttccagaaggccttcctgacccagctggatgagctgctgacagagcacaggatgacctgggaccctgcccagcccccccgggacctgacagaggccttcctggccgagatggagaaggccaagggcaaccctgagagcagcttcaatgatgagaacctgtgcatcgtggtggccgacctcttctctgctggcatggtgaccaccagcaccaccctggcctggggcctgctgctgatgatcctgcacccagatgtgcagaggagagtgcagcaggagattgatgatgtgattggccaggtgagaagacctgagatgggagaccaggcccacatgccctacaccacagctgtgattcatgaggtgcagagatttggagacatcgtgcccctgggcgtgacccacatgaccagccgggacatcgaggtgcagggcttccgcatccccaagggcaccaccctcatcaccaacctgagctctgtgctgaaggatgaagctgtgtgggagaagcccttccgcttccaccctgagcacttcctggatgcccagggccactttgtgaagccagaggccttcctgcccttctctgctggccggcgggcctgcctgggggagcccctggccaggatggagctgttcctgttcttcaccagcctgctgcagcacttctccttctctgtgcccaccggccagccccggcccagccaccacggcgtgtttgccttcctggtgacccccagcccctatgagctgtgtgctgtgcccaggtag

SEQ ID NO: 149068 - DNA, 1332 bp, synthetic construct
  misc_feature 1..1332: note = Description of Artificial Sequence: Synthetic coding sequence
  source 1..1332: mol_type = other DNA
caggaggccctgaccctgcccctgcagctgcggaggagatttggagatgtgttcagcctgcagctggcctggacccctgtggtggtgctgaatggcctggccgctgtgcgggaggccctggtgacccatggagaggacacagctgacaggcctcctgtgcccatcacccagatcctgggcttcggcccccggggccagggcgtcttcctggcccgctatggccctgcctggagggagcagaggcgcttctctgtgtccaccctgaggaacctgggcctgggcaagaagagcctggagcagtgggtgacagaggaggccgcctgcctgtgtgccgcctttgccaaccatgatgccccctttgcccccaccgtgtcctggaccaagcccaacgtcatcgccagcctgacctgtggcagaagatttgaatatgatgacccccgcttcctgcggctgctggacctggcccaggagggcctgaaggaggagagcggcttcctgcgggaggtgctgaatgctgtgcctgtgctgctgcacatcccagccctggccggcaaggtgctgcgcttccagaaggccttcctgacccagctggatgagctgctgacagagcacaggatgacctgggaccctgcccagcccccccgggacctgacagaggccttcctggccgagatggagaaggccaagggcaaccctgagagcagcttcaatgatgagaacctgtgcatcgtggtggccgacctcttctctgctggcatggtgaccaccagcaccaccctggcctggggcctgctgctgatgatcctgcacccagatgtgcagaggagagtgcagcaggagattgatgatgtgattggccaggtgagaagacctgagatgggagaccaggcccacatgccctacaccacagctgtgattcatgaggtgcagagatttggagacatcgtgcccctgggcgtgacccacatgaccagccgggacatcgaggtgcagggcttccgcatccccaagggcaccaccctcatcaccaacctgagctctgtgctgaaggatgaagctgtgtgggagaagcccttccgcttccaccctgagcacttcctggatgcccagggccactttgtgaagccagaggccttcctgcccttctctgctggccggcgggcctgcctgggggagcccctggccaggatggagctgttcctgttcttcaccagcctgctgcagcacttctccttctctgtgcccaccggccagccccggcccagccaccacggcgtgtttgccttcctggtgacccccagcccctatgagctgtgtgctgtgcccaggtag

SEQ ID NO: 149069 - DNA, 1341 bp, synthetic construct
  misc_feature 1..1341: note = Description of Artificial Sequence: Synthetic coding sequence
  source 1..1341: mol_type = other DNA
atgggcctggaggccctggtgcccctggccatgattgtggccatcttcctgctgctggtggacctgatgcaccggcggcagcgctgggccgcccgctacccacctggccccctgcccctgcccggcctgggcaacctgctgcacgtggacttccagaacaccccctactgctttgaccagctgcggaggagatttggagatgtgttcagcctgcagctggcctggacccctgtggtggtgctgaatggcctggccgctgtgcgggaggccctggtgacccacggggaggacacagctgaccggccccctgtgcccatcacccagatcctgggcttcggccccaggagccagggccggcccttccggcccaacggcctgctggacaaggctgtgtccaatgtgattgccagcctgacctgtggccgccgctttgaatatgatgacccccgcttcctgcggctgctggacctggcccaggagggcctgaaggaggagagcggcttcctgcgggaggtgctgaatgctgtgcctgtgctgctgcacatcccagccctggccggcaaggtgctgcgcttccagaaggccttcctgacccagctggatgagctgctgacagagcacaggatgacctgggaccctgcccagcccccccgggacctgacagaggccttcctggccgagatggagaaggccaagggcaaccctgagagcagcttcaatgatgagaacctgtgcatcgtggtggccgacctcttctctgctggcatggtgaccaccagcaccaccctggcctggggcctgctgctgatgatcctgcacccagatgtgcagaggagagtgcagcaggagattgatgatgtgattggccaggtgcggcggcctgagatgggagaccaggcccacatgccctacaccacagctgtgatccacgaggtgcagagatttggagacatcgtgcccctgggcgtgacccacatgaccagccgggacatcgaggtgcagggcttccgcatccccaagggcaccaccctcatcaccaacctgagctctgtgctgaaggatgaggccgtgtgggagaagcccttccgcttccaccctgagcacttcctggatgcccagggccactttgtgaagccagaggccttcctgcccttctctgctggaagaagagcctgcctgggggagcccctggccaggatggagctgttcctgttcttcaccagcctgctgcagcacttctccttctctgtgcccaccggccagccccggcccagccaccacggcgtgtttgccttcctggtgacccccagcccctatgagctgtgtgctgtgcccaggtag

SEQ ID NO: 149070 - DNA, 1482 bp, synthetic construct
  misc_feature 1..1482: note = Description of Artificial Sequence: Synthetic coding sequence
  source 1..1482: mol_type = other DNA
atgtctgccctgggcgtgacagtggccctgctggtgtgggccgccttcctgctgctggtgtccatgtggaggcaggtgcacagctcctggaacctgcccccaggccccttccccctgcccatcatcggcaacctcttccagctggagctgaagaacatccccaagagcttcacccggctggcccagcgcttcggccctgtgttcaccctgtatgtgggcagccagaggatggtggtgatgcacggctacaaggctgtgaaggaggccctgctggactacaaggatgagttcagcggccgcggggacctgcctgccttccacgcccaccgggaccggggcatcatcttcaacaacggccccacctggaaggacatccgccgcttcagcctgaccaccctgaggaactacggcatgggcaagcagggcaatgaaagccgcatccagcgggaggcccacttcctgctggaggccctgaggaagacccagggccagccctttgaccccaccttcctgattggctgtgccccctgcaatgtgattgctgacatcctcttcaggaagcactttgactacaatgatgagaagttcctgcggctgatgtacctgttcaatgaaaacttccacctgctgagcaccccctggctgcagctgtacaacaacttccccagcttcctgcactacctgcccggcagccacaggaaggtgatcaagaatgtggccgaggtgaaggagtatgtgtctgagcgggtgaaggagcaccaccagagcctggaccccaactgcccccgggacctgacagactgcctgctggtggagatggagaaggagaagcacagcgctgagcggctgtacaccatggatggcatcaccgtgacagtggccgacctcttctttgctggaacagagaccaccagcaccaccctgcgctatggcctgctgatcctgatgaagtacccagaaattgaggagaagctgcacgaggagattgacagagtgattggccccagccgcatcccagccatcaaggaccggcaggagatgccctacatggatgctgtggtgcatgagatccagcgcttcatcaccctggtgcccagcaacctgccccatgaggccacccgggacaccatcttccggggctacctgatccccaagggcaccgtggtggtgcccaccctggacagcgtgctgtatgacaaccaggagttcccagaccctgagaagttcaagccagagcacttcctgaatgaaaatggcaagttcaagtacagcgactacttcaagcccttcagcacaggcaagagggtgtgtgccggggagggcctggccaggatggagctgttcctgctgctgtgtgccatcctgcagcacttcaacctgaagcccctggtggaccccaaggacatcgacctgagccccatccacatcggcttcggctgcatccccccacgctacaagctgtgtgtgatccccaggagctag

SEQ ID NO: 149071 - DNA, 1482 bp, synthetic construct; identical to SEQ ID NO: 149070
  misc_feature 1..1482: note = Description of Artificial Sequence: Synthetic coding sequence
  source 1..1482: mol_type = other DNA

SEQ ID NO: 149072 - DNA, 261 bp, synthetic construct
  misc_feature 1..261: note = Description of Artificial Sequence: Synthetic coding sequence
  source 1..261: mol_type = other DNA
atgtctgccctgggcgtgacagtggccctgctggtgtgggccgccttcctgctgctggtgtccatgtggaggcaggtgcacagctcctggaacctgcccccaggccccttccccctgcccatcatcggcaacctcttccagctggagctgaagaacatccccaagagcttcacccggctggcccagcgcttcggccctgtgttcaccctgtatgtgggcagccagaggatggtggtgatgcacggctacaaggctgtgtag

SEQ ID NO: 149073 - DNA, 1476 bp, synthetic construct
  misc_feature 1..1476: note = Description of Artificial Sequence: Synthetic coding sequence
  source 1..1476: mol_type = other DNA
atggacagcatcagcacagccatcctgctgctgctgctggccctggtgtgcctgctgctgaccctgagcagccgggacaagggcaagctgcccccaggcccccggcccctgagcatcctgggcaacctgctgctgctgtgcagccaggacatgctgaccagcctgaccaagctgagcaaggagtatggctccatgtacacagtgcacctgggccccaggagagtggtggtgctgagcggctaccaggccgtgaaggaggccctggtggaccagggcgaggagttcagcggccgcggggactacccagccttcttcaacttcaccaagggaaatggaattgccttcagcagcggggaccgctggaaggtgctgcggcagttcagcatccagatcctgaggaactttggcatgggcaagaggagcattgaggagcgcatcctggaggagggcagcttcctgctggccgagctgaggaagacagaaggagagccctttgaccccacctttgtgctgagccgctctgtgagcaacatcatctgcagcgtgctgtttggcagcagatttgattatgatgatgagcggctgctgaccatcatccgcctcatcaatgacaacttccagatcatgagcagcccctggggcgagctgtatgacatcttccccagcctgctggactgggtgcccggcccccaccagaggatcttccagaacttcaagtgcctgcgggacctgattgcccacagcgtgcatgaccaccaggccagcctggaccccaggagcccccgggacttcatccagtgcttcctgaccaagatggccgaggagaaggaggaccccctgagccacttccacatggacaccctgctgatgaccacccacaacctgctgtttggaggcaccaagacagtgtccaccaccctgcaccacgccttcctggccctgatgaagtaccccaaggtgcaggcccgggtgcaggaggagattgacctggtggtgggccgggcccggctgcctgccctgaaggaccgggccgccatgccctacacagatgctgtgatccacgaggtgcagagatttgctgacatcatccccatgaacctgccccaccgggtgacccgggacacagccttccggggcttcctgatccccaagggcacagatgtgatcaccctgctgaacacagtgcactatgaccccagccagttcctgaccccccaggagttcaaccctgagcacttcctggatgccaaccagagcttcaagaagagccctgccttcatgcccttctctgctggaagaaggctgtgcctgggggagagcctggccaggatggagctgttcctgtacctgacagccatcctgcagagcttcagcctgcagcccctgggcgcccctgaggacatcgacctgacccccctgagcagcggcctgggcaacctgccccggcccttccagctgtgcctgcggcccaggtag

SEQ ID NO: 149074 - DNA, 1509 bp, synthetic construct
  misc_feature 1..1509: note = Description of Artificial Sequence: Synthetic coding sequence
  source 1..1509: mol_type = other DNA
atgctggccgccatgggcagcctggccgccgccctgtgggccgtggtgcaccccaggaccctgctgctgggcaccgtggccttcctgctggccgctgacttcctgaagagaagaagacccaagaactacccacctggcccctggaggctgcccttcctgggcaacttcttcctggtggactttgagcagagccacctggaggtgcagctgtttgtgaagaagtatggcaacctcttcagcctggagctgggggacatctctgctgtgctgatcaccggcctgcccctcatcaaggaggccctgatccacatggaccagaactttggaaacagacctgtgacccccatgagggagcacatcttcaagaagaatggcctcatcatgagcagcggccaggcctggaaggagcagaggcgcttcaccctgacagccctgaggaactttggcctgggcaagaagagcctggaggagcgcatccaggaggaggcccagcacctgacagaggccatcaaggaggagaatggccagccctttgacccccacttcaagatcaacaatgctgtgagcaacatcatctgcagcatcacctttggagagagatttgagtaccaggacagctggttccagcagctgctgaagctgctggatgaggtgacctacctggaggccagcaagacctgccagctgtacaacgtgttcccctggatcatgaagttcctgcccggcccccaccagaccctcttcagcaactggaagaagctgaagctgtttgtgagccacatgattgacaagcacaggaaggactggaacccagctgagacccgggacttcattgatgcctacctgaaggagatgagcaagcacactggaaaccccaccagcagcttccatgaagaaaatctcatctgcagcaccctggacctcttctttgctggaacagagaccaccagcaccaccctgcgctgggccctgctgtacatggccctgtacccagagatccaggagaaggtgcaggccgagattgacagagtgattggccagggccagcagcccagcacagctgcccgggagagcatgccctacaccaatgctgtgattcatgaggtgcagaggatgggcaacatcatccccctgaatgtgccccgggaggtgacagtggacaccaccctggccggctaccacctgcccaagggcaccatgatcctgaccaacctgacagccctgcaccgggaccccacagagtgggccaccccagacaccttcaacccagaccacttcctggagaatggccagttcaagaagcgggaggccttcatgcccttcagcatcggcaagagggcctgcctgggggagcagctggccaggacagagctgttcatcttcttcaccagcctgatgcagaagttcaccttccggccccccaacaatgagaagctgagcctgaagttcaggatgggcatcaccatcagccctgtgagccaccggctgtgtgctgtgccccaggtgtag

SEQ ID NO: 149075 - DNA, 1506 bp, synthetic construct
  misc_feature 1..1506: note = Description of Artificial Sequence: Synthetic coding sequence
  source 1..1506: mol_type = other DNA
atgtggaagctgtggagggctgaggagggcgccgccgccctgggcggggccctcttcctgctgctgtttgccctgggcgtgcggcagctgctgaagcagaggcggcccatgggcttccccccaggccccccaggcctgcccttcatcggcaacatctacagcctggccgccagcagcgagctgccccacgtgtacatgaggaagcagagccaggtgtatggagagatcttcagcctggacctgggcggcatcagcacagtggtgctgaatggctatgatgtggtgaaggaatgtctggtgcaccagagcgagatctttgctgaccggccctgcctgcccctcttcatgaagatgaccaagatgggcggcctgctgaacagccgctatggccggggctgggtggaccaccggcggctggccgtgaacagcttccgctacttcggctacggccagaagagctttgagagcaagatcctggaggagaccaagttcttcaatgatgccatcgagacctacaagggccggccctttgacttcaagcagctgatcaccaatgctgtgagcaacatcaccaacctgatcatctttggagagcgcttcacctatgaggacacagacttccagcacatgattgagctgttctctgaaaatgtggagctggccgccagcgcctctgtgttcctgtacaatgccttcccctggattggcatcctgccctttgggaagcaccagcagctgttcagaaatgctgctgtggtgtatgacttcctgagccggctgattgagaaggcctctgtgaacaggaagccccagctgccccagcactttgtggatgcctacctggatgagatggaccagggcaagaatgaccccagcagcaccttcagcaaggagaacctgatcttctctgtgggggagctgatcatcgccggcacagagaccaccaccaacgtgctgcgctgggccatcctcttcatggccctgtaccccaacatccagggccaggtgcagaaggagattgacctgatcatgggccccaacgggaagcccagctgggatgacaagtgcaagatgccctacacagaagctgtgctgcacgaggtgctgcgcttctgcaacatcgtgcccctgggcatcttccacgccaccagtgaagatgctgtggtgcggggctacagcatccccaagggcaccaccgtcatcaccaacctgtacagcgtgcactttgatgagaagtactggagggaccctgaggtgttccaccctgagcgcttcctggacagcagcggctactttgccaagaaggaggccctggtgcccttcagcctgggcagaagacactgcctgggggagcacctggccaggatggagatgttcctgttcttcaccgccctgctgcagcgcttccacctgcacttcccccatgagctggtgcctgacctgaagccccggctgggcatgaccctgcagccccagccctacctgatctgtgccgagaggaggtag

SEQ ID NO: 149076 - DNA, 1695 bp, synthetic construct
  misc_feature 1..1695: note = Description of Artificial Sequence: Synthetic coding sequence
  source 1..1695: mol_type = other DNA
atggaggccaccggcacctgggccctgctgctggccctggccctgctgctgctgctgaccctggccctgagcggcacccgggcccggggccacctgcccccaggccccacccccctgcccctgctgggcaacctgctgcagctgcggcctggggccctgtacagcggcctgatgaggctgagcaagaagtatggccctgtgttcaccatctacctgggcccctggaggcctgtggtggtgctggtgggccaggaggccgtgcgggaggccctgggcggccaggccgaggagttcagcggccggggcaccgtggccatgctggagggcacctttgatggccacggcgtcttcttcagcaatggagagcgctggaggcagctgaggaagttcaccatgctggccctgcgggacctgggcatgggcaagcgggagggggaggagctgatccaggccgaggcccgctgcctggtggagaccttccagggcacagagggccggccctttgaccccagcctgctgctggcccaggccaccagcaatgtggtgtgcagcctgctgtttggcctgcgcttctcctatgaggacaaggagttccaggccgtggtgcgggctgctgggggcaccctgctgggcgtgagcagccagggcggccagacctatgagatgttctcctggttcctgcggcccctgcccggcccccacaagcagctgctgcaccacgtgtccaccctggccgccttcaccgtgcggcaggtgcagcagcaccagggcaacctggatgccagcggccctgcccgggacctggtggatgccttcctgctgaagatggcccaggaggagcagaaccctggaacagagttcaccaacaagaacatgctgatgaccgtcatctacctgctgtttgctggcaccatgacagtgtccaccaccgtgggctacaccctgctgctgctgatgaagtacccccacgtgcagaagtgggtgcgggaggagctgaaccgggagctgggcgccggccaggcccccagcctgggggacaggacccggctgccctacacagatgctgtgctgcacgaggcccagaggctgctggccctggtgcccatgggcatccccaggaccctgatgaggaccacccgcttccggggctacaccctgccccagggcacagaggtgttccccctgctgggcagcatcctgcatgaccccaacatcttcaagcaccctgaggagttcaacccagaccgcttcctggatgctgatggccgcttcaggaagcatgaggccttcctgcccttcagcctgggcaagagggtgtgcctgggggagggcctggccaaggccgagctgttcctgttcttcaccaccatcctgcaggccttcagcctggagagcccctgccccccagacaccctgagcctgaagcccaccgtgtctggcctcttcaacatccccccagccagcacagtgggcatggacagagtgaatgtgtcccgggtgtacacagctggcagccacatctacaccccagctgtggtgttccgcagcctgagccacggcccccacgcccacctgacccacgccgccaagatgcacaacagaacacccatccacaactacaagggccacaaggccacagctggcctggccttccaccgccacaagtacagccccagcgccatcaccagcacctag

SEQ ID NO: 149077 - DNA, 1515 bp, synthetic construct
  misc_feature 1..1515: note = Description of Artificial Sequence: Synthetic coding sequence
  source 1..1515: mol_type = other DNA
atggaggccaccggcacctgggccctgctgctggccctggccctgctgctgctgctgaccctggccctgagcggcacccgggcccggggccacctgcccccaggccccacccccctgcccctgctgggcaacctgctgcagctgcggcctggggccctgtacagcggcctgatgaggctgagcaagaagtatggccctgtgttcaccatctacctgggcccctggaggcctgtggtggtgctggtgggccaggaggccgtgcgggaggccctgggcggccaggccgaggagttcagcggccggggcaccgtggccatgctggagggcacctttgatggccacggcgtcttcttcagcaatggagagcgctggaggcagctgaggaagttcaccatgctggccctgcgggacctgggcatgggcaagcgggagggggaggagctgatccaggccgaggcccgctgcctggtggagaccttccagggcacagagggccggccctttgaccccagcctgctgctggcccaggccaccagcaatgtggtgtgcagcctgctgtttggcctgcgcttctcctatgaggacaaggagttccaggccgtggtgcgggctgctgggggcaccctgctgggcgtgagcagccagggcggccagacctatgagatgttctcctggttcctgcggcccctgcccggcccccacaagcagctgctgcaccacgtgtccaccctggccgccttcaccgtgcggcaggtgcagcagcaccagggcaacctggatgccagcggccctgcccgggacctggtggatgccttcctgctgaagatggcccaggaggagcagaaccctggaacagagttcaccaacaagaacatgctgatgaccgtcatctacctgctgtttgctggcaccatgacagtgtccaccaccgtgggctacaccctgctgctgctgatgaagtacccccacgtgcagaagtgggtgcgggaggagctgaaccgggagctgggcgccggccaggcccccagcctgggggacaggacccggctgccctacacagatgctgtgctgcacgaggcccagaggctgctggccctggtgcccatgggcatccccaggaccctgatgaggaccacccgcttccggggctacaccctgccccagggcacagaggtgttccccctgctgggcagcatcctgcatgaccccaacatcttcaagcaccctgaggagttcaacccagaccgcttcctggatgctgatggccgcttcaggaagcatgaggccttcctgcccttcagcctgggcaagagggtgtgcctgggggagggcctggccaaggccgagctgttcctgttcttcaccaccatcctgcaggccttcagcctggagagcccctgccccccagacaccctgagcctgaagcccaccgtgtctggcctcttcaacatccccccagccttccagctgcaggtgcggcccacagacctgcacagcaccacccagaccaggtag

SEQ ID NO: 149078 - DNA, 690 bp, synthetic construct
  misc_feature 1..690: note = Description of Artificial Sequence: Synthetic coding sequence
  source 1..690: mol_type = other DNA
atggccatggaggagcagaaccctggaacagagttcaccaacaagaacatgctgatgaccgtcatctacctgctgtttgctggcaccatgacagtgtccaccaccgtgggctacaccctgctgctgctgatgaagtacccccacgtgcagaagtgggtgcgggaggagctgaaccgggagctgggcgccggccaggcccccagcctgggggacaggacccggctgccctacacagatgctgtgctgcacgaggcccagaggctgctggccctggtgcccatgggcatccccaggaccctgatgaggaccacccgcttccggggctacaccctgccccagggcacagaggtgttccccctgctgggcagcatcctgcatgaccccaacatcttcaagcaccctgaggagttcaacccagaccgcttcctggatgctgatggccgcttcaggaagcatgaggccttcctgcccttcagcctgggcaagagggtgtgcctgggggagggcctggccaaggccgagctgttcctgttcttcaccaccatcctgcaggccttcagcctggagagcccctgccccccagacaccctgagcctgaagcccaccgtgtctggcctcttcaacatccccccagccttccagctgcaggtgcggcccacagacctgcacagcaccacccagaccaggtag

SEQ ID NO: 149079 - DNA, 1635 bp, synthetic construct
  misc_feature 1..1635: note = Description of Artificial Sequence: Synthetic coding sequence
  source 1..1635: mol_type = other DNA
atgagcagccctggccccagccagcccccagctgaggaccccccctggccagcccggctgctgcgggcccccctgggcctgctgcggctggaccccagcggcggggccctgctgctgtgtggcctggtggccctgctgggctggagctggctgcggcggcggcgggcccggggcatccccccaggccccaccccctggcccctggtgggcaactttggccacgtgctgctgccccccttcctgcggcggcgctcctggctgagcagcaggaccagggctgctggcatcgaccccagcgtgattggcccccaggtgctgctggcccacctggcccgggtgtatggcagcatcttctccttcttcatcggccactacctggtggtggtgctgagtgacttccacagcgtgcgggaggccctggtgcagcaggccgaggtgttcagtgaccggccccgggtgcccctcatcagcatcgtgaccaaggagaagggcgtggtgtttgcccactacggccctgtgtggaggcagcagaggaagttcagccacagcaccctgcggcacttcggcctgggcaagctgagcctggagcccaagatcatcgaggagttcaagtatgtgaaggccgagatgcagaagcatggagaggaccccttctgccccttcagcatcatcagcaatgctgtgagcaacatcatctgcagcctgtgcttcggccagagatttgactacaccaacagcgagttcaagaagatgctgggcttcatgagccggggcctggagatctgcctgaacagccaggtgctgctggtgaacatctgcccctggctgtactacctgcccttcggccccttcaaggagctgcggcagatcgagaaggacatcaccagcttcctgaagaagatcatcaaggaccaccaggagagcctggaccgggagaacccccaggacttcatcgacatgtacctgctgcacatggaggaggagaggaagaacaacagcaacagcagctttgatgaggagtacctgttctacatcatcggggacctcttcatcgccggcacagacaccaccaccaacagcctgctgtggtgcctgctgtacatgagcctgaacccagatgtgcaggagaaggtgcatgaggagattgaaagagtcatcggggccaacagagcccccagcctgacagacaaggcccagatgccctacacagaggccaccatcatggaggtgcagaggctgactgtggtggtgcccctggccatcccccacatgaccagtgaaaatacagtgctgcagggctacaccatccccaagggcaccctcatcctgcccaacctgtggagcgtgcaccgggaccctgccatctgggagaagccagaggacttctaccccaaccgcttcctggatgaccagggccagctgatcaagaaggagaccttcatcccctttggaattggcaagagggtgtgcatgggagagcagctggccaagatggagctgttcctgatgtttgtgtccctgatgcagagctttgcctttgccctgcctgaggacagcaagaagcccctgctgaccggccgcttcggcctgaccctggccccccaccccttcaacatcaccatcagcagaagatag

SEQ ID NO: 149080 - DNA, 1506 bp, synthetic construct
  misc_feature 1..1506: note = Description of Artificial Sequence: Synthetic coding sequence
  source 1..1506: mol_type = other DNA
atgagcagccctggccccagccagcccccagctgaggaccccccctggccagcccggctgctgcgggcccccctggtgggcaactttggacatgtgctgctgccccccttcctgcggcggcgctcctggctgagcagcaggaccagggctgctggcatcgaccccagcgtcatcggcccccaggtgctgctggcccacctggcccgggtgtatggcagcatcttctccttcttcatcggccactacctggtggtggtgctgagtgacttccacagcgtgcgggaggccctggtgcagcaggccgaggtgttcagtgaccggccccgggtgcccctcatcagcatcgtgaccaaggagaagggcgtggtgtttgcccactacggccctgtgtggaggcagcagaggaagttcagccacagcaccctgcggcacttcggcctgggcaagctgagcctggagcccaagatcatcgaggagttcaagtatgtgaaggccgagatgcagaagcacggggaggaccccttctgccccttcagcatcatcagcaatgctgtgagcaacatcatctgcagcctgtgcttcggccagagatttgactacaccaacagcgagttcaagaagatgctgggcttcatgagccggggcctggagatctgcctgaacagccaggtgctgctggtgaacatctgcccctggctgtactacctgcccttcggccccttcaaggagctgcggcagatcgagaaggacatcaccagcttcctgaagaagatcatcaaggaccaccaggagagcctggaccgggagaacccccaggacttcatcgacatgtacctgctgcacatggaggaggagaggaagaacaacagcaacagcagctttgatgaggagtacctgttctacatcattggagacctcttcatcgccggcacagacaccaccaccaacagcctgctgtggtgcctgctgtacatgagcctgaacccagatgtgcaggagaaggtgcatgaggagattgagcgggtgattggagccaacagagcccccagcctgacagacaaggcccagatgccctacacagaggccaccatcatggaggtgcagaggctgactgtggtggtgcccctggccatcccccacatgaccagcgagaacacagtgctgcagggctacaccatccccaagggcaccctcatcctgcccaacctgtggagcgtgcaccgggaccctgccatctgggagaagccagaggacttctaccccaaccgcttcctggatgaccagggccagctgatcaagaaggagaccttcatccccttcggcatcggcaagagggtgtgcatgggagagcagctggccaagatggagctgttcctgatgtttgtgtccctgatgcagagctttgcctttgccctgcctgaggacagcaagaagcccctgctgaccggccgcttcggcctgaccctggccccccaccccttcaacatcaccatcagcagaagatag

SEQ ID NO: 149081 - DNA, 1398 bp, synthetic construct
  misc_feature 1..1398: note = Description of Artificial Sequence: Synthetic coding sequence
  source 1..1398: mol_type = other DNA
atgctgctgctgggcctgctgctgctgctgcccctgctggccggggcccggctgctgtggaactggtggaagctgcggagcctgcacctgccccccctggcccctggcttcctgcacctgctgcagcctgacctgcccatctacctgctgggcctgacccagaagtttggccccatctaccgcctgcacctgggcctgcaggacaagctggtgtccaggaactacccagacctgagcctgggggactacagcctgctgtggaaggcccacaagaagctgaccaggtctgccctgctgctgggcatccgggacagcatggagcctgtggtggagcagctgacccaggagttctgtgagaggatgagggcccagcccggcacccctgtggccatcgaggaggagttcagcctgctgacctgcagcatcatctgctacctgaccttcggggacaagatcaaggatgacaacctgatgcctgcctactacaagtgcatccaggaggtgctgaagacctggagccactggagcatccagatcgtggatgtgatccccttcctgcgcttcttccccaaccctggcctgcggcggctgaagcaggccatcgagaagagggaccacatcgtggagatgcagctgcggcagcacaaggagagcctggtggccggccagtggagggacatgatggactacatgctgcagggcgtggcccagcccagcatggaggagggcagcggccagctgctggagggccacgtgcacatggctgctgtggacctgctgattggaggaacagagaccacagccaacaccctgtcctgggccgtggtgttcctgctgcaccaccctgagatccagcagaggctgcaggaggagctggaccacgagctgggccctggggccagcagcagccgggtgccctacaaggaccgggcccggctgcccctgctgaatgccaccatcgccgaggtgctgcggctgcggcctgtggtgcccctggccctgccccacaggaccacccggcccagcagcatcagcggctatgacatccctgagggcaccgtcatcatccccaacctgcagggcgcccacctggatgaaacagtgtgggagcggccccatgagttctggccagaccgcttcctggagcccgggaagaacagccgggccctggccttcggctgtggggcccgggtgtgcctgggggagcccctggcccggctggagctgtttgtggtgctgacccggctgctgcaggccttcaccctgctgcccagcggagatgccctgcccagcctgcagcccctgccccactgcagcgtcatcctgaagatgcagcccttccaggtgcggctgcagccccggggcatgggcgcccacagccctggccagagccagtag

SEQ ID NO: 149082 - DNA, 1488 bp, synthetic construct
  misc_feature 1..1488: note = Description of Artificial Sequence: Synthetic coding sequence
  source 1..1488: mol_type = other DNA
atgctgctgctgggcctgctgctgctgctgcccctgctggccggggcccggctgctgtggaactggtggaagctgcggagcctgcacctgccccccctggcccctggcttcctgcacctgctgcagcctgacctgcccatctacctgctgggcctgacccagaagtttggccccatctaccgcctgcacctgggcctgcaggatgtggtggtgctgaacagcaagaggaccatcgaggaggccatggtgaagaagtgggccgactttgctggccggcctgagcccctgacctacaagctggtgtccaggaactacccagacctgagcctgggggactacagcctgctgtggaaggcccacaagaagctgaccaggtctgccctgctgctgggcatccgggacagcatggagcctgtggtggagcagctgacccaggagttctgtgagaggatgagggcccagcccggcacccctgtggccatcgaggaggagttcagcctgctgacctgcagcatcatctgctacctgaccttcggggacaagatcaaggatgacaacctgatgcctgcctactacaagtgcatccaggaggtgctgaagacctggagccactggagcatccagatcgtggatgtgatccccttcctgcgcttcttccccaaccctggcctgcggcggctgaagcaggccatcgagaagagggaccacatcgtggagatgcagctgcggcagcacaaggagagcctggtggccggccagtggagggacatgatggactacatgctgcagggcgtggcccagcccagcatggaggagggcagcggccagctgctggagggccacgtgcacatggctgctgtggacctgctgattggaggaacagagaccacagccaacaccctgtcctgggccgtggtgttcctgctgcaccaccctgagatccagcagaggctgcaggaggagctggaccacgagctgggccctggggccagcagcagccgggtgccctacaaggaccgggcccggctgcccctgctgaatgccaccatcgccgaggtgctgcggctgcggcctgtggtgcccctggccctgccccacaggaccacccggcccagcagcatcagcggctatgacatccctgagggcaccgtcatcatccccaacctgcagggcgcccacctggatgaaacagtgtgggagcggccccatgagttctggccagaccgcttcctggagcccgggaagaacagccgggccctggccttcggctgtggggcccgggtgtgcctgggggagcccctggcccggctggagctgtttgtggtgctgacccggctgctgcaggccttcaccctgctgcccagcggagatgccctgcccagcctgcagcccctgccccactgcagcgtcatcctgaagatgcagcccttccaggtgcggctgcagccccggggcatgggcgcccacagccctggccagagccagtag

SEQ ID NO: 149083 - DNA, 1488 bp, synthetic construct; identical to SEQ ID NO: 149082
  misc_feature 1..1488: note = Description of Artificial Sequence: Synthetic coding sequence
  source 1..1488: mol_type = other DNA

SEQ ID NO: 149084 - DNA, 1398 bp, synthetic construct; identical to SEQ ID NO: 149081
  misc_feature 1..1398: note = Description of Artificial Sequence: Synthetic coding sequence
  source 1..1398: mol_type = other DNA

SEQ ID NO: 149085 - DNA, 1398 bp, synthetic construct; identical to SEQ ID NO: 149081
  misc_feature 1..1398: note = Description of Artificial Sequence: Synthetic coding sequence
  source 1..1398: mol_type = other DNA

SEQ ID NO: 149086 - DNA, 1485 bp, synthetic construct
  misc_feature 1..1485: note = Description of Artificial Sequence: Synthetic coding sequence
  source 1..1485: mol_type = other DNA
atgctgctgctgggcctgctgctgctgcccctgctggccggggcccggctgctgtggaactggtggaagctgcggagcctgcacctgccccccctggcccctggcttcctgcacctgctgcagcctgacctgcccatctacctgctgggcctgacccagaagtttggccccatctaccgcctgcacctgggcctgcaggatgtggtggtgctgaacagcaagaggaccatcgaggaggccatggtgaagaagtgggccgactttgctggccggcctgagcccctgacctacaagctggtgtccaagaactacccagacctgagcctgggggactacagcctgctgtggaaggcccacaagaagctgaccaggtctgccctgctgctgggcatccgggacagcatggagcctgtggtggagcagctgacccaggagttctgtgagaggatgagggcccagcccggcacccctgtggccatcgaggaggagttcagcctgctgacctgcagcatcatctgctacctgacctttggagacaagatcaaggatgacaacctgatgcctgcctactacaagtgcatccaggaggtgctgaagacctggagccactggagcatccagatcgtggatgtgatccccttcctgcgcttcttccccaaccctggcctgcggcggctgaagcaggccatcgagaagagggaccacatcgtggagatgcagctgcggcagcacaaggagagcctggtggccggccagtggagggacatgatggactacatgctgcagggcgtggcccagcccagcatggaggagggcagcggccagctgctggagggccacgtgcacatggctgctgtggacctgctgattggaggaacagagaccacagccaacaccctgtcctgggccgtggtgttcctgctgcaccaccctgagatccagcagaggctgcaggaggagctggaccacgagctgggccctggggccagcagcagccgggtgccctacaaggaccgggcccggctgcccctgctgaatgccaccatcgccgaggtgctgcggctgcggcctgtggtgcccctggccctgccccacaggaccacccggcccagcagcatcagcggctatgacatccctgagggcaccgtcatcatccccaacctgcagggcgcccacctggatgagaccgtgtgggagcggccccatgagttctggccagaccgcttcctggagcccgggaagaacagccgggccctggccttcggctgtggggcccgggtgtgcctgggggagcccctggcccggctggagctgtttgtggtgctgacccggctgctgcaggccttcaccctgctgcccagcggagatgccctgcccagcctgcagcccctgccccactgcagcgtcatcctgaagatgcagcccttccaggtgcggctgcagccccggggcatgggcgcccacagccctggccagaaccagtag

SEQ ID NO: 149087 - DNA, 1485 bp, synthetic construct; identical to SEQ ID NO: 149086
  misc_feature 1..1485: note = Description of Artificial Sequence: Synthetic coding sequence
  source 1..1485: mol_type = other DNA

SEQ ID NO: 149088 - DNA, 1488 bp, synthetic construct; identical to SEQ ID NO: 149082
  misc_feature 1..1488: note = Description of Artificial Sequence: Synthetic coding sequence
  source 1..1488: mol_type = other DNA

SEQ ID NO: 149089 - DNA, 1395 bp, synthetic construct
  misc_feature 1..1395: note = Description of Artificial Sequence: Synthetic coding sequence
  source 1..1395: mol_type = other DNA
atgctgctgctgggcctgctgctgctgcccctgctggccggggcccggctgctgtggaactggtggaagctgcggagcctgcacctgccccccctggcccctggcttcctgcacctgctgcagcctgacctgcccatctacctgctgggcctgacccagaagtttggccccatctaccgcctgcacctgggcctgcaggacaagctggtgtccaagaactacccagacctgagcctgggggactacagcctgctgtggaaggcccacaagaagctgaccaggtctgccctgctgctgggcatccgggacagcatggagcctgtggtggagcagctgacccaggagttctgtgagaggatgagggcccagcccggcacccctgtggccatcgaggaggagttcagcctgctgacctgcagcatcatctgctacctgacctttggagacaagatcaaggatgacaacctgatgcctgcctactacaagtgcatccaggaggtgctgaagacctggagccactggagcatccagatcgtggatgtgatccccttcctgcgcttcttccccaaccctggcctgcggcggctgaagcaggccatcgagaagagggaccacatcgtggagatgcagctgcggcagcacaaggagagcctggtggccggccagtggagggacatgatggactacatgctgcagggcgtggcccagcccagcatggaggagggcagcggccagctgctggagggccacgtgcacatggctgctgtggacctgctgattggaggaacagagaccacagccaacaccctgtcctgggccgtggtgttcctgctgcaccaccctgagatccagcagaggctgcaggaggagctggaccacgagctgggccctggggccagcagcagccgggtgccctacaaggaccgggcccggctgcccctgctgaatgccaccatcgccgaggtgctgcggctgcggcctgtggtgcccctggccctgccccacaggaccacccggcccagcagcatcagcggctatgacatccctgagggcaccgtcatcatccccaacctgcagggcgcccacctggatgagaccgtgtgggagcggccccatgagttctggccagaccgcttcctggagcccgggaagaacagccgggccctggccttcggctgtggggcccgggtgtgcctgggggagcccctggcccggctggagctgtttgtggtgctgacccggctgctgcaggccttcaccctgctgcccagcggagatgccctgcccagcctgcagcccctgccccactgcagcgtcatcctgaagatgcagcccttccaggtgcggctgcagccccggggcatgggcgcccacagccctggccagaaccagtag

SEQ ID NO: 149090 - DNA, 1398 bp, synthetic construct; identical to SEQ ID NO: 149081
  misc_feature 1..1398: note = Description of Artificial Sequence: Synthetic coding sequence
  source 1..1398: mol_type = other DNA

SEQ ID NO: 149091 - DNA, 1395 bp, synthetic construct; identical to SEQ ID NO: 149089
  misc_feature 1..1395: note = Description of Artificial Sequence: Synthetic coding sequence
  source 1..1395: mol_type = other DNA

SEQ ID NO: 149092 - DNA, 1488 bp, synthetic construct
  misc_feature 1..1488: note = Description of Artificial Sequence: Synthetic coding sequence
  source 1..1488: mol_type = other DNA
atgctgctgctgggcctgctgctgctgctgcccctgctggccggggcccggctgctgtggaactggtggaagctgcggagcctgcacctgctgcccctggcccctggcttcctgcacctgctgcagcctgacctgcccatctacctgctgggcctgacccagaagtttggccccatctaccgcctgcacctgggcctgcaggatgtggtggtgctgaacagcaagaggaccatcgaggaggccatggtgaagaagtgggccgactttgctggccggcctgagcccctgacctacaagctggtgtccaagaactacccagacctgagcctgggggactacagcctgctgtggaaggcccacaagaagctgaccaggtctgccctgctgctgggcatccgggacagcatggagcctgtggtggagcagctgacccaggagttctgtgagaggatgagggcccagcccggcacccctgtggccatcgaggaggagttcagcctgctgacctgcagcatcatctgctacctgaccttcggggacaagatcaaggatgacaacctgatgcctgcctactacaagtgcatccaggaggtgctgaagacctggagccactggagcatccagatcgtggatgtgatccccttcctgcgcttcttccccaaccctggcctgcggcggctgaagcaggccatcgagaagagggaccacatcgtggagatgcagctgcggcagcacaaggagagcctggtggccggccagtggagggacatgatggactacatgctgcagggcgtggcccagcccagcatggaggagggcagcggccagctgctggagggccacgtgcacatggctgctgtggacctgctgattggaggaacagagaccacagccaacaccctgtcctgggccgtggtgttcctgctgcaccaccctgagatccagcagaggctgcaggaggagctggaccacgagctgggccctggggccagcagcagccgggtgccctacaaggaccgggcccggctgcccctgctgaatgccaccatcgccgaggtgctgcggctgcggcctgtggtgcccctggccctgccccacaggaccacccggcccagcagcatcagcggctatgacatccctgagggcaccgtcatcatccccaacctgcagggcgcccacctggatgaaacagtgtgggagcggccccatgagttctggccagaccgcttcctggagcccgggaagaacagccgggccctggccttcggctgtggggcccgggtgtgcctgggggagcccctggcccggctggagctgtttgtggtgctgacccggctgctgcaggccttcaccctgctgcccagcggagatgccctgcccagcctgcagcccctgccccactgcagcgtcatcctgaagatgcagcccttccaggtgcggctgcagccccggggcatgggcgcccacagccctggccagaaccagtag

SEQ ID NO: 149093 - DNA, 1488 bp, synthetic construct
  misc_feature 1..1488: note = Description of Artificial Sequence: Synthetic coding sequence
  source 1..1488: mol_type = other DNA
atgctgctgctgggcctgctgctgctgctgcccctgctggccggggcccggctgctgtggaactggtggaagctgcggagcctgcacctgccccccctggcccctggcttcctgcacctgctgcagcctgacctgcccatctacctgctgggcctgacccagaagtttggccccatctaccgcctgcacctgggcctgcaggatgtggtggtgctgaacagcaagaggaccatcgaggaggccatggtgaagaagtgggccgactttgctggccggcctgagcccctgacctacaagctggtgtccaagaactacccagacctgagcctgggggactacagcctgctgtggaaggcccacaagaagctgaccaggtctgccctgctgctgggcatccgggacagcatggagcctgtggtggagcagctgacccaggagttctgtgagaggatgagggcccagcccggcacccctgtggccatcgaggaggagttcagcctgctgacctgcagcatcatctgctacctgaccttcggggacaagatcaaggatgacaacctgatgcctgcctactacaagtgcatccaggaggtgctgaagacctggagccactggagcatccagatcgtggatgtgatccccttcctgcgcttcttccccaaccctggcctgcggcggctgaagcaggccatcgagaagagggaccacatcgtggagatgcagctgcggcagcacaaggagagcctggtggccggccagtggagggacatgatggactacatgctgcagggcgtggcccagcccagcatggaggagggcagcggccagctgctggagggccacgtgcacatggctgctgtggacctgctgattggaggaacagagaccacagccaacaccctgtcctgggccgtggtgttcctgctgcaccaccctgagatccagcagaggctgcaggaggagctggaccacgagctgggccctggggccagcagcagccgggtgccctacaaggaccgggcccggctgcccctgctgaatgccaccatcgccgaggtgctgcggctgcggcctgtggtgcccctggccctgccccacaggaccacccggcccagcagcatcagcggctatgacatccctgagggcaccgtcatcatccccaacctgcagggcgcccacctggatgaaacagtgtgggagcggccccatgagttctggccagaccgcttcctggagcccgggaagaacagccgggccctggccttcggctgtggggcccgggtgtgcctgggggagcccctggcccggctggagctgtttgtggtgctgacccggctgctgcaggccttcaccctgctgcccagcggagatgccctgcccagcctgcagcccctgccccactgcagcgtcatcctgaagatgcagcccttccaggtgcggctgcagccccggggcatgggcgcccacagccctggccagaaccagtag

SEQ ID NO: 149094 - DNA, 1398 bp, synthetic construct
  misc_feature 1..1398: note = Description of Artificial Sequence: Synthetic coding sequence
  source 1..1398: mol_type = other DNA
atgctgctgctgggcctgctgctgctgctgcccctgctggccggggcccggctgctgtggaactggtggaagctgcggagcctgcacctgctgcccctggcccctggcttcctgcacctgctgcagcctgacctgcccatctacctgctgggcctgacccagaagtttggccccatctaccgcctgcacctgggcctgcaggacaagctggtgtccaagaactacccagacctgagcctgggggactacagcctgctgtggaaggcccacaagaagctgaccaggtctgccctgctgctgggcatccgggacagcatggagcctgtggtggagcagctgacccaggagttctgtgagaggatgagggcccagcccggcacccctgtggccatcgaggaggagttcagcctgctgacctgcagcatcatctgctacctgaccttcggggacaagatcaaggatgacaacctgatgcctgcctactacaagtgcatccaggaggtgctgaagacctggagccactggagcatccagatcgtggatgtgatccccttcctgcgcttcttccccaaccctggcctgcggcggctgaagcaggccatcgagaagagggaccacatcgtggagatgcagctgcggcagcacaaggagagcctggtggccggccagtggagggacatgatggactacatgctgcagggcgtggcccagcccagcatggaggagggcagcggccagctgctggagggccacgtgcacatggctgctgtggacctgctgattggaggaacagagaccacagccaacaccctgtcctgggccgtggtgttcctgctgcaccaccctgagatccagcagaggctgcaggaggagctggaccacgagctgggccctggggccagcagcagccgggtgccctacaaggaccgggcccggctgcccctgctgaatgccaccatcgccgaggtgctgcggctgcggcctgtggtgcccctggccctgccccacaggaccacccggcccagcagcatcagcggctatgacatccctgagggcaccgtcatcatccccaacctgcagggcgcccacctggatgaaacagtgtgggagcggccccatgagttctggccagaccgcttcctggagcccgggaagaacagccgggccctggccttcggctgtggggcccgggtgtgcctgggggagcccctggcccggctggagctgtttgtggtgctgacccggctgctgcaggccttcaccctgctgcccagcggagatgccctgcccagcctgcagcccctgccccactgcagcgtcatcctgaagatgcagcccttccaggtgcggctgcagccccggggcatgggcgcccacagccctggccagaaccagtag

SEQ ID NO: 149095 - DNA, 1704 bp, synthetic construct
  misc_feature 1..1704: note = Description of Artificial Sequence: Synthetic coding sequence
  source 1..1704: mol_type = other DNA
atgcacggccgcctgaaggtgaagaccagcgaggagcaggccgaggccaagaggctggagcgggagcagaagctgaagctgtaccagagcgccacccaggccgtgttccagaagaggcaggccggggagctggatgaatctgtgctggagctgaccagccagatcctgggcgccaacccagactttgccaccctgtggaactgcagaagagaggtgctgcagcagctggagacccagaagagccctgaggagctggccgccctggtgaaggccgagctgggcttcctggagagctgcctgcgggtgaaccccaagagctatggcacctggcaccaccgctgctggctgctgggccgcctgcctgagcccaactggacccgggagctggagctgtgtgcccgcttcctggaggtggatgaaagaaacttccactgctgggactacagaagatttgtggccacccaggccgctgtgcccccagctgaggagctggccttcacagacagcctcatcaccaggaacttcagcaactacagctcctggcactaccgcagctgcctgctgccccagctgcacccccagccagattctggcccccagggccgcctgcctgaagatgtgctgctgaaggagctggagctggtgcagaatgccttcttcacagaccccaatgaccagagcgcctggttctaccaccgctggctgctgggccgggctgacccccaggatgccctgcgctgcctgcacgtgtccagagatgaggcctgcctgactgtgtccttcagccggcccctgctggtgggcagcaggatggagatcctgctgctgatggtggatgacagccccctcatcgtggagtggaggaccccagatggaagaaaccggcccagccacgtgtggctgtgtgacctgcctgctgccagcctgaatgaccagctgccccagcacaccttccgggtcatctggacagctggagatgtgcagaaggaatgtgtgctgctgaagggccggcaggagggctggtgccgggacagcaccacagatgagcagctgttccgctgtgagctgtctgtggagaagagcacagtgctgcagagcgagctggagagctgcaaggagctgcaggagctggagcctgagaacaagtggtgcctgctgaccatcatcctgctgatgagggccctggaccccctgctgtatgagaaggagaccctgcagtacttccagaccctgaaggctgtggaccccatgagggccacctacctggatgacctgcggagcaagttcctgctggagaacagcgtgctgaagatggagtatgcagaggtgcgggtgctgcacctggcccacaaggacctgactgtgctgtgccacctggagcagctgctgctggtgacccacctggacctgagccacaaccggctgcggaccctgcccccagccctggccgccctgcgctgcctggaggtgctgcaggccagtgacaatgccatcgagagcctggatggagtgaccaacctgccccggctgcaggagctgctgctgtgcaacaaccggctgcagcagcctgctgtgctgcagcccctggccagctgcccccggctggtgctgctgaacctgcagggcaaccccctgtgccaggccgtgggcatcctggagcagctggccgagctgctgcccagcgtgtcctctgtgctgacctag

SEQ ID NO: 149096 - DNA, 1347 bp, synthetic construct
  misc_feature 1..1347: note = Description of Artificial Sequence: Synthetic coding sequence
  source 1..1347: mol_type = other DNA
atgagcagccccatcagcaagagccgcagcctggccgccttcctgcagcagctgcggagcccccggcagcccccccggctggtgaccagcacagcctacaccagcccccagccccgggaggtgcctgtgtgccccctgacagctggaggagagacccagaatgctgctgccctgcccggccccacctcctggcccctgctgggcagcctgctgcagatcctgtggaagggcggcctgaagaagcagcacgacaccctggtggagtaccacaagaagtatggcaagatcttcaggatgaagctgggcagctttgagagcgtgcacctgggcagcccctgcctgctggaggccctgtacagaacagaaagtgcctacccccagaggctggagatcaagccctggaaggcctacagagactacaggaaggagggctacggcctgctgatcctggagggggaggactggcagagggtgcgcagcgccttccagaagaagctgatgaagccaggagaggtgatgaagctggacaacaagatcaatgaggtgctggccgacttcatgggcagaattgatgagctgtgtgatgagcggggccacgtggaggacctgtacagcgagctgaacaagtggagctttgagagcatctgcctggtgctgtatgagaagcgcttcggcctgctgcagaagaatgctggagatgaagctgtgaacttcatcatggccatcaagaccatgatgagcacctttggaaggatgatggtgacccctgtggagctgcacaagagcctgaacaccaaggtgtggcaggaccacaccctggcctgggacaccatcttcaagtctgtgaaggcctgcatcgacaaccggctggagaagtacagccagcagcccagcgctgacttcctgtgtgacatctaccaccagaaccggctgagcaagaaggagctgtatgctgctgtgacagagctgcagctggccgctgtggagaccacagccaacagcctgatgtggatcctgtacaacctgagcaggaacccccaggtgcagcagaagctgctgaaggagatccagagcgtgctgcctgagaaccaggtgcccagggctgaggacctgaggaacatgccctacctgaaggcctgcctgaaggagagcatgaggctgacccccagcgtgcccttcaccaccaggaccctggacaaggccaccgtgctgggggagtatgccctgcccaagggcatcgtgaggaaatatgacatccaggccacagacaatgaacctgtggagatgctgcacagcggcaccctggtgcccagccgggagctgcccatcgccttctgccagaggtag

SEQ ID NO: 149097 - DNA, 1371 bp, synthetic construct
  misc_feature 1..1371: note = Description of Artificial Sequence: Synthetic coding sequence
  source 1..1371: mol_type = other DNA
atggacaagctgaacaagatcaccgtgcctgccagccagaagctgcggcagctgcagaagatggtgcatgacatcaagaacaatgaaggaggcatcatgaacaagatcaagaagctgaaggtgaaggccccacccagcgtgccccggcgggactatgccagcgagagccctgcagatgaggaggagcagtggagcgatgactttgacagcgactatgaaaatccagatgagcacagcgacagcgagatgtatgtgatgcctgctgaggagaatgctgatgacagctatgagcccccacctgtggagcaggagaccaggcctgtgcacccagccctgccctttgcccggggggagtacatcgacaacagaagcagccagaggcacagcccccccttcagcaagaccctgcccagcaagcccagctggcccagcgagaaggcccggctgaccagcaccctgcctgccctgacagccctgcagaagccccaggtgccccccaagcccaagggcctgctggaggatgaggccgactatgtggtgcctgtggaggacaatgatgagaactacatccaccccacagagagcagcagccccccacctgagaaggcccccatggtgaacagaagcaccaagcccaacagcagcaccccagccagccccccaggcacagccagcggcagaaattctggggcctgggagaccaagagccccccacctgctgcccccagccccctgccccgggccggcaagaagcccaccacccccctgaagaccacccctgtggccagccagcagaatgccagctctgtgtgtgaggagaagcccatcccagctgagcggcaccggggcagcagccaccggcaggaggccgtgcagagccctgtgtttcctccagcccagaagcagatccaccagaagcccatccccctgccccgcttcacagagggcggcaaccccaccgtggatggccccctgcccagcttcagcagcaacagcaccatcagcgagcaggaggccggcgtgctgtgcaagccctggtacgccggggcctgtgacaggaagtctgctgaggaggccctgcacaggagcaacaaggatggcagcttcctgatcaggaagagcagcggccatgacagcaagcagccctacaccctggtggtgttcttcaacaagagggtgtacaacatccctgtgcgcttcatcgaggccaccaagcagtatgccctgggcaggaagaagaatggagaggagtactttggatctgtggccgagatcatccggaaccaccagcacagccccctggtgctgattgacagccagaacaacaccaaggacagcacccggctgaagtatgctgtgaaggtgtcctag

SEQ ID NO: 149098 - DNA, 1287 bp, synthetic construct
  misc_feature 1..1287: note = Description of Artificial Sequence: Synthetic coding sequence
  source 1..1287: mol_type = other DNA
atgaagaggaggaaatatggcttcatctacaagacccacctgtttggccggcccaccgtgcgggtgatgggcgctgacaacgtgcggcgcatcctgctgggggagcaccggctggtgtctgtgcactggccagcctctgtgaggaccatcctgggcagcggctgcctgagcaacctgcatgacagcagccacaagcagaggaagaaggtgatcatgagggccttcagccgggaggccctggagtgctacgtgcctgtgatcacagaggaggtgggcagcagcctggagcagtggctgagctgtggggagcggggcctgctggtgtacccagaggtgaagaggctgatgttcagaattgccatgaggatcctgctgggctgtgagccccagctggccggagatggagacagcgagcagcagctggtggaggcctttgaggagatgaccaggaacctcttcagcctgcccattgatgtgcccttcagcggcctgtaccggggcatgaaggccaggaacctgattcatgcccgcatcgagcagaacatccgggccaagatctgtggcctgcgggccagcgaggccggccagggctgcaaggatgccctgcagctgctgattgagcacagctgggagcggggggagcggctggacatgcaggccctgaagcagagcagcacagagctgctgtttggaggccacgagaccacagccagcgctgccaccagcctcatcacctacctgggcctgtacccccacgtgctgcagaaggtgcgggaggagctgaagagcaagggcctgctgtgcaagagcaaccaggacaacaagctggacatggagatcctggagcagctgaagtacatcggctgtgtgatcaaggagaccctgcggctgaacccccctgtgcctgggggcttccgggtggccctgaagacctttgagctgaatggctaccagatccccaagggctggaatgtcatctacagcatctgtgacacccatgatgtggccgagatcttcaccaacaaggaggagttcaacccagaccgcttcatgctgccccacccagaagatgccagccgcttctccttcatcccctttggaggcggcctgcggagctgtgtgggcaaggagtttgccaagatcctgctgaagatcttcaccgtggagctggcccggcactgtgactggcagctgctgaatggcccccccaccatgaagaccagccccaccgtgtaccctgtggacaacctgcctgcccgcttcacccacttccatggagagatctag

SEQ ID NO: 149099 - DNA, 1287 bp, synthetic construct; identical to SEQ ID NO: 149098
  misc_feature 1..1287: note = Description of Artificial Sequence: Synthetic coding sequence
  source 1..1287: mol_type = other DNA

SEQ ID NO: 149100 - DNA, 1569 bp, synthetic construct
  misc_feature 1..1569: note = Description of Artificial Sequence: Synthetic coding sequence
  source 1..1569: mol_type = other DNA
atgttcccctggggcctgagctgcctgtctgtgctgggcgctgctggaacagccctgctgtgtgccggcctgctgctgagcctggcccagcacctgtggaccctgcgctggatgctgagccgggaccgggccagcaccctgcccctgcccaagggctccatgggctggcccttctttggagagaccctgcactggctggtgcagggcagccgcttccacagcagccggcgggagagatatggcaccgtcttcaagacccacctgctgggccggcctgtgatccgggtgtctggagcagaaaatgtgaggaccatcctgctgggggagcaccggctggtgcgcagccagtggccccagagcgcccacatcctgctgggcagccacaccctgctgggcgctgtgggggagccccacagaagaagaaggaaggtgctggcccgggtcttcagccgggccgccctggagagatatgtgccccggctgcagggcgccctgcggcatgaggtgcgctcctggtgtgccgccggcggccctgtgtctgtgtatgatgccagcaaggccctgaccttcaggatggccgcccgcatcctgctgggcctgcggctggatgaggcccagtgtgccaccctggcccggacctttgagcagctggtggagaacctcttcagcctgcccctggatgtgcccttcagcggcctgaggaagggcatccgggcccgggaccagctgcaccgccacctggagggcgccatcagcgagaagctgcacgaggacaaggctgctgagcctggagatgccctggacctgatcatccacagcgcccgggagctgggccacgagcccagcatgcaggagctgaaggagagcgctgtggagctgctgtttgctgccttcttcaccacagccagcgccagcaccagcctggtgctgctgctgctgcagcaccctgctgccatcgccaagatccgggaggagctggtggcccagggcctgggccgggcctgtggctgtgcccctggagctgctgggggcagcgagggccccccaccagactgtggctgtgagccagacctgagcctggccgccctgggccgcctgcgctacgtggactgtgtggtgaaggaggtgctgcggctgctgccccctgtgtctgggggctacagaacagccctgcggacctttgagctggatggctaccagatccccaagggctggagcgtgatgtacagcatccgggacacccatgaaacagctgctgtgtaccgcagccccccagagggctttgatcctgagagatttggagctgcccgggaggacagcagaggagccagcagccgcttccactacatcccctttggaggaggagcccggagctgcctgggccaggagctggcccaggccgtgctgcagctgctggccgtggagctggtgaggacagcccgctgggagctggccaccccagccttccctgccatgcagacagtgcccatcgtgcaccctgtggatggcctgcggctcttcttccaccccctgacccccagcgtggccggaaatggcctgtgcctgtag

SEQ ID NO: 149101 - DNA, 1596 bp, synthetic construct
  misc_feature 1..1596: note = Description of Artificial Sequence: Synthetic coding sequence
  source 1..1596: mol_type = other DNA
atggccgccctgggctgtgcccggctgcgctgggccctgcggggggccggccggggcctgtgcccccatggagcccgggccaaggccgccatcccagctgccctgcccagcgacaaggccactggagcccctggggccggccctggggtgagaagacggcagaggagcctggaggagatcccccggctgggccagctgcgcttcttcttccagctgtttgtgcagggctacgccctgcagctgcaccagctgcaggtgctgtacaaggccaagtatggccccatgtggatgagctacctgggcccccagatgcacgtgaacctggccagcgcccccctgctggagcaggtgatgaggcaggagggcaagtaccctgtgagaaatgacatggagctgtggaaggagcaccgggaccagcacgacctgacctacggccccttcaccacagagggccaccactggtaccagctgcggcaggccctgaaccagaggctgctgaagccagctgaggccgccctgtacacagatgccttcaatgaggtgattgatgacttcatgacccggctggaccagctgcgggcagagagcgccagcggcaaccaggtgtctgacatggcccagctgttctactactttgccctggaggccatctgctacatcctgtttgagaagagaattggctgcctgcagaggagcatcccagaagatactgtgacctttgtgcgcagcatcggcctgatgttccagaacagcctgtatgccaccttcctgcccaagtggaccaggcctgtgctgcccttctggaagcgctacctggatggctggaatgccatcttctcctttgggaagaagctgattgatgagaagctggaggacatggaggcccagctgcaggccgccggcccagatggcatccaggtgtctggctacctgcacttcctgctggccagcggccagctgagcccccgggaggccatgggcagcctgcctgagctgctgatggccggcgtggacaccaccagcaacaccctgacctgggccctgtaccacctgagcaaggaccctgagatccaggaggccctgcacgaggaggtggtgggcgtggtgcctgctggccaggtgccccagcacaaggactttgcccacatgcccctgctgaaggctgtgctgaaggagaccctgcggctgtaccctgtggtgcccaccaacagccgcatcatcgagaaggagattgaggtggatggcttcctgttccccaagaacacccagtttgtgttctgccactacgtggtgtcccgggaccccacagccttcagcgagcctgagagcttccagccccaccgctggctgaggaacagccagcctgccaccccccgcatccagcaccccttcggctctgtgcccttcggctatggagtgcgggcctgcctgggcagaagaattgctgagctggagatgcagctgctgctggcccggctcatccagaagtacaaggtggtgctggcccctgagactggagagctgaagtctgtggcccgcatcgtgctggtgcccaacaagaaggtgggcctgcagttcctgcagaggcagtgctag

SEQ ID NO: 149102 - DNA, 1572 bp, synthetic construct
  misc_feature 1..1572: note = Description of Artificial Sequence: Synthetic coding sequence
  source 1..1572: mol_type = other DNA
atgtccttccacaaggaggatggagtgaacagcctgtgccagaaggccctgcacatcgtgacagagctgtgctttgctggccaggtggagtgggagaagtgcagcggcatcttcccccgggaccggggcagccagggcggcagcagcacagacatctctgtgtccctgctggccgtggtggtgtccttctgtggcctggccctgctggtggtgtccctgtttgtgttctggaagctgtgctggccctgctggaagagcaagcctgtgaccagcaacatcaccaccctgccccagagcatcagcagcgcccccacagaggtgtttgaaacagaggagaagaaggagatcaaggaaaatgagaagccagctgtgaaggccattgaaccagccatcaagatcagccacaccagcccagacatcccagctgaggtgcagacagccctgaaggagcacctgatcaagcacgcccgggtgcagaggcagatcacagagcccaccagcagcaccaggcacagcagcttcagaagacacctgccccggcagatgcaggtgtcctctgtggacttctccatgggcacagagcctgtgctgcagagaggagagaccaccaccagcatcggccgcatcaagccagagctgtacaagcagaagtctgtggacagcgagggcaaccagaatgaagatgtgaagatctgtgggaagctgaacttcaccctgcagtatgactatgaaaatgagctgctggtggtgaagatcatcaaggccctggacctgcctgccaaggacttcaccggcaccagtgacccctacgtgaagatgtacctgctgcctgacaggaagaagaagttccagaccagggtgcacaggaagaccctgaaccccctgtttgatgagaccttccagtttcctgtggcctatgaccagctgagcaacaggaagctgcacttctctgtgtatgactttgaccgcttcagcagacatgacatgattggagaggtgatcctggacaacctgtttgaggtgtctgacctgagccgggaggccaccgtgtggaaggacatccactgtgccaccacagagagcattgacctgggggagatcatgttcagcctgtgctacctgcccacagctggccgcatgaccctgaccgtcatcaagtgcaggaacctgaaggccatggacatcaccggcagcagtgacccctacgtgaaggtgtccctgatgtgtgagggccggcggctgaagaagaggaagaccaccaccaagaagaacaccctgaaccctgtgtacaatgaggccatcatctttgacatccccccagaaaatgtggaccaggtgtccctgagcattgctgtgatggactatgacagagtgggccacaatgaagtcatcggcgtgtgcaggacaggcctggatgctgagggcctgggccgggaccactggaatgagatgctggcctaccacaggaagcccatcacccactggcaccccctgctggagctgcccggccgggccaccagctttgacagccagggcagctgccccagccccaagccacccagcaccccctag

SEQ ID NO: 149103 - DNA, 1512 bp, synthetic construct
  misc_feature 1..1512: note = Description of Artificial Sequence: Synthetic coding sequence
  source 1..1512: mol_type = other DNA
atggccctgatcccagacctggccatggagacctggctgctgctggccgtgtccctggtgctgctgtacctgtatggcacccacagccacggcctcttcaagaagctgggcatccctggccccacccccctgcccttcctgggcaacatcctgagctaccacaagggcttctgcatgtttgacatggagtgccacaagaagtatggcaaggtgtggggcttctatgatggccagcagcctgtgctggccatcacagatcctgacatgatcaagacagtgctggtgaaggagtgctacagcgtcttcaccaacagaagacccttcggccctgtgggcttcatgaagagcgccatcagcattgctgaagatgaggagtggaagaggctgcggagcctgctgagccccaccttcaccagcggcaagctgaaggagatggtgcccatcatcgcccagtatggagatgtgctggtgaggaacctgcggcgggaggccgagaccgggaagcctgtgaccctgaaggatgtgtttggagcctacagcatggatgtgatcaccagcaccagctttggagtgaacatcgacagcctgaacaacccccaggacccctttgtggagaacaccaagaagctgctgcgctttgacttcctggaccccttcttcctgagcatcaccgtcttccccttcctgatccccatcctggaggtgctgaacatctgtgtgttcccccgggaggtgaccaacttcctgaggaagtctgtgaagaggatgaaggagagccggctggaggacacccagaagcaccgggtggacttcctgcagctgatgattgacagccagaacagcaaggagacagagagccacaaggccctgagtgacctggagctggtggcccagagcatcatcttcatctttgctggctatgagaccaccagctctgtgctgtccttcatcatgtatgagctggccacccacccagatgtgcagcagaagctgcaggaggagattgatgctgtgctgcccaacaaggccccacccacctatgacacagtgctgcagatggagtacctggacatggtggtgaatgagaccctgcggctcttccccatcgccatgaggctggagcgggtgtgcaagaaggatgtggagatcaatggcatgttcatccccaagggcgtggtggtgatgatccccagctatgccctgcaccgggaccccaagtactggacagagcctgagaagttcctgcctgagcgcttcagcaagaagaacaaggacaacatcgacccctacatctacaccccatttggaagtggccccaggaactgcatcggcatgagatttgccctgatgaacatgaagctggccctgatccgggtgctgcagaacttctccttcaagccctgcaaggagacccagatccccctgaagctgagcctgggcggcctgctgcagcctgagaagcctgtggtgctgaaggtggagagcagagatggcaccgtgtctggggcctag

SEQ ID NO: 149104 - DNA, 1062 bp, synthetic construct
  misc_feature 1..1062: note = Description of Artificial Sequence: Synthetic coding sequence
  source 1..1062: mol_type = other DNA
atggccctgatcccagacctggccatggagacctggctgctgctggccgtgtccctggtgctgctgtacctggtgtttggagcctacagcatggatgtgatcaccagcaccagctttggagtgaacatcgacagcctgaacaacccccaggacccctttgtggagaacaccaagaagctgctgcgctttgacttcctggaccccttcttcctgagcatcaccgtcttccccttcctgatccccatcctggaggtgctgaacatctgtgtgttcccccgggaggtgaccaacttcctgaggaagtctgtgaagaggatgaaggagagccggctggaggacacccagaagcaccgggtggacttcctgcagctgatgattgacagccagaacagcaaggagacagagagccacaaggccctgagtgacctggagctggtggcccagagcatcatcttcatctttgctggctatgagaccaccagctctgtgctgtccttcatcatgtatgagctggccacccacccagatgtgcagcagaagctgcaggaggagattgatgctgtgctgcccaacaaggccccacccacctatgacacagtgctgcagatggagtacctggacatggtggtgaatgagaccctgcggctcttccccatcgccatgaggctggagcgggtgtgcaagaaggatgtggagatcaatggcatgttcatccccaagggcgtggtggtgatgatccccagctatgccctgcaccgggaccccaagtactggacagagcctgagaagttcctgcctgagcgcttcagcaagaagaacaaggacaacatcgacccctacatctacaccccatttggaagtggccccaggaactgcatcggcatgagatttgccctgatgaacatgaagctggccctgatccgggtgctgcagaacttctccttcaagccctgcaaggagacccagatccccctgaagctgagcctgggcggcctgctgcagcctgagaagcctgtggtgctgaaggtggagagcagagatggcaccgtgtctggggcctag

SEQ ID NO: 149105 - DNA, 240 bp, synthetic construct
  misc_feature 1..240: note = Description of Artificial Sequence: Synthetic coding sequence
  source 1..240: mol_type = other DNA
atggtgcccatcatcgcccagtatggagatgtgctggtgaggaacctgcggcgggaggccgagaccgggaagcctgtgaccctgaaggatgtgtttggagcctacagcatggatgtgatcaccagcaccagctttggagtgaacatcgacagcctgaacaacccccaggacccctttgtggagaacaccaagaagctgctgcgctttgacttcctggaccccttcttcctgagcatctag

SEQ ID NO: 149106 - DNA, 1068 bp, synthetic construct
  misc_feature 1..1068: note = Description of Artificial Sequence: Synthetic coding sequence
  source 1..1068: mol_type = other DNA
atggccaagctgattgccctgaccctgctgggcatgggcctggccctcttcaggaaccaccagagcagctaccagacccggctgaatgccctgcgggaggtgcagcctgtggagctgcccaactgcaacctggtgaagggcatcgagaccggcagcgaggacctggagatcctgcccaacggcctggccttcatcagcagcggcctgaagtacccaggcatcaagagcttcaaccccaacagccctgggaagatcctgctgatggacctgaatgaggaggaccccaccgtgctggagctgggcatcaccggcagcaagtttgatgtgtcctccttcaacccccacggcatcagcaccttcacagatgaagataatgccatgtacctgctggtggtgaaccacccagatgccaagagcacagtggagctgttcaagttccaggaggaggagaagagcctgctgcacctgaagaccatccgccacaagctgctgcccaacctgaatgacatcgtggccgtgggccctgagcacttctacggcaccaatgaccactacttcctggacccctacctgcagagctgggagatgtacctgggcctggcctggagctatgtggtgtactacagccccagcgaggtgcgggtggtggccgagggctttgattttgccaacggcatcaacatcagcccagatggcaagtatgtgtacatcgccgagctgctggcccacaagatccacgtgtatgagaagcacgccaactggaccctgacccccctgaagagcctggacttcaacaccctggtggacaacatctctgtggaccctgagactggagacctgtgggtgggctgccaccccaacggcatgaagatcttcttctatgacagtgaaaatcctccagccagcgaggtgctgcgcatccagaacatcctgacagaggagcccaaggtgacccaggtgtatgcagaaaatggcaccgtgctgcagggcagcacagtggcctctgtgtacaagggcaagctgctgattggaacagtgttccacaaggccctgtactgtgagctgtag

SEQ ID NO: 149107 - DNA, 1263 bp, synthetic construct
  misc_feature 1..1263: note = Description of Artificial Sequence: Synthetic coding sequence
  source 1..1263: mol_type = other DNA
atggacctgatccccaactttgccatggagacctgggtgctggtggccaccagcctggtgctgctgtacatctacggcacccacagccacaagctgttcaagaagctgggcatccctggccccacccccctgcccttcctgggcaccatcctcttctacctgcggggcctgtggaactttgacagagaatgtaatgagaagtacggggagatgtggggcctgtatgagggccagcagcccatgctggtgatcatggaccctgacatgatcaagacagtgctggtgaaggagtgctacagcgtcttcaccaaccagatgcccctgggccccatgggcttcctgaagagcgccctgagctttgctgaagatgaggagtggaagaggatccgcaccctgctgagccctgccttcacctctgtgaagttcaaggagatggtgcccatcatcagccagtgtggggacatgctggtgcgcagcctgcggcaggaggccgagaacagcaagagcatcaacctgaaggacttcttcggggcctacaccatggatgtgatcaccggcaccctgtttggagtgaacctggacagcctgaacaacccccaggaccccttcctgaagaacatgaagaagctgctgaagctggacttcctggaccccttcctgctgctgatcagcctcttccccttcctgacccctgtgtttgaggccctgaacatcggcctcttccccaaggatgtgacccacttcctgaagaacagcattgaaagaatgaaggagagccggctgaaggacaagcagaagcaccgggtggacttcttccagcagatgattgacagccagaacagcaaggagaccaagagccacaaggccctgagtgacctggagctggtggcccagagcatcatcatcatctttgctgcctatgacaccaccagcaccaccctgcccttcatcatgtatgagctggccacccacccagatgtgcagcagaagctgcaggaggagattgatgctgtgctgcccaacaaggcccctgtgacctatgatgccctggtgcagatggagtacctggacatggtggtgaatgagaccctgcggctcttccctgtggtgtcccgggtgaccagggtgtgcaagaaggacatcgagatcaacggggtcttcatccccaagggcctggccgtgatggtgcccatctatgccctgcaccacgaccccaagtactggacagagcctgagaagttctgcccagagaggagccactag

SEQ ID NO: 149108 - DNA, 843 bp, synthetic construct
  misc_feature 1..843: note = Description of Artificial Sequence: Synthetic coding sequence
  source 1..843: mol_type = other DNA
atgaacctggagactggaaatggcccccaccacttccccatgtggaggtatgtgggggagaagccagaggccggcagccgggagcagcaggtgcaccagctggagcgcttcctgtggggcctgcaccacggctgcaaccactggcacatcatctggagcgagctgggcttcagccagcagagcaccaggagcctgtctgagaagtatgaggaggccttcaagattggcttcttcggcagcctcttcaccctgaacatccagagcctggccgtgctgcccaggcctgagtgcatggtgcgcagcggcctgacagagaccagcacctcctgggtgcgggtcatcctgctgccccagcccccagaggagctgggcctgcagcaccgggtggacttcttccagcagatgattgacagccagaacagcaaggagaccaagagccacaaggccctgagtgacctggagctggtggcccagagcatcatcatcatctttgctgcctatgacaccaccagcaccaccctgcccttcatcatgtatgagctggccacccacccagatgtgcagcagaagctgcaggaggagattgatgctgtgctgcccaacaaggcccctgtgacctatgatgccctggtgcagatggagtacctggacatggtggtgaatgagaccctgcggctcttccctgtggtgtcccgggtgaccagggtgtgcaagaaggacatcgagatcaacggggtcttcatccccaagggcctggccgtgatggtgcccatctatgccctgcaccacgaccccaagtactggacagagcctgagaagttctgcccagagaggagccactag

SEQ ID NO: 149109 - DNA, 1512 bp, synthetic construct
  misc_feature 1..1512: note = Description of Artificial Sequence: Synthetic coding sequence
  source 1..1512: mol_type = other DNA
atggacctgatccccaactttgccatggagacctgggtgctggtggccaccagcctggtgctgctgtacatctacggcacccacagccacaagctgttcaagaagctgggcatccctggccccacccccctgcccttcctgggcaccatcctcttctacctgcggggcctgtggaactttgacagagaatgtaatgagaagtacggggagatgtggggcctgtatgagggccagcagcccatgctggtgatcatggaccctgacatgatcaagacagtgctggtgaaggagtgctacagcgtcttcaccaaccagatgcccctgggccccatgggcttcctgaagagcgccctgagctttgctgaagatgaggagtggaagaggatccgcaccctgctgagccctgccttcacctctgtgaagttcaaggagatggtgcccatcatcagccagtgtggggacatgctggtgcgcagcctgcggcaggaggccgagaacagcaagagcatcaacctgaaggacttcttcggggcctacaccatggatgtgatcaccggcaccctgtttggagtgaacctggacagcctgaacaacccccaggaccccttcctgaagaacatgaagaagctgctgaagctggacttcctggaccccttcctgctgctgatcagcctcttccccttcctgacccctgtgtttgaggccctgaacatcggcctcttccccaaggatgtgacccacttcctgaagaacagcattgaaagaatgaaggagagccggctgaaggacaagcagaagcaccgggtggacttcttccagcagatgattgacagccagaacagcaaggagaccaagagccacaaggccctgagtgacctggagctggtggcccagagcatcatcatcatctttgctgcctatgacaccaccagcaccaccctgcccttcatcatgtatgagctggccacccacccagatgtgcagcagaagctgcaggaggagattgatgctgtgctgcccaacaaggcccctgtgacctatgatgccctggtgcagatggagtacctggacatggtggtgaatgagaccctgcggctcttccctgtggtgtcccgggtgaccagggtgtgcaagaaggacatcgagatcaacggggtcttcatccccaagggcctggccgtgatggtgcccatctatgccctgcaccacgaccccaagtactggacagagcctgagaagttctgcccagagcgcttcagcaagaagaacaaggacagcattgacctgtaccgctacatcccctttggagctggccccaggaactgcatcggcatgagatttgccctgaccaacatcaagctggccgtcatccgggccctgcagaacttctccttcaagccctgcaaggagacccagatccccctgaagctggacaacctgcccatcctgcagcctgagaagcccatcgtgctgaaggtgcacctgagagatggcatcaccagcggcccctag

SEQ ID NO: 149110 - DNA, 381 bp, synthetic construct
  misc_feature 1..381: note = Description of Artificial Sequence: Synthetic coding sequence
  source 1..381: mol_type = other DNA
atggacctgatccccaactttgccatggagacctgggtgctggtggccaccagcctggtgctgctgtacatctacggcacccacagccacaagctgttcaagaagctgggcatccctggccccacccccctgcccttcctgggcaccatcctcttctacctgcggggcctgtggaactttgacagagaatgtaatgagaagttcctgtggggcctgcaccacggctgcaaccactggcacatcatctggagcgagctgggcttcagccagcagagcaccaggagcctgtctgagaagtatgaggaggccttcaagattggcttcttcggcagcctcttcaccctgaacatcaccctgagcatctcctaccccagcttctag

SEQ ID NO: 149111 - DNA, 225 bp, synthetic construct
  misc_feature 1..225: note = Description of Artificial Sequence: Synthetic coding sequence
  source 1..225: mol_type = other DNA
atggacctgatccccaactttgccatggagacctgggtgctggtggccaccagcctggtgctgctgtacatctacggcacccacagccacaagctgttcaagaagctgggcatccctggccccacccccctgcccttcctgggcaccatcctcttctacctgcggggcctgtggaactttgacagagaatgtaatgagaagtacggggagatgtggggcccctag

SEQ ID NO: 149112 - DNA, 435 bp, synthetic construct
  misc_feature 1..435: note = Description of Artificial Sequence: Synthetic coding sequence
  source 1..435: mol_type = other DNA
atgcccaaggtgaagaggagcaggaaggcccccccagatggctgggagctgattgagcccaccctggatgagctggaccagaagatgagggaggccgagacagagccccatgagggcaagaggaaggtggagagcctgtggcccatcttccgcatccaccaccagaagacccgctacatctttgacctcttctacaagaggaaggccatcagccgggagctgtatgagtactgcatcaaggagggctacgccgacaagaacctgattgccaagtggaagaagcagggctatgagaacctgtgctgcctgcgctgcatccagacccgggacaccaactttggcaccaactgcatctgccgggtgcccaagagcaagctggaggtgggccgcatcattgaatgtacccactgcggctgccggggctgcagcggctag

SEQ ID NO: 149113 - DNA, 120 bp, synthetic construct
  misc_feature 1..120: note = Description of Artificial Sequence: Synthetic coding sequence
  source 1..120: mol_type = other DNA
atggacctgatccccaacctggccgtggagacctggctgctgctggccgtgtccctggtgctgctgtacctgatgagggtgcccaagagcgccaagagccccctgaccaagcagacctag

SEQ ID NO: 149114 - DNA, 1479 bp, synthetic construct
  misc_feature 1..1479: note = Description of Artificial Sequence: Synthetic coding sequence
  source 1..1479: mol_type = other DNA
atgcagctgctgatgctggagctgctgctgctcttcatcgtgtatggcaccaggacccacggcctcttcaagaggctgggcatccctggccccacccccctgcccctgctgggcaatgtgctgagctaccggcagggcctgtggaagtttgacacagagtgctacaagaagtatggcaagatgtggggcacctatgagggccagctgcctgtgctggccatcacagatcctgatgtgatcagaacagtgctggtgaaggagtgctacagcgtcttcaccaacagaagaagcctgggccctgtgggcttcatgaagagcgccatcagcctggccgaggatgaggagtggaagaggatccgcagcctgctgagccccaccttcaccagcggcaagctgaaggagatgttccccatcatcgcccagtatggagatgtgctggtgaggaacctgcggcgggaggccgagaagggcaagcctgtgaccctgaaggacatctttggagcctacagcatggatgtgatcaccggcaccagctttggagtgaacatcgacagcctgaacaacccccaggacccctttgtggagagcaccaagaagttcctgaagtttggcttcctggaccccctcttcctgagcatcatcctcttccccttcctgacccctgtgtttgaggccctgaatgtgtccctcttccccaaggacaccatcaacttcctgagcaagtctgtgaacaggatgaagaagagccggctgaatgacaagcagaagcaccggctggacttcctgcagctgatgattgacagccagaacagcaaggagacagagagccacaaggccctgagtgacctggagctggccgcccagagcatcatcttcatctttgctggctatgagaccaccagctctgtgctgtccttcaccctgtatgagctggccacccacccagatgtgcagcagaagctgcagaaggagattgatgctgtgctgcccaacaaggccccacccacctatgatgctgtggtgcagatggagtacctggacatggtggtgaatgagaccctgcggctcttccctgtggccatccggctggagaggacctgcaagaaggatgtggagatcaacggggtcttcatccccaagggctccatggtggtgatccccacctacgccctgcaccacgaccccaagtactggacagagcctgaggagttccggcctgagcgcttcagcaagaagaaggacagcattgacccctacatctacacccccttcggcaccggccccaggaactgcatcggcatgagatttgccctgatgaacatgaagctggccctgatccgggtgctgcagaacttctccttcaagccctgcaaggagacccagatccccctgaagctggacacccagggcctgctgcagcctgagaagcccatcgtgctgaaggtggacagcagagatggcaccctgagcggggagtag

SEQ ID NO: 149115 - DNA, 1602 bp, synthetic construct
  misc_feature 1..1602: note = Description of Artificial Sequence: Synthetic coding sequence
  source 1..1602: mol_type = other DNA
atggacctgatccccaacctggccgtggagacctggctgctgctggccgtgtccctcatcctgctgtacctgtatggcaccaggacccacggcctcttcaagaagctgggcatccctggccccacccccctgcccttcctgggcaatgccctgtccttcaggaagggctactggacctttgacatggagtgctacaagaagtacaggaaggtgtggggcatctatgactgccagcagcccatgctggccatcacagatcctgacatgatcaagacagtgctggtgaaggagtgctacagcgtcttcaccaacagaagacccttcggccctgtgggcttcatgaagaatgccatcagcattgctgaagatgaggagtggaagaggatccgcagcctgctgagccccaccttcaccagcggcaagctgaaggagatggtgcccatcatcgcccagtatggagatgtgctggtgaggaacctgcggcgggaggccgagaccgggaagcctgtgaccctgaagcacgtgtttggagcctacagcatggatgtgatcaccagcaccagctttggagtgtccattgacagcctgaacaacccccaggacccctttgtggagaacaccaagaagctgctgcgcttcaaccccctggacccctttgtgctgagcatcaaggtgttccccttcctgacccccatcctggaggccctgaacatcaccgtcttccccaggaaggtgatctccttcctgaccaagtctgtgaagcagatcaaggagggccgcctgaaggagacccagaagcaccgggtggacttcctgcagctgatgattgacagccagaacagcaaggacagcgagacccacaaggccctgagtgacctggagctgatggcccagagcatcatcttcatctttgctggctatgagaccaccagctctgtgctgtccttcatcatctatgagctggccacccacccagatgtgcagcagaaggtgcagaaggagattgacacagtgctgcccaacaaggccccacccacctatgacacagtgctgcagctggagtacctggacatggtggtgaatgagaccctgcggctcttccctgtggccatgaggctggagcgggtgtgcaagaaggatgtggagatcaatggcatgttcatccccaagggcgtggtggtgatgatccccagctatgtgctgcaccacgaccccaagtactggagggagcctgagaagttcctgcctgagcgcttcagcaagaagaacaaggacaacatcgacccctacatctacaccccatttggaagtggccccaggaactgcatcggcatgagatttgccctggtgaacatgaagctggccctggtgcgggtgctgcagaacttctccttcaagccctgcaaggagacccagatccccctgaagctgcgctttggaggcctgctgctgacagagaagcccatcgtgctgaaggccgagagcagagatgagacctttgtggacatggagcccatccacatggacttcctgcggagcctggccttccagggcccccacctgtgcttcttctgggagctgctgtgccccaccatcagatag

SEQ ID NO: 149116 - DNA, 1512 bp, synthetic construct
  misc_feature 1..1512: note = Description of Artificial Sequence: Synthetic coding sequence
  source 1..1512: mol_type = other DNA
atggacctgatccccaacctggccgtggagacctggctgctgctggccgtgtccctcatcctgctgtacctgtatggcaccaggacccacggcctcttcaagaagctgggcatccctggccccacccccctgcccttcctgggcaatgccctgtccttcaggaagggctactggacctttgacatggagtgctacaagaagtacaggaaggtgtggggcatctatgactgccagcagcccatgctggccatcacagatcctgacatgatcaagacagtgctggtgaaggagtgctacagcgtcttcaccaacagaagacccttcggccctgtgggcttcatgaagaatgccatcagcattgctgaagatgaggagtggaagaggatccgcagcctgctgagccccaccttcaccagcggcaagctgaaggagatggtgcccatcatcgcccagtatggagatgtgctggtgaggaacctgcggcgggaggccgagaccgggaagcctgtgaccctgaagcacgtgtttggagcctacagcatggatgtgatcaccagcaccagctttggagtgtccattgacagcctgaacaacccccaggacccctttgtggagaacaccaagaagctgctgcgcttcaaccccctggacccctttgtgctgagcatcaaggtgttccccttcctgacccccatcctggaggccctgaacatcaccgtcttccccaggaaggtgatctccttcctgaccaagtctgtgaagcagatcaaggagggccgcctgaaggagacccagaagcaccgggtggacttcctgcagctgatgattgacagccagaacagcaaggacagcgagacccacaaggccctgagtgacctggagctgatggcccagagcatcatcttcatctttgctggctatgagaccaccagctctgtgctgtccttcatcatctatgagctggccacccacccagatgtgcagcagaaggtgcagaaggagattgacacagtgctgcccaacaaggccccacccacctatgacacagtgctgcagctggagtacctggacatggtggtgaatgagaccctgcggctcttccctgtggccatgaggctggagcgggtgtgcaagaaggatgtggagatcaatggcatgttcatccccaagggcgtggtggtgatgatccccagctatgtgctgcaccacgaccccaagtactggagggagcctgagaagttcctgcctgagcgcttcagcaagaagaacaaggacaacatcgacccctacatctacaccccatttggaagtggccccaggaactgcatcggcatgagatttgccctggtgaacatgaagctggccctggtgcgggtgctgcagaacttctccttcaagccctgcaaggagacccagatccccctgaagctgcgctttggaggcctgctgctgacagagaagcccatcgtgctgaaggccgagagcagagatgaaacagtgtctggggcctag

SEQ ID NO: 149117 - DNA, 1410 bp, synthetic construct
  misc_feature 1..1410: note = Description of Artificial Sequence: Synthetic coding sequence
  source 1..1410: mol_type = other DNA
atggagctgatcagccccaccgtcatcatcatcctgggctgcctggccctcttcctgctgctgcagaggaagaacctgcggcggcccccctgcatcaagggctggatcccctggattggagtgggctttgaatttgggaaggcccccctggagttcatcgagaaggcccgcatcaagtatggccccatcttcaccgtgtttgccatgggcaacaggatgacctttgtgacagaggaggagggcatcaacgtgttcctgaagagcaagaaggtggactttgagctggccgtgcagaacatcgtgtacagaacagccagcatccccaagaatgtgttcctggccctgcacgagaagctgtacatcatgctgaagggcaagatgggcaccgtgaacctgcaccagttcaccggccagctgacagaggagctgcacgagcagctggagaacctgggcacccacggcaccatggacctgaacaacctggtgcgccacctgctgtaccctgtgacagtgaacatgctgttcaacaagagcctcttcagcaccaacaagaagaagatcaaggagttccaccagtacttccaggtgtatgatgaagattttgaatatggcagccagctgcctgaatgtctgctgaggaactggagcaagagcaagaagtggttcctggagctgtttgagaagaacatcccagacatcaaggcctgcaagagcgccaaggacaacagcatgaccctgctgcaggccaccctggacatcgtggagacagagaccagcaaagaaaacagccccaactacggcctgctgctgctgtgggccagcctgagcaatgctgtgcctgtggccttctggaccctggcctacgtgctgagccacccagacatccacaaggccatcatggagggcatcagctctgtgtttgggaaggccggcaaggacaagatcaaggtgtctgaagatgacctggagaacctgctgctgatcaagtggtgtgtgctggagaccatccggctgaaggcccctggggtcatcaccaggaaggtggtgaagcctgtggagatcctgaactacatcatccccagcggggacctgctgatgctgagccccttctggctgcacaggaaccccaagtacttccctgagcctgagctgttcaagccagagcgctggaagaaggccaacctggagaagcacagcttcctggactgcttcatggcctttggaagtggcaagttccagtgcccagcccgctggtttgccctgctggaggtgcagatgtgcatcatcctgatcctgtacaagtatgactgcagcctgctggaccccctgcccaagcagagctacctgcacctggtgggcgtgccccagcctgagggccagtgcagaattgagtacaagcagaggatctag

SEQ ID NO: 149118 - DNA, 1560 bp, synthetic construct
  misc_feature 1..1560: note = Description of Artificial Sequence: Synthetic coding sequence
  source 1..1560: mol_type = other DNA
atgtctgtgtctgtgctgagccccagccggctgctgggagatgtgtctggcatcctgcaggccgccagcctgctgatcctgctgctgctgctgatcaaggctgtgcagctgtacctgcaccggcagtggctgctgaaggccctgcagcagttcccctgcccccccagccactggctgtttggccacatccaggagctgcagcaggaccaggagctgcagaggatccagaagtgggtggagaccttccccagcgcctgcccccactggctgtggggcggcaaggtgcgggtgcagctgtatgaccctgactacatgaaggtgatcctgggccgcagtgaccccaagagccacggcagctaccgcttcctggccccctggattggctacggcctgctgctgctgaatggccagacctggttccagcacaggaggatgctgaccccagccttccactatgacatcctgaagccctacgtgggcctgatggctgacagcgtgcgggtgatgctggacaagtgggaggagctgctgggccaggacagccccctggaggtgttccagcacgtgtccctgatgaccctggacaccatcatgaagtgtgccttcagccaccagggcagcatccaggtggacaggaacagccagagctacatccaggccatcagtgacctgaacaacctggtgttcagccgggtgagaaatgccttccaccagaatgacaccatctacagcctgaccagcgctggccgctggacccaccgggcctgccagctggcccaccagcacacagaccaggtgatccagctgaggaaggcccagctgcagaaggagggggagctggagaagatcaagaggaagaggcacctggacttcctggacatcctgctgctggccaagatggagaatggcagcatcctgagtgacaaggacctgcgggcagaggtggacaccttcatgtttgagggccatgacaccacagccagcggcatctcctggatcctgtatgccctggccacccaccccaagcaccaggagcgctgccgggaggagatccacagcctgctgggagatggagccagcatcacctggaaccacctggaccagatgccctacaccaccatgtgcatcaaggaggccctgcggctgtacccacctgtgcccggcatcggccgggagctgagcacccctgtgaccttcccagatggccgcagcctgcccaagggcatcatggtgctgctgagcatctacggcctgcaccacaaccccaaggtgtggcccaaccctgaggtgtttgaccccttccgctttgcccctggcagcgcccagcacagccacgccttcctgcccttcagcggcggcagcaggaactgcatcggcaagcagtttgccatgaatgagctgaaggtggccacagccctgaccctgctgcgctttgagctgctgcctgaccccacccgcatccccatccccatcgcccggctggtgctgaagagcaagaatggcatccacctgcggctgcggcggctgcccaacccctgtgaggacaaggaccagctgtag

SEQ ID NO: 149119 - DNA, 1563 bp, synthetic construct
  misc_feature 1..1563: note = Description of Artificial Sequence: Synthetic coding sequence
  source 1..1563: mol_type = other DNA
atgtctgtgtctgtgctgagccccagccggctgctgggagatgtgtctggcatcctgcaggccgccagcctgctgatcctgctgctgctgctgatcaaggctgtgcagctgtacctgcaccggcagtggctgctgaaggccctgcagcagttcccctgcccccccagccactggctgtttggccacatccaggagctgcagcaggaccaggagctgcagaggatccagaagtgggtggagaccttccccagcgcctgcccccactggctgtggggcggcaaggtgcgggtgcagctgtatgaccctgactacatgaaggtgatcctgggccgcagtgaccccaagagccacggcagctaccgcttcctggccccctggattggctacggcctgctgctgctgaatggccagacctggttccagcacaggaggatgctgaccccagccttccactatgacatcctgaagccctacgtgggcctgatggctgacagcgtgcgggtgatgctggacaagtgggaggagctgctgggccaggacagccccctggaggtgttccagcacgtgtccctgatgaccctggacaccatcatgaagtgtgccttcagccaccagggcagcatccaggtggacaggaacagccagagctacatccaggccatcagtgacctgaacaacctggtgttcagccgggtgagaaatgccttccaccagaatgacaccatctacagcctgaccagcgctggccgctggacccaccgggcctgccagctggcccaccagcacactggagaccaggtgatccagctgaggaaggcccagctgcagaaggagggggagctggagaagatcaagaggaagaggcacctggacttcctggacatcctgctgctggccaagatggagaatggcagcatcctgagtgacaaggacctgcgggcagaggtggacaccttcatgtttgagggccatgacaccacagccagcggcatctcctggatcctgtatgccctggccacccaccccaagcaccaggagcgctgccgggaggagatccacagcctgctgggagatggagccagcatcacctggaaccacctggaccagatgccctacaccaccatgtgcatcaaggaggccctgcggctgtacccacctgtgcccggcatcggccgggagctgagcacccctgtgaccttcccagatggccgcagcctgcccaagggcatcatggtgctgctgagcatctacggcctgcaccacaaccccaaggtgtggcccaaccctgaggtgtttgaccccttccgctttgcccctggcagcgcccagcacagccacgccttcctgcccttcagcggcggcagcaggaactgcatcggcaagcagtttgccatgaatgagctgaaggtggccacagccctgaccctgctgcgctttgagctgctgcctgaccccacccgcatccccatccccatcgcccggctggtgctgaagagcaagaatggcatccacctgcggctgcggcggctgcccaacccctgtgaggacaaggaccagctgtag

SEQ ID NO: 149120 - DNA, 1368 bp, synthetic construct
  misc_feature 1..1368: note = Description of Artificial Sequence: Synthetic coding sequence
  source 1..1368: mol_type = other DNA
atgtctgtgtctgtgctgagccccagccggctgctgggagatgtgtctggcatcctgcaggccgccagcctgctgatcctgctgctgctgctgatcaaggctgtgcagctgtacctgcaccggcagtggctgctgaaggccctgcagcagttcccctgcccccccagccactggctgtttggccacatccaggagctgcagcaggaccaggagctgcagaggatccagaagtgggtggagaccttccccagcgcctgcccccactggctgtggggcggcaaggtgcgggtgcagctgtatgaccctgactacatgaaggtgatcctgggccgcagtgaccccaagagccacggcagctaccgcttcctggccccctggattggctacggcctgctgctgctgaatggccagacctggttccagcacaggaggatgctgaccccagccttccactatgacatcctgaagccctacgtgggcctgatggctgacagcgtgcgggtgatgctggacaagtgggaggagctgctgggccaggacagccccctggaggtgttccagcacgtgtccctgatgaccctggacaccatcatgaagtgtgccttcagccaccagggcagcatccaggtggacaggaacagccagagctacatccaggccatcagtgacctgaacaacctggtgttcagccgggtgagaaatgccttccaccagaatgacaccatctacagcctgaccagcgctggccgctggacccaccgggcctgccagctggcccaccagcacacagaccaggtgatccagctgaggaaggcccagctgcagaaggagggggagctggagaagatcaagaggaagaggcacctggacttcctggacatcctgctgctggccaagatggagaatggcagcatcctgagtgacaaggacctgcgggcagaggtggacaccttcatgtttgagggccatgacaccacagccagcggcatctcctggatcctgtatgccctggccacccaccccaagcaccaggagcgctgccgggaggagatccacagcctgctgggagatggagccagcatcacctggaaccacctggaccagatgccctacaccaccatgtgcatcaaggaggccctgcggctgtacccacctgtgcccggcatcggccgggagctgagcacccctgtgaccttcccagatggccgcagcctgcccaagggcatcatggtgctgctgagcatctacggcctgcaccacaaccccaaggtgtggcccaaccctgaggtgtttgaccccttccgctttgcccctggcagcgcccagcacagccacgccttcctgcccttcagcggcggcagcaggtag

SEQ ID NO: 149121 - DNA, 474 bp, synthetic construct
  misc_feature 1..474: note = Description of Artificial Sequence: Synthetic coding sequence
  source 1..474: mol_type = other DNA
atgaaggtgatcctgggccgcagtgaccccaagagccacggcagctaccgcttcctggccccctggattggctacggcctgctgctgctgaatggccagacctggttccagcacaggaggatgctgaccccagccttccactatgacatcctgaagccctacgtgggcctgatggctgacagcgtgcgggtgatgctggacaagtgggaggagctgctgggccaggacagccccctggaggtgttccagcacgtgtccctgatgaccctggacaccatcatgaagtgtgccttcagccaccagggcagcatccaggtggaccggcccagcgaccccacagaggagggcagcaccacagaaggaggaggagctggggaggaccaggaggaggaggccttcggcttcagcggctacccacccctgggccagaatggagagtgggagcacctggtgcggcagggccccccctgctag

SEQ ID NO: 149122 - DNA, 1575 bp, synthetic construct
  misc_feature 1..1575: note = Description of Artificial Sequence: Synthetic coding sequence
  source 1..1575: mol_type = other DNA
atgccccagctgagcctgtcctggctgggcctgggccctgtggccgccagcccctggctgctgctgctgctggtgggcggctcctggctgctggcccgggtgctggcctggacctacaccttctatgacaactgccggcggctgcagtgcttcccccagccccccaagcagaactggttctggggccaccagggcctggtgacccccacagaggagggcatgaagaccctgacccagctggtgaccacctacccccagggcttcaagctgtggctgggccccaccttccccctgctgatcctgtgccacccagacatcatccggcccatcaccagcgccagcgctgctgtggcccccaaggacatgatcttctacggcttcctgaagccctggctgggagatggcctgctgctgtctggaggagacaagtggagccgccacaggaggatgctgaccccagccttccacttcaacatcctgaagccctacatgaagatcttcaacaagtctgtgaacatcatgcatgacaagtggcagaggctggccagcgagggcagcgcccggctggacatgtttgagcacatcagcctgatgaccctggacagcctgcagaagtgtgtgttctcctttgagagcaactgccaggagaagcccagcgagtacatcgccgccatcctggagctgagcgcctttgtggagaagaggaaccagcagatcctgctgcacacagacttcctgtactacctgaccccagatggccagcgcttcagaagagcctgccacctggtgcatgacttcacagatgctgtgatccaggagcggcgctgcaccctgcccacccagggcattgatgacttcctgaagaacaaggccaagagcaagaccctggacttcattgatgtgctgctgctgagcaaggatgaagatggcaaggagctgagtgatgaggacatccgggcagaggccgacaccttcatgtttgagggccatgacaccacagccagcggcctgtcctgggtgctgtaccacctggccaagcaccctgagtaccaggagcagtgccggcaggaggtgcaggagctgctgaaggaccgggagcccatcgagattgagtgggatgacctggcccagctgcccttcctgaccatgtgcatcaaggagagcctgcggctgcacccccctgtgcctgtgatcagccgctgctgcacccaggactttgtgctgcctgatggccgggtcatccccaagggcatcgtgtgcctgatcaacatcatcggcatccactacaaccccaccgtgtggccagaccctgaggtgtatgaccccttccgctttgaccaggagaacatcaaggagaggagccccctggccttcatccccttctctgctggccccaggaactgcatcggccaggcctttgccatggccgagatgaaggtggtgctggccctgaccctgctgcacttccgcatcctgcccacccacacagagcccaggaggaagccagagctgatcctgcgggcagagggcggcctgtggctgcgggtggagcccctgggcgccaacagccagtag

SEQ ID NO: 149123 - DNA, 1365 bp, synthetic construct
  misc_feature 1..1365: note = Description of Artificial Sequence: Synthetic coding sequence
  source 1..1365: mol_type = other DNA
atgccccagctgagcctgtcctggctgggcctgggccctgtggccgccagcccctggctgctgctgctgctggtgggcggctcctggctgctggcccgggtgctggcctggacctacaccttctatgacaactgccggcggctgcagtgcttcccccagccccccaagcagaactggttctggggccaccagggcctggtgacccccacagaggagggcatgaagaccctgacccagctggtgaccacctacccccagggcttcaagctgtggctgggccccaccttccccctgctgatcctgtgccacccagacatcatccggcccatcaccagcgccagcgctgctgtggcccccaaggacatgatcttctacggcttcctgaagccctggctgggagatggcctgctgctgtctggaggagacaagtggagccgccacaggaggatgctgaccccagccttccacttcaacatcctgaagccctacatgaagatcttcaacaagtctgtgaacatcatgcatgacaagtggcagaggctggccagcgagggcagcgcccggctggacatgtttgagcacatcagcctgatgaccctggacagcctgcagaagtgtgtgttctcctttgagagcaactgccaggagaagcccagcgagtacatcgccgccatcctggagctgagcgcctttgtggagaagaggaaccagcagatcctgctgcacacagacttcctgtactacctgaccccagatggccagcgcttcagaagagcctgccacctggtgcatgacttcacagatgctgtgatccaggagcggcgctgcaccctgcccacccagggcattgatgacttcctgaagaacaaggccaagagcaagaccctggacttcattgatgtgctgctgctgagcaaggatgaagatggcaaggagctgagtgatgaggacatccgggcagaggccgacaccttcatgtttgagggccatgacaccacagccagcggcctgtcctgggtgctgtaccacctggccaagcaccctgagtaccaggagcagtgccggcaggaggtgcaggagctgctgaaggaccgggagcccatcgagattgagtgggatgacctggcccagctgcccttcctgaccatgtgcatcaaggagagcctgcggctgcacccccctgtgcctgtgatcagccgctgctgcacccaggactttgtgctgcctgatggccgggtcatccccaagggcctgcggcccctgcccttccggccccgggagcaccagggcgaggtgaccagcggcttctacagcctgctgggccgggcccagaagctgcacagagctggggtgagacatggatag

SEQ ID NO: 149124 - DNA, 1575 bp, synthetic construct; identical to SEQ ID NO: 149122
  misc_feature 1..1575: note = Description of Artificial Sequence: Synthetic coding sequence
  source 1..1575: mol_type = other DNA

SEQ ID NO: 149125 - DNA, 1575 bp, synthetic construct
  misc_feature 1..1575: note = Description of Artificial Sequence: Synthetic coding sequence
  source 1..1575: mol_type = other DNA
atgagcctgctgagcctgccctggctgggcctgcggcctgtggccaccagcccctggctgctgctgctgctggtggtgggctcctggctgctggcccgcatcctggcctggacctacgccttctacaacaactgccggcggctgcagtgcttcccccagccccccaagaggaactggttctggggccacctgggcctcatcacccccacagaggagggcctgaagaacagcacccagatgtctgccacctacagccagggcttcaccatctggctgggccccatcatccccttcatcgtgctgtgccacccagacaccatccgcagcatcaccaatgccagcgctgccatcgcccccaaggacaacctcttcatccgcttcctgaagccctggctgggggagggcatcctgctgtctggaggagacaagtggagccgccacaggaggatgctgaccccagccttccacttcaacatcctgaagagctacatcaccatcttcaacaagagcgccaacatcatgctggacaagtggcagcacctggccagcgagggcagcagctgcctggacatgtttgagcacatcagcctgatgaccctggacagcctgcagaagtgcatcttctcctttgacagccactgccaggagcggcccagcgagtacatcgccaccatcctggagctgagcgccctggtggagaagaggagccagcacatcctgcagcacatggacttcctgtactacctgagccatgatggccgccgcttccaccgggcctgccgcctggtgcatgacttcacagatgctgtgatccgggagaggaggaggaccctgcccacccagggcattgatgacttcttcaaggacaaggccaagagcaagaccctggacttcattgatgtgctgctgctgagcaaggatgaagatggcaaggccctgagtgatgaggacatccgggcagaggccgacaccttcatgtttggaggccatgacaccacagccagcggcctgtcctgggtgctgtacaacctggcccggcaccctgagtaccaggagcgctgccggcaggaggtgcaggagctgctgaaggaccgggaccccaaggagattgagtgggatgacctggcccagctgcccttcctgaccatgtgtgtgaaggagagcctgcggctgcaccccccagcccccttcatcagccgctgctgcacccaggacatcgtgctgcctgatggccgggtcatccccaagggcatcacctgcctgattgacatcattggagtgcaccacaaccccaccgtgtggccagaccctgaggtgtatgaccccttccgctttgatcctgagaacagcaagggccgcagccccctggccttcatccccttctctgctggccccaggaactgcatcggccaggcctttgccatggccgagatgaaggtggtgctggccctgatgctgctgcacttccgcttcctgcctgaccacacagagcccaggaggaagctggagctgatcatgagagctgagggcggcctgtggctgcgggtggagcccctgaatgtgtccctgcagtag

SEQ ID NO: 149126 - DNA, 1575 bp, synthetic construct; identical to SEQ ID NO: 149125
  misc_feature 1..1575: note = Description of Artificial Sequence: Synthetic coding sequence
  source 1..1575: mol_type = other DNA

SEQ ID NO: 149127 - DNA, 1596 bp, synthetic construct
  misc_feature 1..1596: note = Description of Artificial Sequence: Synthetic coding sequence
  source 1..1596: mol_type = other DNA
atgctgcccatcacagaccggctgctgcacctgctgggcctggagaagacagccttccgcatctatgctgtgtccaccctgctgctcttcctgctcttcttcctgttccggctgctgctgcgcttcctgcggctgtgccgctccttctacatcacctgccggcggctgcgctgcttcccccagccccccaggaggaactggctgctgggccacctgggcatgtacctgcccaatgaggccggcctgcaggatgagaagaaggtgctggacaacatgcaccacgtgctgctggtgtggatgggccctgtgctgcccctgctggtgctggtgcacccagactacatcaagcccctgctgggcgccagcgctgccatcgcccccaaggatgacctcttctacggcttcctgaagccctggctgggagatggcctgctgctgagcaagggggacaagtggagccgccaccggcggctgctgaccccagccttccactttgacatcctgaagccctacatgaagatcttcaaccagagcgctgacatcatgcacgccaagtggaggcacctggccgagggcagcgctgtgtccctggacatgtttgagcacatcagcctgatgaccctggacagcctgcagaagtgtgtgttctcctacaacagcaactgccaggagaagatgtctgactacatcagcgccatcatcgagctgagcgccctgtctgtgcggcggcagtaccgcctgcaccactacctggacttcatctactacagatctgcagatggccgccgcttccggcaggcctgtgacatggtgcaccacttcaccacagaggtgatccaggagaggagaagagccctgcggcagcagggcgctgaggcctggctgaaggccaagcagggcaagaccctggacttcattgatgtgctgctgctggccagagatgaagatggcaaggagctgagtgatgaggacatccgggcagaggccgacaccttcatgtttgagggccatgacaccaccagcagcggcatctcctggatgctgttcaacctggccaagtacccagagtaccaggagaagtgccgggaggagatccaggaggtgatgaagggccgggagctggaggagctggagtgggatgacctgacccagctgcccttcaccaccatgtgcatcaaggagagcctgcggcagtacccacctgtgaccctggtgtcccggcagtgcacagaggacatcaagctgcctgatggccgcatcatccccaagggcatcatctgcctggtgtccatctacggcacccaccacaaccccaccgtgtggccagacagcaaggtgtacaacccctacagatttgatcctgacaacccccagcagaggagccccctggcctacgtgcccttctctgctggccccaggaactgcatcggccagagctttgccatggccgagctgcgggtggtggtggccctgaccctgctgcgcttccggctgtctgtggacaggaccaggaaggtgcggaggaagccagagctgatcctgaggacagaaaatggcctgtggctgaaggtggagcccctgcccccccgggcctag

SEQ ID NO: 149128 - DNA, 1782 bp, synthetic construct
  misc_feature 1..1782: note = Description of Artificial Sequence: Synthetic coding sequence
  source 1..1782: mol_type = other DNA
atggcccccagcggcctgaaggctgtggtgggggagaagatcctgagcggggtcatccgctctgtgaagaaggatggagagtggaaggtgctgatcatggaccaccccagcatgaggatcctgagcagctgctgcaagatgtctgacatcctggccgagggcatcaccatcgtggaggacatcaacaagaggcgggagcccatccccagcctggaggccatctacctgctgagccccacagagaagtctgtgcaggccctgatcaaggacttccagggcacccccaccttcacctacaaggccgcccacatcttcttcacagacacctgcccagagcccctcttcagcgagctgggccgcagccggctggccaaggtggtgaagaccctgaaggagatccacctggccttcctgccctatgaggcccaggtgttcagcctggatgccccccacagcacctacaacctgtactgccccttccgggcagaggagaggacccggcagctggaggtgctggcccagcagatcgccaccctgtgtgccaccctgcaggagtacccagccatccgctacagaaaaggacctgaggacacagcccagctggcccatgctgtgctggccaagctgaatgccttcaaggctgacacccccagcctgggggagggccctgagaagaccaggagccagctgctgatcatggacagagctgctgaccctgtgagccccctgctgcacgagctgaccttccaggccatggcctatgacctgctggacatcgagcaggacacctaccgctatgagaccaccggcctgtctgaggcccgggagaaggctgtgctgctggatgaagatgatgacctgtgggtggagctgcggcacatgcacatcgcagatgtgtccaagaaggtgacagagctgctgcggaccttctgtgagagcaagaggctgaccacagacaaggccaacatcaaggacctgagccagatcctgaagaagatgccccagtaccagaaggagctgaacaagtacagcacccacctgcacctggctgatgactgcatgaagcacttcaagggctctgtggagaagctgtgcagcgtggagcaggacctggccatgggcagtgatgctgagggggagaagatcaaggacagcatgaagctgattgtgcctgtgctgctggatgctgctgtgcctgcctatgacaagatccgggtgctgctgctgtacatcctgctgagaaatggagtgtctgaggagaacctggccaagctgatccagcacgccaacgtgcaggcccacagcagcctcatccggaacctggagcagctgggcggcaccgtgaccaaccctgggggcagcggcaccagcagccggctggagccccgggagaggatggagcccacctaccagctgagccgctggacccctgtgatcaaggatgtgatggaggatgctgtggaggaccggctggacaggaacctgtggccctttgtgtctgaccctgcccccacagccagcagccaggccgctgtgtctgcccgcttcggccactggcacaagaacaaggccggcatcgaggcccgggccggcccccggctgattgtgtatgtgatgggcggcgtggccatgtctgagatgagagctgcctatgaggtgacccgggccacagagggcaagtgggaggtgctgattggcagcagccacatcctgacccccacccgcttcctggatgacctgaaggccctggacaagaagctggaggacatcgccctgccctag

SEQ ID NO: 149129 - DNA, 1344 bp, synthetic construct
  misc_feature 1..1344: note = Description of Artificial Sequence: Synthetic coding sequence
  source 1..1344: mol_type = other DNA
atgagggtgctgacccagctggtggccacctacccccagggcttcaaggtgtggatgggccccatcttccctgtgatccgcttctgccaccccaacatcatccgcagcgtcatcaatgccagcgctgccatcgtgcccaaggacaaggtgttctacagcttcctgaagccctggctgggagatggcctgctgctgtctgctggggagaagtggagccgccacaggaggatgctgaccccagccttccacttcaacatcctgaagccctacatgaagatcttcaatgaatctgtgaacatcatgcacgccaagtggcagctgctggccagcgagggcagcgcccggctggacatgtttgagcacatcagcctgatgaccctggacagcctgcagaagtgtgtgttctcctttgacagccactgccaggagaagcccagcgagtacatcgccgccatcctggagctgagcgccctggtgaccaagaggcaccagcagatcctgctgtacatcgacttcctgtactacctgaccccagatggccagcgcttccggcgggcctgccgcctggtgcatgacttcacagatgctgtgatccaggagaggaggaggaccctgcccagccagggcgtggatgacttcctgcaggccaaggccaagagcaagaccctggacttcattgatgtgctgctgctgagcaaggatgaagatggcaagaagctgagtgatgaggacatccgggcagaggccgacaccttcatgtttgagggccatgacaccacagccagcggcctgtcctgggtgctgtaccacctggccaagcaccctgagtaccaggagcgctgccggcaggaggtgcaggagctgctgaaggaccgggagcccaaggagattgagtgggatgacctggcccagctgcccttcctgaccatgtgcatcaaggagagcctgcggctgcacccccctgtgcctgctgtgagccgctgctgcacccaggacatcgtgctgcctgatggccgggtcatccccaagggcatcatctgcctgatctctgtgtttggcacccaccacaacccagctgtgtggccagaccctgaggtgtatgaccccttccgctttgaccccaagaacatcaaggagaggagccccctggccttcatccccttctctgctggccccaggaactgcatcggccaggcctttgccatggccgagatgaaggtggtgctgggcctgaccctgctgcgcttccgggtgctgcctgaccacacagagcccaggaggaagccagagctggtgctgcgggcagagggcggcctgtggctgcgggtggagcccctgtcctag

SEQ ID NO: 149130 - DNA, 999 bp, synthetic construct
  misc_feature 1..999: note = Description of Artificial Sequence: Synthetic coding sequence
  source 1..999: mol_type = other DNA
atgcccagcatcaccacagctgctgccagcggcgtgagccgcagccctggcaacagaacaggctcctgggtgacctgggcctggaagcccagcgagtacatcacagccatcatggagctgagcgccctggtggtgaagaggaacaaccagttcttccgctacaaggacttcctgtacttcctgaccccctgtggccgccgcttccaccgggcctgccgcctggtgcatgacttcacagatgctgtgatccaggagaggaggaggaccctgaccagccagggcgtggatgacttcctgcaggccaaggccaagagcaagaccctggacttcattgatgtgctgctgctgtctgaggacaagaatggcaaggagctgagtgatgaggacatccgggcagaggccgacaccttcatgtttggaggccatgacaccacagccagcggcctgtcctgggtgctgtacaacctggcccggcaccctgagtaccaggagcgctgccggcaggaggtgcaggagctgctgaaggaccgggagcccaaggagattgagtgggatgacctggcccagctgcccttcctgaccatgtgcctgaaggagagcctgcggctgcacccccccatccccacctttgcccggggctgcacccaggatgtggtgctgcctgacagcagggtcatccccaagggaaatgtgtgcaacatcaacatctttgccatccaccacaaccccagcgtgtggccagaccctgaggtgtatgaccccttccgctttgatcctgaaaatgcccagaagaggagccccatggccttcatccccttctctgctggccccaggaactgcatcggccagaagtttgccatggccgagatgaaggtggtgctggccctgaccctgctgcgcttccgcatcctgcctgaccaccgggagcccaggaggaccccagagatcgtgctgcgggcagaagatggcctgtggctgcgggtggagcccctgggctag

SEQ ID NO: 149131 - DNA, 1560 bp, synthetic construct
  misc_feature 1..1560: note = Description of Artificial Sequence: Synthetic coding sequence
  source 1..1560: mol_type = other DNA
atgagcctgctgagcctgtcctggctgggcctgcggcctgtggccgccagcccctggctgctgctgctggtggtgggcgcctcctggctgctggcccgcatcctggcctggacctacgccttctaccacaacggccggcggctgcgctgcttcccccagcccaggaagcagaactggttcctgggccacctgggcctggtgacccccacagaggagggcctgcgggtgctgacccagctggtggccacctacccccagggctttgtgcgctggctgggccccatcacccccatcatcaacctgtgccacccagacatcgtgcgcagcgtcatcaacaccagtgatgccatcacagacaaggacatcgtgttctacaagaccctgaagccctggctgggagatggcctgctgctgtctgtgggggacaagtggaggcaccaccggcggctgaccccagccttccacttcaacatcctgaagccctacatcaagatcttcagcaagagcgccaacatcatgcacgccaagtggcagaggctggccatggagggcagcacctgcctggatgtgtttgagcacatcagcctgatgaccctggacagcctgcagaagtgcatcttctcctttgacagcaactgccaggagaagcccagcgagtacatcacagccatcatggagctgagcgccctggtggtgaagaggaacaaccagttcttccgctacaaggacttcctgtacttcctgaccccctgtggccgccgcttccaccgggcctgccgcctggtgcatgacttcacagatgctgtgatccaggagaggaggaggaccctgaccagccagggcgtggatgacttcctgcaggccaaggccaagagcaagaccctggacttcattgatgtgctgctgctgtctgaggacaagaatggcaaggagctgagtgatgaggacatccgggcagaggccgacaccttcatgtttggaggccatgacaccacagccagcggcctgtcctgggtgctgtacaacctggcccggcaccctgagtaccaggagcgctgccggcaggaggtgcaggagctgctgaaggaccgggagcccaaggagattgagtgggatgacctggcccagctgcccttcctgaccatgtgcctgaaggagagcctgcggctgcacccccccatccccacctttgcccggggctgcacccaggatgtggtgctgcctgacagcagggtcatccccaagggaaatgtgtgcaacatcaacatctttgccatccaccacaaccccagcgtgtggccagaccctgaggtgtatgaccccttccgctttgatcctgaaaatgcccagaagaggagccccatggccttcatccccttctctgctggccccaggaactgcatcggccagaagtttgccatggccgagatgaaggtggtgctggccctgaccctgctgcgcttccgcatcctgcctgaccaccgggagcccaggaggaccccagaaattgtgctgcgggcagaagatggcctgtggctgcgggtggagcccctgggctag

SEQ ID NO: 149132 - DNA, 804 bp, synthetic construct
  misc_feature 1..804: note = Description of Artificial Sequence: Synthetic coding sequence
  source 1..804: mol_type = other DNA
accccagccttccacttcaacatcctgaagccctacatcaagatcttcagcaagagcgccaacatcatgcacgccaagtggcagaggctggccatggagggcagcacctgcctggatgtgtttgagcacatcagcctgatgaccctggacagcctgcagaagtgcatcttctcctttgacagcaactgccaggagaagcccagcgagtacatcacagccatcatggagctgagcgccctggtggtgaagaggaacaaccagttcttccgctacaaggacttcctgtacttcctgaccccctgtggccgccgcttccaccgggcctgccgcctggtgcatgacttcacagatgctgtgatccaggagaggaggaggaccctgaccagccagggcgtggatgacttcctgcaggccaaggccaagagcaagaccctggacttcattgatgtgctgctgctgtctgaggacaagaatggcaaggagctgagtgatgaggacatccgggcagaggccgacaccttcatgtttggaggccatgacaccacagccagcggcctgtcctgggtgctgtacaacctggcccggcaccctgagtaccaggagcgctgccggcaggaggtgcaggagctgctgaaggaccgggagcccaaggagattgagtgggatgacctggcccagctgcccttcctgaccatgtgcctgaaggagagcctgcggctgcacccccccatccccacctttgcccggggctgcacccaggatgtggtgctgcctgacagcagggtcatccccaagggcctgtag

SEQ ID NO: 149133 - DNA, 1512 bp, synthetic construct
  misc_feature 1..1512: note = Description of Artificial Sequence: Synthetic coding sequence
  source 1..1512: mol_type = other DNA
atggccggcctgtggctgggcctggtgtggcagaagctgctgctgtggggcgccgccagcgccctgagcctggccggggccagcctggtgctgagcctgctgcagagggtggccagctatgccctgctgatgaagccagatggccgggagttcttccagcagatcatcgagtacacagaggagtaccgccacatgcccctgctgaagctgtgggtgggccctgtgcccatggtggccctgtacaatgcagaaaatgtggaggtgatcctgaccagcagcaagcagattgacaagagctccatgtacaagttcctggagccctggctgggcctgggcctgctgaccagcactggaaacaagtggaggagcaggaggaagatgctgacccccaccttccacttcaccatcctggaggacttcctggacatcatgaatgagcaggccaacatcctggtgaagaagctggagaagcacatcaaccaggaggccttcaactgcttcttctacatcaccctgtgtgccctggacatcatctgtgaaacagccatgggcaagaacattggagcccagagcaatgatgattctgaatatgtgcgggctgtgtacaggatgtctgagatgatcttccgccgcatcaagatgccctggctgtggctggacctgtggtacctgatgttcaaggagggctgggagcacaagaagagcctgcagatcctgcacaccttcaccaacagcgtgattgctgagcgggccaatgagatgaatgccaatgaagactgcagaggagatggccggggcagcgcccccagcaagaacaagaggcgggccttcctggacctgctgctgtctgtgacagatgatgagggcaaccggctgagccatgaggacatccgggaggaggtggacaccttcatgtttgagggccatgacaccacagctgctgccatcaactggagcctgtacctgctgggcagcaaccctgaggtgcagaagaaggtggaccacgagctggatgatgtgtttgggaagagtgacaggcctgccaccgtggaggacctgaagaagctgcgctacctggagtgtgtgatcaaggagaccctgcggctcttccccagcgtgcccctgtttgcccggtctgtgtctgaggactgtgaggtggccggctacagagtgctgaagggcacagaagctgtgatcatcccctatgccctgcaccgggacccccgctacttccccaaccctgaggagttccagcctgagcgcttcttcccagaaaatgcccagggccgccacccctatgcctacgtgcccttctctgctggccccaggaactgcatcggccagaagtttgctgtgatggaggagaagaccatcctgagctgcatcctgcggcacttctggattgagagcaaccagaagcgggaggagctgggcctggagggccagctgatcctgcggcccagcaatggcatctggatcaagctgaagagaagaaatgctgatgaaagatag

SEQ ID NO: 149134 - DNA, 1578 bp, synthetic construct
  misc_feature 1..1578: note = Description of Artificial Sequence: Synthetic coding sequence
  source 1..1578: mol_type = other DNA
atggccggcctgtggctgggcctggtgtggcagaagctgctgctgtggggcgccgccagcgccctgagcctggccggggccagcctggtgctgagcctgctgcagagggtggccagctatgccaggaagtggcagcagatgaggcccatccccaccgtggcccgggcctaccccctggtgggccacgccctgctgatgaagccagatggccgggagttcttccagcagatcatcgagtacacagaggagtaccgccacatgcccctgctgaagctgtgggtgggccctgtgcccatggtggccctgtacaatgcagaaaatgtggaggtgatcctgaccagcagcaagcagattgacaagagctccatgtacaagttcctggagccctggctgggcctgggcctgctgaccagcactggaaacaagtggaggagcaggaggaagatgctgacccccaccttccacttcaccatcctggaggacttcctggacatcatgaatgagcaggccaacatcctggtgaagaagctggagaagcacatcaaccaggaggccttcaactgcttcttctacatcaccctgtgtgccctggacatcatctgtgaaacagccatgggcaagaacattggagcccagagcaatgatgattctgaatatgtgcgggctgtgtacaggatgtctgagatgatcttccgccgcatcaagatgccctggctgtggctggacctgtggtacctgatgttcaaggagggctgggagcacaagaagagcctgcagatcctgcacaccttcaccaacagcgtgattgctgagcgggccaatgagatgaatgccaatgaagactgcagaggagatggccggggcagcgcccccagcaagaacaagaggcgggccttcctggacctgctgctgtctgtgacagatgatgagggcaaccggctgagccatgaggacatccgggaggaggtggacaccttcatgtttgagggccatgacaccacagctgctgccatcaactggagcctgtacctgctgggcagcaaccctgaggtgcagaagaaggtggaccacgagctggatgatgtgtttgggaagagtgacaggcctgccaccgtggaggacctgaagaagctgcgctacctggagtgtgtgatcaaggagaccctgcggctcttccccagcgtgcccctgtttgcccggtctgtgtctgaggactgtgaggtggccggctacagagtgctgaagggcacagaagctgtgatcatcccctatgccctgcaccgggacccccgctacttccccaaccctgaggagttccagcctgagcgcttcttcccagaaaatgcccagggccgccacccctatgcctacgtgcccttctctgctggccccaggaactgcatcggccagaagtttgctgtgatggaggagaagaccatcctgagctgcatcctgcggcacttctggattgagagcaaccagaagcgggaggagctgggcctggagggccagctgatcctgcggcccagcaatggcatctggatcaagctgaagagaagaaatgctgatgaaagatag

SEQ ID NO: 149135 - DNA, 1503 bp, synthetic construct
  misc_feature 1..1503: note = Description of Artificial Sequence: Synthetic coding sequence
  source 1..1503: mol_type = other DNA
atgagccctggcctgctgctgctgggcagcgctgtgctgctggccttcggcctgtgctgcacctttgtgcaccgggcccggagccgctatgagcacatccctggccccccccggcccagcttcctgctgggccacctgccctgcttctggaagaaggatgaggtgggcggccgggtgctgcaggatgtgttcctggactgggccaagaagtatggccctgtggtgcgggtgaatgtgttccacaagaccagcgtcatcgtgaccagccctgagagcgtgaagaagttcctgatgagcaccaagtacaacaaggacagcaagatgtaccgggccctgcagacagtgtttggagagcggctgtttggccagggcctggtgtctgagtgcaactatgagcgctggcacaagcagaggagagtgattgacctggccttcagccgcagcagcctggtgtccctgatggagaccttcaatgagaaggccgagcagctggtggagatcctggaggccaaggcagatggccagacccctgtgtccatgcaggacatgctgacctacacagccatggacatcctggccaaggccgccttcggcatggagacctccatgctgctgggcgcccagaagcccctgagccaggccgtgaagctgatgctggagggcatcacagccagcaggaacaccctggccaagttcctgcccgggaagaggaagcagctgcgggaggtgcgggagagcatccgcttcctgcggcaggtgggccgggactgggtgcagaggagaagagaggccctgaagagaggagaggaggtgcctgctgacatcctgacccagatcctgaaggccgaggagggcgcccaggatgatgagggcctgctggacaactttgtgaccttcttcatcgccggccacgagaccagcgccaaccacctggccttcaccgtgatggagctgagccggcagcctgagatcgtggcccggctgcaggccgaggtggatgaagtcatcggcagcaagcgctacctggactttgaggacctgggccgcctgcagtacctgagccaggtgctgaaggagagcctgcggctgtaccccccagcctggggcaccttccggctgctggaggaggagaccctgattgatggagtgcgggtgcccggcaacacccccctgctcttcagcacctacgtgatgggccgcatggacacctactttgaggaccccctgaccttcaacccagaccgcttcggccctggggcccccaagccccgcttcacctacttccccttcagcctgggccacaggagctgcatcggccagcagtttgcccagatggaggtgaaggtggtgatggccaagctgctgcagaggctggagttccggctggtgcccggccagcgcttcggcctgcaggagcaggccaccctgaagcccctggaccctgtgctgtgcaccctgcggccccggggctggcagcctgcccctcctcctccaccctgctag

SEQ ID NO: 149136 - DNA, 1212 bp, synthetic construct
  misc_feature 1..1212: note = Description of Artificial Sequence: Synthetic coding sequence
  source 1..1212: mol_type = other DNA
atgagcaccaagtacaacaaggacagcaagatgtaccgggccctgcagacagtgtttggagagcggctgtttggccagggcctggtgtctgagtgcaactatgagcgctggcacaagcagaggagggtcatcgacctggccttcagccgcagcagcctggtgtccctgatggagaccttcaatgagaaggccgagcagctggtggagatcctggaggccaaggcagatggccagacccctgtgtccatgcaggacatgctgacctacacagccatggacatcctggccaaggccgccttcggcatggagacctccatgctgctgggcgcccagaagcccctgagccaggccgtgaagctgatgctggagggcatcacagccagcaggaacaccctggccaagttcctgcccgggaagaggaagcagctgcgggaggtgcgggagagcatccgcttcctgcggcaggtgggccgggactgggtgcagaggcggcgggaggccctgaagagaggagaggaggtgcctgctgacatcctgacccagatcctgaaggccgaggagggcgcccaggatgatgagggcctgctggacaactttgtgaccttcttcatcgccggccacgagaccagcgccaaccacctggccttcaccgtgatggagctgagccggcagcctgagatcgtggcccggctgcaggccgaggtggatgaggtgattggcagcaagcgctacctggactttgaggacctgggccgcctgcagtacctgagccaggtgctgaaggagagcctgcggctgtaccccccagcctggggcaccttccggctgctggaggaggagaccctgattgatggagtgcgggtgcccggcaacacccccctgctcttcagcacctacgtgatgggccgcatggacacctactttgaggaccccctgaccttcaacccagacagatttggacctggggcccccaagccccgcttcacctacttccccttcagcctgggccacaggagctgcatcggccagcagtttgcccagatggaggtgaaggtggtgatggccaagctgctgcagaggctggagttccggctggtgcccggccagagatttggcctgcaggagcaggccaccctgaagcccctggaccctgtgctgtgcaccctgcggccccggggctggcagcctgcccctcctcctccaccctgctag

SEQ ID NO: 149137 - DNA, 1530 bp, synthetic construct
  misc_feature 1..1530: note = Description of Artificial Sequence: Synthetic coding sequence
  source 1..1530: mol_type = other DNA
atggctgctgctgctggcatgctgctgctgggcctgctgcaggccggcggctctgtgctgggccaggccatggagaaggtgactggaggcaacctgctgtccatgctgctgattgcctgtgccttcaccctgagcctggtgtacctgatccggctggccgccggccacctggtgcagctgcctgctggggtgaagagccccccctacatcttcagccccatccccttcctgggccacgccatcgccttcggcaagagccccatcgagttcctggagaatgcctatgagaagtatggccctgtgttctccttcaccatggtgggcaagaccttcacctacctgctgggcagtgatgctgctgccctgctcttcaacagcaagaatgaagacctgaatgcagaagatgtgtacagccggctgaccacccctgtgtttggaaaaggagtggcctatgatgtgcccaaccctgtgttcctggagcagaagaagatgctgaagagcggcctgaacatcgcccacttcaagcagcacgtgtccatcatcgagaaggagaccaaggagtactttgagagctggggcgagagcggggagaagaatgtgtttgaggccctgtctgagctgatcatcctgacagccagccactgcctgcacggcaaggagatccgcagccagctgaatgagaaggtggcccagctgtatgctgacctggatggcggcttcagccatgctgcctggctgctgcccggctggctgcccctgcccagcttcagaagaagagaccgggcccaccgggagatcaaggacatcttctacaaggccatccagaagaggcggcagagccaggagaagattgatgacatcctgcagaccctgctggatgccacctacaaggatggccggcccctgacagatgatgaggtggccggcatgctgattggcctgctgctggccggccagcacaccagcagcaccaccagcgcctggatgggcttcttcctggcccgggacaagaccctgcagaagaagtgctacctggagcagaagacagtgtgtggggagaacctgccccccctgacctatgaccagctgaaggacctgaacctgctggaccgctgcatcaaggagaccctgcggctgcggccccccatcatgatcatgatgaggatggcccggaccccccagacagtggccggctacaccatccccccaggccaccaggtgtgtgtgagccccaccgtgaaccagaggctgaaggacagctgggtggagcggctggacttcaacccagaccgctacctgcaggacaacccagccagcggggagaagtttgcctacgtgccctttggagctggccgccaccgctgcatcggggagaactttgcctacgtgcagatcaagaccatctggagcaccatgctgcggctgtatgaatttgacctgattgatggctacttccccaccgtgaactacaccaccatgatccacaccccagagaaccctgtgatccgctacaagaggaggagcaagtag

SEQ ID NO: 149138 - DNA, 1215 bp, synthetic construct
  misc_feature 1..1215: note = Description of Artificial Sequence: Synthetic coding sequence
  source 1..1215: mol_type = other DNA
atggtgggcaagaccttcacctacctgctgggcagtgatgctgctgccctgctcttcaacagcaagaatgaagacctgaatgcagaagatgtgtacagccggctgaccacccctgtgtttgggaagggcgtggcctatgatgtgcccaaccctgtgttcctggagcagaagaagatgctgaagagcggcctgaacatcgcccacttcaagcagcacgtgtccatcatcgagaaggagaccaaggagtactttgagagctggggcgagagcggggagaagaatgtgtttgaggccctgtctgagctgatcatcctgacagccagccactgcctgcacggcaaggagatccgcagccagctgaatgagaaggtggcccagctgtatgctgacctggatggcggcttcagccacgccgcctggctgctgcccggctggctgcccctgcccagcttcagaagaagagaccgggcccaccgggagatcaaggacatcttctacaaggccatccagaagaggcggcagagccaggagaagattgatgacatcctgcagaccctgctggatgccacctacaaggatggccggcccctgacagatgatgaggtggccggcatgctgattggcctgctgctggccggccagcacaccagcagcaccaccagcgcctggatgggcttcttcctggcccgggacaagaccctgcagaagaagtgctacctggagcagaagacagtgtgtggggagaacctgccccccctgacctatgaccagctgaaggacctgaacctgctggaccgctgcatcaaggagaccctgcggctgcggccccccatcatgatcatgatgaggatggcccggaccccccagacagtggccggctacaccatccccccaggccaccaggtgtgtgtgagccccaccgtgaaccagaggctgaaggacagctgggtggagcggctggacttcaacccagaccgctacctgcaggacaacccagccagcggggagaagtttgcctacgtgccctttggagctggccgccaccgctgcattggagaaaattttgcctacgtgcagatcaagaccatctggagcaccatgctgcggctgtatgaatttgacctgattgatggctacttccccaccgtgaactacaccaccatgatccacaccccagaaaatcctgtgatccgctacaagagaagaagcaagtag

SEQ ID NO: 149139 - DNA, 1350 bp, synthetic construct
  misc_feature 1..1350: note = Description of Artificial Sequence: Synthetic coding sequence
  source 1..1350: mol_type = other DNA
atgaagcatgagaagagccccccctacatcttcagccccatccccttcctgggccacgccatcgccttcggcaagagccccatcgagttcctggagaatgcctatgagaagtatggccctgtgttctccttcaccatggtgggcaagaccttcacctacctgctgggcagtgatgctgctgccctgctcttcaacagcaagaatgaagacctgaatgcagaagatgtgtacagccggctgaccacccctgtgtttggaaaaggagtggcctatgatgtgcccaaccctgtgttcctggagcagaagaagatgctgaagagcggcctgaacatcgcccacttcaagcagcacgtgtccatcatcgagaaggagaccaaggagtactttgagagctggggcgagagcggggagaagaatgtgtttgaggccctgtctgagctgatcatcctgacagccagccactgcctgcacggcaaggagatccgcagccagctgaatgagaaggtggcccagctgtatgctgacctggatggcggcttcagccatgctgcctggctgctgcccggctggctgcccctgcccagcttcagaagaagagaccgggcccaccgggagatcaaggacatcttctacaaggccatccagaagaggcggcagagccaggagaagattgatgacatcctgcagaccctgctggatgccacctacaaggatggccggcccctgacagatgatgaggtggccggcatgctgattggcctgctgctggccggccagcacaccagcagcaccaccagcgcctggatgggcttcttcctggcccgggacaagaccctgcagaagaagtgctacctggagcagaagacagtgtgtggggagaacctgccccccctgacctatgaccagctgaaggacctgaacctgctggaccgctgcatcaaggagaccctgcggctgcggccccccatcatgatcatgatgaggatggcccggaccccccagacagtggccggctacaccatccccccaggccaccaggtgtgtgtgagccccaccgtgaaccagaggctgaaggacagctgggtggagcggctggacttcaacccagaccgctacctgcaggacaacccagccagcggggagaagtttgcctacgtgccctttggagctggccgccaccgctgcatcggggagaactttgcctacgtgcagatcaagaccatctggagcaccatgctgcggctgtatgaatttgacctgattgatggctacttccccaccgtgaactacaccaccatgatccacaccccagagaaccctgtgatccgctacaagaggaggagcaagtag

SEQ ID NO: 149140 - DNA, 1515 bp, synthetic construct
  misc_feature 1..1515: note = Description of Artificial Sequence: Synthetic coding sequence
  source 1..1515: mol_type = other DNA
atgatgaccaccagcctcatctggggcatcgccatcgccgcctgctgctgcctgtggctgatcctgggcatcagaagacggcagacaggagagccccccctggagaatggcctcatcccctacctgggctgtgccctgcagtttggagccaaccccctggagttcctgcgggccaaccagaggaagcacggccacgtgttcacctgcaagctgatgggcaagtatgtgcacttcatcaccaaccccctgagctaccacaaggtgctgtgccacggcaagtactttgactggaagaagttccactttgccaccagcgccaaggccttcggccacaggagcattgaccccatggatggcaacaccacagagaacatcaatgacaccttcatcaagaccctgcagggccacgccctgaacagcctgacagagagcatgatggagaacctgcagaggatcatgaggcctcctgtgagcagcaacagcaagacagctgcctgggtgacagagggcatgtacagcttctgctacagagtgatgtttgaggccggctacctgaccatcttcggccgggacctgacccggcgggacacccagaaggcccacatcctgaacaacctggacaacttcaagcagtttgacaaggtgtttcctgccctggtggccggcctgcccatccacatgttcagaacagcccacaatgcccgggagaagctggccgagagcctgcggcatgagaacctgcagaagcgggagagcatcagcgagctgatcagcctgaggatgttcctgaatgacaccctgagcacctttgatgacctggagaaggccaagacccacctggtggtgctgtgggccagccaggccaacaccatcccagccaccttctggagcctcttccagatgatcagaaatcctgaggccatgaaggccgccacagaggaggtgaagaggaccctggagaatgccggccagaaggtgtccctggagggcaaccccatctgcctgagccaggccgagctgaatgacctgcctgtgctggacagcatcatcaaggagagcctgcggctgagcagcgccagcctgaacatcagaacagccaaggaggacttcaccctgcacctggaggatggcagctacaacatcaggaaggatgacatcatcgccctgtacccccagctgatgcacctggaccctgagatctacccagaccccctgaccttcaagtatgaccgctacctggatgaaaatggcaagaccaagaccaccttctactgcaatggcctgaagctgaagtactactacatgccctttggaagtggggccaccatctgccccggccgcctgtttgccatccacgagatcaagcagttcctgatcctgatgctgagctactttgagctggagctgattgagggccaggccaagtgcccccccctggaccagagccgggccggcctgggcatcctgccccccctgaatgacatcgagttcaagtacaagttcaagcacctgtag

SEQ ID NO: 149141 - DNA, 1521 bp, synthetic construct
  misc_feature 1..1521: note = Description of Artificial Sequence: Synthetic coding sequence
  source 1..1521: mol_type = other DNA
atggccggggaggtgtctgctgccaccggccgcttcagcctggagcggctgggcctgcccggcctggccctggccgccgccctgctgctgctggccctgtgcctgctggtgcggaggaccaggaggcctggagagcccccactcatcaagggctggctgccctacctgggcgtggtgctgaacctgaggaaggaccccctgcgcttcatgaagaccctgcagaagcagcacggggacaccttcaccgtgctgctgggcggcaagtacatcaccttcatcctggaccccttccagtaccagctggtgatcaagaaccacaagcagctgtccttccgggtcttcagcaacaagctgctggagaaggccttcagcatcagccagctgcagaagaaccacgacatgaatgatgagctgcacctgtgctaccagttcctgcagggcaagagcctggacatcctgctggagagcatgatgcagaacctgaagcaggtgtttgagccccagctgctgaagaccacctcctgggacacagctgagctgtaccccttctgcagcagcatcatctttgagatcaccttcaccaccatctacggcaaggtgattgtgtgtgacaacaacaagttcatcagcgagctgagagatgacttcctgaagtttgatgacaagtttgcctacctggtgagcaacatccccatcgagctgctgggcaatgtgaagagcatccgggagaagatcatcaagtgcttcagcagcgagaagctggccaagatgcagggctggagcgaggtgttccagagccggcaggatgtgctggagaagtactacgtgcatgaggacctggagatcggggcccaccacctgggcttcctgtgggcctctgtggccaacaccatccccaccatgttctgggccatgtactacctgctgcggcaccctgaggccatggctgctgtgagagatgaaattgaccggctgctgcagagcacaggccagaagaagggcagcggcttccccatccacctgacccgggagcagctggacagcctcatctgcctggagagcagcatctttgaggccctgcggctgagcagctacagcaccaccatccgctttgtggaggaggacctgaccctgagcagcgagaccggggactactgtgtgaggaaaggagacctggtggccatcttcccccctgtgctgcatggagaccctgagatctttgaggcccctgaggagttccgctatgaccgcttcattgaagatggcaagaagaagaccaccttcttcaagaggggcaagaagctgaagtgctacctgatgcccttcggcaccggcaccagcaagtgccccggccgcttctttgccctgatggagatcaagcagctgctggtgatcctgctgacctactttgacctggagatcattgatgacaagcccatcggcctgaactacagccggctgctgtttggcatccagtacccagacagtgatgtgctcttccgctacaaggtgaagagctag

SEQ ID NO: 149142 - DNA, 1506 bp, synthetic construct
  misc_feature 1..1506: note = Description of Artificial Sequence: Synthetic coding sequence
  source 1..1506: mol_type = other DNA
atggtgctgtggggccctgtgctgggcgccctgctggtggtgattgctggctacctgtgcctgcccggcatgctgcggcagaggcggccctgggagccccccctggacaagggcaccgtgccctggctgggccacgccatggccttcaggaagaacatgtttgagttcctgaagaggatgaggaccaagcatggagatgtgttcaccgtgcagctgggcggccagtacttcacctttgtgatggaccccctgagctttggcagcatcctgaaggacacccagaggaagctggactttggccagtatgccaagaagctggtgctgaaggtgtttggctacagatctgtgcagggcgaccacgagatgatccacagcgccagcaccaagcacctgcggggagatggcctgaaggacctgaatgagaccatgctggacagcctgagctttgtgatgctgaccagcaagggctggagcctggatgccagctgctggcatgaggacagcctcttccgcttctgctactacatcctcttcaccgctggctacctgagcctgtttggctacaccaaggacaaggagcaggacctgctgcaggccggggagctgttcatggagttcaggaagtttgacctgctcttccccaggtttgtgtacagcctgctgtggccccgggagtggctggaggtgggccgcctgcagaggctcttccacaagatgctgtctgtgagccacagccaggagaaggagggcatcagcaactggctgggcaacatgctgcagttcctgcgggagcagggcgtgcccagcgccatgcaggacaagttcaacttcatgatgctgtgggccagccagggcaacacaggccccaccagcttctgggccctgctgtacctgctgaagcaccctgaggccatccgggctgtgcgggaggaggccacccaggtgctgggggaggcccggctggagaccaagcagagctttgccttcaagctgggcgccctgcagcacacccctgtgctggacagcgtggtggaggagaccctgcggctgcgggccgcccccaccctgctgcggctggtgcatgaggactacaccctgaagatgagcagcggccaggagtacctgttccgccacggggacatcctggccctcttcccctacctgtctgtgcacatggaccctgacatccaccctgagcccaccgtcttcaagtatgaccgcttcctgaaccccaacggcagcaggaaggtggacttcttcaagacaggcaagaagatccaccactacaccatgccctggggcagcggcgtgtccatctgccccggccgcttctttgccctgtctgaggtgaagctgttcatcctgctgatggtgacccactttgacctggagctggtggaccctgacacccccctgccccacgtggacccccagcgctggggcttcggcaccatgcagcccagccatgatgtgcgcttccgctaccgcctgcaccccacagaatag

SEQ ID NO: 149143 - DNA, 573 bp, synthetic construct
  misc_feature 1..573: note = Description of Artificial Sequence: Synthetic coding sequence
  source 1..573: mol_type = other DNA
atggagaaggtgcctggagagatggagattgaaagaagagagaggtctgaggagctgtctgaggccgagaggaaggctgtgcaggccatgtgggcccggctgtatgccaactgtgaagatgtgggcgtggccatcctggtgcgcttctttgtgaacttccccagcgccaagcagtacttcagccagttcaagcacatggaggaccccctggagatggagaggagcccccagctgaggaagcacgcctgccgggtgatgggcgccctgaacacagtggtggagaacctgcatgaccctgacaaggtgtcctctgtgctggccctggtgggcaaggcccacgccctgaagcacaaggtggagcctgtgtacttcaagatcctgagcggggtcatcctggaggtggtggccgaggagtttgccagtgacttccccccagagacccagagggcctgggccaagctgcggggcctcatctacagccacgtgacagctgcctacaaggaggtgggctgggtgcagcaggtgcccaatgccaccaccccaccagccaccctgcccagcagcggcccctag

SEQ ID NO: 149144 - DNA, 1194 bp, synthetic construct
  misc_feature 1..1194: note = Description of Artificial Sequence: Synthetic coding sequence
  source 1..1194: mol_type = other DNA
atggaggaggatgacagctatgtgcccagcgacctgacagctgaggagcggcaggagctggagaacatcagaagaaggaagcaggagctgctggccgacatccagaggctgaaggatgaaattgctgaggtggccaatgaaattgagaacctgggcagcacagaggagaggaagaacatgcagaggaacaagcaggtggccatgggcaggaagaagttcaacatggaccccaagaagggcatccagttcctgattgaaaatgacctgctgaagaacacctgtgaagatattgcccagttcctgtacaagggggagggcctgaacaagacagccatcggggactacctgggggagagagatgagttcaacatccaggtgctgcacgcctttgtggagctgcacgagttcacagacctgaacctggtgcaggccctgcggcagttcctgtggagcttccggctgcctggagaggcccagaagattgacaggatgatggaggcctttgcccagcgctactgccagtgcaacaatggagtcttccagagcacagacacctgctacgtgctgagctttgccatcatcatgctgaacaccagcctgcacaaccccaacgtgaaggacaagcccaccgtggagcgcttcatcgccatgaacagaggcatcaatgatggaggagacctgcctgaggagctgctgaggaacctgtatgagagcatcaagaatgagcccttcaagatcccagaagatgatggaaatgacctgacccacaccttcttcaacccagaccgggagggctggctgctgaagctgggcggccgggtgaagacctggaagaggcgctggttcatcctgacagacaactgcctgtactactttgagtacaccacagacaaggagccccggggcatcatccccctggagaacctgagcatccgggaggtggaggacagcaagaagcccaactgctttgagctgtacatcccagacaacaaggaccaggtgatcaaggcctgcaagacagaagcagatggccgggtggtggagggcaaccacacagtgtaccgcatcagcgcccccaccccagaggagaaggaggagtggatcaagtgcatcaaggccgccatcagccgggaccccttctatgagatgctggccgccaggaagaagaaggtgagcagcaccaagaggcactag

SEQ ID NO: 149145 - DNA, 1197 bp, synthetic construct
  misc_feature 1..1197: note = Description of Artificial Sequence: Synthetic coding sequence
  source 1..1197: mol_type = other DNA
atggaggaggatgacagctatgtgcccagcgacctgacagctgaggagcggcaggagctggagaacatcagaagaaggaagcaggagctgctggccgacatccagaggctgaaggatgaaattgctgaggtggccaatgaaattgagaacctgggcagcacagaggagaggaagaacatgcagaggaacaagcaggtggccatgggcaggaagaagttcaacatggaccccaagaagggcatccagttcctgattgaaaatgacctgctgaagaacacctgtgaagatattgcccagttcctgtacaagggggagggcctgaacaagacagccatcggggactacctgggggagagagatgagttcaacatccaggtgctgcacgcctttgtggagctgcacgagttcacagacctgaacctggtgcaggccctgcggcagttcctgtggagcttccggctgcctggagaggcccagaagattgacaggatgatggaggcctttgcccagcgctactgccagtgcaacaatggagtcttccagagcacagacacctgctacgtgctgagctttgccatcatcatgctgaacaccagcctgcacaaccccaacgtgaaggacaagcccaccgtggagcgcttcatcgccatgaacagaggcatcaatgatggaggagacctgcctgaggagctgctgaggaacctgtatgagagcatcaagaatgagcccttcaagatcccagaagatgatggaaatgacctgacccacaccttcttcaacccagaccgggagggctggctgctgaagctgggcggcggccgggtgaagacctggaagaggcgctggttcatcctgacagacaactgcctgtactactttgagtacaccacagacaaggagccccggggcatcatccccctggagaacctgagcatccgggaggtggaggacagcaagaagcccaactgctttgagctgtacatcccagacaacaaggaccaggtgatcaaggcctgcaagacagaagcagatggccgggtggtggagggcaaccacacagtgtaccgcatcagcgcccccaccccagaggagaaggaggagtggatcaagtgcatcaaggccgccatcagccgggaccccttctatgagatgctggccgccaggaagaagaaggtgagcagcaccaagaggcactag

SEQ ID NO: 149146 - DNA, 657 bp, synthetic construct
  misc_feature 1..657: note = Description of Artificial Sequence: Synthetic coding sequence
  source 1..657: mol_type = other DNA
atgatggaggcctttgcccagcgctactgccagtgcaacaacggggtcttccagagcacagacacctgctacgtgctgagctttgccatcatcatgctgaacaccagcctgcacaaccccaacgtgaaggacaagcccaccgtggagcgcttcatcgccatgaacagaggcatcaatgatggaggagacctgcctgaggagctgctgaggaacctgtatgagagcatcaagaatgagcccttcaagatcccagaagatgatggaaatgacctgacccacaccttcttcaacccagaccgggagggctggctgctgaagctggccggcggccgggtgaagacctggaagaggcgctggttcatcctgacagacaactgcctgtactactttgagtacaccacagacaaggagccccggggcatcatccccctggagaacctgagcatccgggaggtggaggacagcaagaagcccaactgctttgagctgtacatcccagacaacaaggaccaggtgatcaaggcctgcaagacagaagcagatggccgggtggtggagggcaaccacacagtgtaccgcatcagcgcccccaccccagaggagaaggaggagtggatcaagtgcatcaagttccaggtgtccccaggagagccctag

SEQ ID NO: 149147 - DNA, 1197 bp, synthetic construct; identical to SEQ ID NO: 149145
  misc_feature 1..1197: note = Description of Artificial Sequence: Synthetic coding sequence
  source 1..1197: mol_type = other DNA

SEQ ID NO: 149148 - DNA, 1020 bp, synthetic construct
  misc_feature 1..1020: note = Description of Artificial Sequence: Synthetic coding sequence
  source 1..1020: mol_type = other DNA
atgcagaggaacaagcaggtggccatgggcaggaagaagttcaacatggaccccaagaagggcatccagttcctgattgaaaatgacctgctgaagaacacctgtgaggacatcgcccagttcctgtacaagggggagggcctgaacaagacagccatcggggactacctgggggagagagatgagttcaacatccaggtgctgcacgcctttgtggagctgcacgagttcacagacctgaacctggtgcaggccctgcggcagttcctgtggagcttccggctgcccggggaggcccagaagattgacaggatgatggaggcctttgcccagcgctactgccagtgcaacaacggggtcttccagagcacagacacctgctacgtgctgagctttgccatcatcatgctgaacaccagcctgcacaaccccaacgtgaaggacaagcccaccgtggagcgcttcatcgccatgaacagaggcatcaatgatggaggagacctgcctgaggagctgctgaggaacctgtatgagagcatcaagaatgagcccttcaagatcccagaagatgatggaaatgacctgacccacaccttcttcaacccagaccgggagggctggctgctgaagctgggcggcggccgggtgaagacctggaagaggcgctggttcatcctgacagacaactgcctgtactactttgagtacaccacagacaaggagccccggggcatcatccccctggagaacctgagcatccgggaggtggaggacagcaagaagcccaactgctttgagctgtacatcccagacaacaaggaccaggtgatcaaggcctgcaagacagaagcagatggccgggtggtggagggcaaccacacagtgtaccgcatcagcgcccccaccccagaggagaaggaggagtggatcaagtgcatcaaggccgccatcagccgggaccccttctatgagatgctggccgccaggaagaagaaggtgagcagcaccaagaggcactag

SEQ ID NO: 149149 - DNA, 1020 bp, synthetic construct; identical to SEQ ID NO: 149148
  misc_feature 1..1020: note = Description of Artificial Sequence: Synthetic coding sequence
  source 1..1020: mol_type = other DNA

SEQ ID NO: 149150 - DNA, 1080 bp, synthetic construct
  misc_feature 1..1080: note = Description of Artificial Sequence: Synthetic coding sequence
  source 1..1080: mol_type = other DNA
atgagcctgcagaggctgctgcagcacagcagcaatggaaacctggccgacttctgtgccggccctgcctacagcagctacagcaccctgaccggcagcctgaccatggatgacaacagacgcatccagatgctggccgacacagtggccaccctgccccggggcaggaagcagctggccctgaccaggagcagcagcctgagtgacttctcctggagccagaggaagctggtgacagtggagaagcaggacaatgagaccttcggctttgagatccagagctaccggccccagaaccagaatgcctgcagcagcgagatgttcaccctcatctgcaagatccaggaggacagccctgcccactgtgccggcctgcaggccggagatgtgctggccaacatcaatggagtgtccacagagggcttcacctacaagcaggtggtggacctgatccgcagcagcggcaacctgctgaccatcgagaccctgaatggcaccatgatcctgaagaggacagagctggaggccaagctgcaggtgctgaagcagaccctgaagcagaagtgggtggagtaccgcagcctgcagctgcaggagcaccggctgctgcatggagatgctgccaactgccccagcctggagaacatggacctggatgagctgagcctgtttggccccctgcccggccctggccctgccctggtggacaggaaccggctgagcagcgagagcagctgcaagtcctggctgagctccatgaccatggattctgaagatggctaccagacctgtgtgtctgaggacagcagcagaggagccttcagccggcagaccagcacagatgatgagtgcttcatccccaaggagggagatgacttcctgcggcgcagcagcagcagaagaaacagaagcatcagcaacaccagcagcggctccatgagccccctgtgggagggcaacctgagctccatgtttggcaccctgcccaggaagagcaggaagggctctgtgaggaagcagctgctgaagttcatccctggcctgcacagagctgtggaggaggaggagagccgcttctag

SEQ ID NO: 149151 - DNA, 762 bp, synthetic construct
  misc_feature 1..762: note = Description of Artificial Sequence: Synthetic coding sequence
  source 1..762: mol_type = other DNA
atgttcaccctcatctgcaagatccaggaggacagccctgcccactgtgccggcctgcaggccggagatgtgctggccaacatcaatggagtgtccacagagggcttcacctacaagcaggtggtggacctgatccgcagcagcggcaacctgctgaccatcgagaccctgaatggcaccatgatcctgaagaggacagagctggaggccaagctgcaggtgctgaagcagaccctgaagcagaagtgggtggagtaccgcagcctgcagctgcaggagcaccggctgctgcatggagatgctgccaactgccccagcctggagaacatggacctggatgagctgagcctgtttggccccctgcccggccctggccctgccctggtggacaggaaccggctgagcagcgagagcagctgcaagtcctggctgagctccatgaccatggattctgaagatggctaccagacctgtgtgtctgaggacagcagcagaggagccttcagccggcagaccagcacagatgatgagtgcttcatccccaaggagggagatgacttcctgcggcgcagcagcagcagaagaaacagaagcatcagcaacaccagcagcggctccatgagccccctgtgggagggcaacctgagctccatgtttggcaccctgcccaggaagagcaggaagggctctgtgaggaagcagctgctgaagttcatccctggcctgcacagagctgtggaggaggaggagagccgcttctag

SEQ ID NO: 149152 - DNA, 1203 bp, synthetic construct
  misc_feature 1..1203: note = Description of Artificial Sequence: Synthetic coding sequence
  source 1..1203: mol_type = other DNA
atggaggatggagtgtatgagcccccagacctgaccccagaggagaggatggagctggagaacatcagaagaaggaagcaggagctgctggtggagatccagaggctgcgggaggagctgtctgaggccatgtctgaggtggagggcctggaggccaatgaaggcagcaagaccctgcagaggaacaggaagatggccatgggcaggaagaagttcaacatggaccccaagaagggcatccagttcctggtggagaatgagctgctgcagaacaccccagaggagatcgcccgcttcctgtacaagggggagggcctgaacaagacagccatcggggactacctgggggagcgggaggagctgaacctggccgtgctgcacgcctttgtggacctgcacgagttcacagacctgaacctggtgcaggccctgcggcagttcctgtggagcttccggctgcccggggaggcccagaagattgacaggatgatggaggcctttgcccagcgctactgcctgtgcaaccctggggtcttccagagcacagacacctgctacgtgctgagctttgctgtgatcatgctgaacaccagcctgcacaaccccaacgtgcgggacaagccaggcctggagagatttgtggccatgaacagaggcatcaatgaaggaggagacctgcctgaggagctgctgaggaacctgtatgacagcatcagaaatgagcccttcaagatcccagaagatgatggaaatgacctgacccacaccttcttcaacccagaccgggagggctggctgctgaagctggccggcggccgggtgaagacctggaagaggcgctggttcatcctgacagacaactgcctgtactactttgagtacaccacagacaaggagccccggggcatcatccccctggagaacctgagcatccgggaggtggatgaccccaggaagcccaactgctttgagctgtacatccccaacaacaagggccagctgatcaaggcctgcaagacagaagcagatggccgggtggtggagggcaaccacatggtgtaccgcatcagcgcccccacccaggaggagaaggatgagtggatcaagagcatccaggccgctgtgtctgtggaccccttctatgagatgctggccgccaggaagaagaggatctctgtgaagaagaagcaggagcagccctag

SEQ ID NO: 149153 - DNA, 1200 bp, synthetic construct
  misc_feature 1..1200: note = Description of Artificial Sequence: Synthetic coding sequence
  source 1..1200: mol_type = other DNA
atggaggatggagtgtatgagcccccagacctgaccccagaggagaggatggagctggagaacatcagaagaaggaagcaggagctgctggtggagatccagaggctgcgggaggagctgtctgaggccatgtctgaggtggagggcctggaggccaatgaaggcagcaagaccctgcagaggaacaggaagatggccatgggcaggaagaagttcaacatggaccccaagaagggcatccagttcctggtggagaatgagctgctgcagaacaccccagaggagatcgcccgcttcctgtacaagggggagggcctgaacaagacagccatcggggactacctgggggagcgggaggagctgaacctggccgtgctgcacgcctttgtggacctgcacgagttcacagacctgaacctggtgcaggccctgcggcagttcctgtggagcttccggctgcccggggaggcccagaagattgacaggatgatggaggcctttgcccagcgctactgcctgtgcaaccctggggtcttccagagcacagacacctgctacgtgctgagctttgctgtgatcatgctgaacaccagcctgcacaaccccaacgtgcgggacaagccaggcctggagagatttgtggccatgaacagaggcatcaatgaaggaggagacctgcctgaggagctgctgaggaacctgtatgacagcatcagaaatgagcccttcaagatcccagaagatgatggaaatgacctgacccacaccttcttcaacccagaccgggagggctggctgctgaagctgggcggccgggtgaagacctggaagaggcgctggttcatcctgacagacaactgcctgtactactttgagtacaccacagacaaggagccccggggcatcatccccctggagaacctgagcatccgggaggtggatgaccccaggaagcccaactgctttgagctgtacatccccaacaacaagggccagctgatcaaggcctgcaagacagaagcagatggccgggtggtggagggcaaccacatggtgtaccgcatcagcgcccccacccaggaggagaaggatgagtggatcaagagcatccaggccgctgtgtctgtggaccccttctatgagatgctggccgccaggaagaagaggatctctgtgaagaagaagcaggagcagccctag

SEQ ID NO: 149154 - DNA, 1200 bp, synthetic construct
  misc_feature 1..1200: note = Description of Artificial Sequence: Synthetic coding sequence
  source 1..1200: mol_type = other DNA
atggatgaagatggcggcggggagggcggcggcgtgcctgaggacctgagcctggaggagcgggaggagctgctggacatcagaagaaggaagaaggagctgattgatgacatcgagcggctgaagtatgaaattgctgaggtgatgacagaaattgacaacctgacctctgtggaggagagcaagaccacccagaggaacaagcagatcgccatgggcaggaagaagttcaacatggaccccaagaagggcatccagttcctgattgaaaatgacctgctgcagagcagcccagaagatgtggcccagttcctgtacaagggggagggcctgaacaagacagtcatcggggactacctgggggagagagatgagttcaacatcaaggtgctgcaggcctttgtggagctgcacgagtttgctgacctgaacctggtgcaggccctgcggcagttcctgtggagcttccggctgcctggagaggcccagaagattgacaggatgatggaggcctttgccagccgctactgcctgtgcaaccctggggtcttccagagcacagacacctgctacgtgctgagctttgccatcatcatgctgaacaccagcctgcacaaccacaacgtgcgggacaagcccacagctgagcgcttcatcgccatgaacagaggcatcaatgaaggaggagacctgcctgaggagctgctgaggaacctgtatgagagcatcaagaatgagcccttcaagatcccagaagatgatggaaatgacctgacccacaccttcttcaacccagaccgggagggctggctgctgaagctgggcggccgggtgaagacctggaagaggcgctggttcatcctgacagacaactgcctgtactactttgagtacaccacagacaaggagccccggggcatcatccccctggagaacctgagcatccgggaggtggaggaccccaggaagcccaactgctttgagctgtacaaccccagccacaagggccaggtgatcaaggcctgcaagacagaagcagatggccgggtggtggagggcaaccacgtggtgtaccgcatcagcgcccccagccctgaggagaaggaggagtggatgaagagcatcaaggccagcatcagccgggaccccttctatgacatgctggccaccaggaagagaagaattgccaacaagaagtag

SEQ ID NO: 149155 - DNA, 945 bp, synthetic construct
  misc_feature 1..945: note = Description of Artificial Sequence: Synthetic coding sequence
  source 1..945: mol_type = other DNA
atggccctgccccagctgcagacagccatgctggccgccttcctgtgggaccccagagatgtggtgctgacagcccagcctggagctgagcagtgtgccgagagcagccagcacatccgcatcctgcagccccagttccgcctcatccggctgcgcttctggaagctgtacatccagaggagagtgcaggcctggcagttcctgtggagcttccggctgcccggggaggcccagaagattgacaggatgatggaggcctttgccagccgctactgcctgtgcaaccctggggtcttccagagcacagacacctgctacgtgctgagctttgccatcatcatgctgaacaccagcctgcacaaccacaacgtgcgggacaagcccacagctgagcgcttcatcgccatgaacagaggcatcaatgaaggaggagacctgcctgaggagctgctgaggaacctgtatgagagcatcaagaatgagcccttcaagatcccagaagatgatggaaatgacctgacccacaccttcttcaacccagaccgggagggctggctgctgaagctgggcggccgggtgaagacctggaagaggcgctggttcatcctgacagacaactgcctgtactactttgagtacaccacagacaaggagccccggggcatcatccccctggagaacctgagcatccgggaggtggaggaccccaggaagcccaactgctttgagctgtacaaccccagccacaagggccaggtgatcaaggcctgcaagacagaagcagatggccgggtggtggagggcaaccacgtggtgtaccgcatcagcgcccccagccctgaggagaaggaggagtggatgaagagcatcaaggccagcatcagccgggaccccttctatgacatgctggccaccaggaagaggcgcatcgccaacaagaagtag

SEQ ID NO: 149156 - DNA, 1185 bp, synthetic construct
  misc_feature 1..1185: note = Description of Artificial Sequence: Synthetic coding sequence
  source 1..1185: mol_type = other DNA
atggacctgtgccaccctgagcctgctgagctgagcagtggagaaacagaggagctgcagaggatcaagtggcacaggaagcagctgctggaggacatccagaagctgaaggatgaaattgctgatgtgtttgcccagattgactgctttgagagcgctgaggagagcaggatggcccagaaggagaaggagctgtgcattggaaggaagaagttcaacatggaccctgccaagggcatccagtacttcatcgagcacaagctgctgaccccagatgtgcaggacatcgcccgcttcctgtacaagggggagggcctgaacaagacagccatcggcacctacctgggggagcgggaccccatcaacctgcaggtgctgcaggcctttgtggactgccatgaatttgccaacctgaacctggtgcaggccctgcggcagttcctgtggagcttccggctgcccggggaggcccagaagattgacaggatgatggaggcctttgccacccgctactgcctgtgcaaccctggggtcttccagagcacagacacctgctacgtgctgtccttcagcatcatcatgctgaacaccagcctgcacaaccccaacgtgcgggaccggcccccatttgaaagatttgtgtccatgaacagaggcatcaacaacggcagtgacctgcctgaggaccagctgaggaacctgtttgacagcatcaagtctgagcccttcagcatcccagaagatgatggaaatgacctgacccacaccttcttcaacccagaccgggagggctggctgctgaagctgggcggccgggtgaagacctggaagaggcgctggttcatcctgacagacaactgcctgtactactttgagttcaccacagacaaggagccccggggcatcatccccctggagaacctgtctgtgcagaaggtggatgaccccaagaagcccttctgcctggagctgtacaaccccagctgccggggccagaagatcaaggcctgcaagacagatggagatggccgggtggtggagggcaagcatgagagctaccgcatcagcgccaccagcgctgaggagcgggaccagtggattgagagcatccgggccagcatcaccagggtgcccttctatgacctggtgtccaccaggaagaagaagatcgccagcaagcagtag

SEQ ID NO: 149157 - DNA, 474 bp, synthetic construct
  misc_feature 1..474: note = Description of Artificial Sequence: Synthetic coding sequence
  source 1..474: mol_type = other DNA
atggacctgtgccaccctgagcctgctgagctgagcagtggagaaacagaggagctgcagaggatcaagtggcacaggaagcagctgctggaggacatccagaagctgaaggatgaaattgctgatgtgtttgcccagattgactgctttgagagcgctgaggagagcaggatggcccagaaggagaaggagctgtgcattggaaggaagaagttcaacatggaccctgccaagggcatccagtacttcatcgagcacaagctgctgaccccagatgtgcaggacatcgcccgcttcctgtacaagggggagggcctgaacaagacagccatcggcacctacctgggggagcgggaccccatcaacctgcaggtgctgcaggcctttgtggactgccatgaatttgccaacctgaacctggtgcaggccctgcgcttccgggagggcgccagtgacctgggctttggaggatag

SEQ ID NO: 149158 - DNA, 876 bp, synthetic construct
  misc_feature 1..876: note = Description of Artificial Sequence: Synthetic coding sequence
  source 1..876: mol_type = other DNA
gacaggagcacaggccacctgttcccccggggcgtgggcatggacctgtgccaccctgagcctgctgagctgagcagcggggagacagaggagctgcagaggatcaagtggcacaggaagcagctgctggaggacatccagaagctgaaggatgaaattgctgatgtgtttgcccagattgactgctttgaatctgctgaggagagcaggatggcccagaaggagaaggagctgtgcatcggcaggaagaagttcaacatggaccctgccaagggcatccagtacttcatcgagcacaagctgctgaccccagatgtgcaggacatcgcccgcttcctgtacaagggggagggcctgaacaagacagccatcggcacctacctgggggagcgggaccccatcaacctgcaggtgctgcaggcctttgtggactgccacgagtttgccaacctgaacctggtgcaggccctgcggcagttcctgtggagcttccggctgcctggagaggcccagaagattgacaggatgatggaggcctttgccacccgctactgcctgtgcaaccctggggtcttccagagcacagacacctgctacgtgctgtccttcagcatcatcatgctgaacaccagcctgcacaaccccaacgtgcgggaccggcccccatttgaaagatttgtgtccatgaacagaggcatcaacaatggaagtgacctgcctgaggaccagctgcgggtgacctgggagtgcagccagaggaggagccgggagaggaccttccagaaggaggaggtggccaggacagaggcctgcccagactgggagcggcggggcgtgcagtgtggccgggagcccctgcggcagcaccaggagtag

SEQ ID NO: 149159 - DNA, 444 bp, synthetic construct
  misc_feature 1..444: note = Description of Artificial Sequence: Synthetic coding sequence
  source 1..444: mol_type = other DNA
tgaacccacaccagcggcagcctgagcagccgggacagccaggccggggacagcgccagccgggccggcggccgggtgaagacctggaagaggcgctggttcatcctgacagacaactgcctgtactactttgagttcaccacagacaaggagccccggggcatcatccccctggagaacctgtctgtgcagaaggtggatgaccccaagaagcccttctgcctggagctgtacaaccccagctgccggggccagaagatcaaggcctgcaagacagatggagatggccgggtggtggagggcaagcatgagagctaccgcatcagcgccaccagcgctgaggagcgggaccagtggattgagagcatccgggccagcatcaccagggtgcccttctatgacctggtgtccaccaggaagaagaagatcgccagcaagcagtag

SEQ ID NO: 149160 - DNA, 354 bp, synthetic construct
  misc_feature 1..354: note = Description of Artificial Sequence: Synthetic coding sequence
  source 1..354: mol_type = other DNA
atggacctgtgccaccctgagcctgctgagctgagcagtggagaaacagaggagctgcagaggatcaagtggcacaggaagcagctgctggaggacatccagaagctgaaggatgaaattgctgatgtgtttgcccagattgactgctttgagagcgctgaggagagcaggatggcccagaaggagaaggagctgtgcattggaaggaagaagttcaacatggaccctgccaagggcatccagtacttcatcgagcacaagctgctgaccccagatgtgcaggacatcgcccgcttcctgtacaagggggagggcctgaacaagacagccatcggcacctacctgggggagtag

SEQ ID NO: 149161 - DNA, 777 bp, synthetic construct
  misc_feature 1..777: note = Description of Artificial Sequence: Synthetic coding sequence
  source 1..777: mol_type = other DNA
atggtgctgtgtgtgcagggcccccggcccctgctggccgtggagaggacaggccagaggcccctgtgggcccccagcctggagctgcccaagcctgtgatgcagcccctgcctgctggggccttcctggaggaggtggccgagggcaccccagcccagacagagagcgagcccaaggtgctggaccctgaggaggacctgctgtgcatcgccaagaccttctcctacctgcgggagagcggctggtactggggcagcatcacagccagcgaggcccggcagcacctgcagaagatgcctgagggcaccttcctggtgcgggacagcacccaccccagctacctgttcaccctgtctgtgaagaccacccggggccccaccaacgtgagaattgaatatgctgacagcagcttccggctggacagcaactgcctgagccggccccgcatcctggccttcccagatgtggtgtccctggtgcagcactacgtggccagctgcacagctgacaccaggagtgacagcccagaccctgcccccaccccagccctgcccatgcccaaggaggatgcccccagcgaccctgccctgcctgcccctcctccagccacagctgtgcacctgaagctggtgcagccctttgtgcggcgcagcagcgcccggagcctgcagcacctgtgccgcctggtgatcaaccggctggtggctgatgtggactgcctgcccctgcccaggaggatggctgactacctgcggcagtaccccttccagctgtag

SEQ ID NO: 149162 - DNA, 828 bp, synthetic construct
  misc_feature 1..828: note = Description of Artificial Sequence: Synthetic coding sequence
  source 1..828: mol_type = other DNA
atgtacctggagcacaccagccactgcccccaccatgatgatgacacagccatggacacccccctgccccggccccggcccctgctggccgtggagaggacaggccagaggcccctgtgggcccccagcctggagctgcccaagcctgtgatgcagcccctgcctgctggggccttcctggaggaggtggccgagggcaccccagcccagacagaaagtgagcccaaggtgctggaccctgaggaggacctgctgtgcatcgccaagaccttctcctacctgcgggagagcggctggtactggggcagcatcacagccagcgaggcccggcagcacctgcagaagatgcctgagggcaccttcctggtgcgggacagcacccaccccagctacctgttcaccctgtctgtgaagaccacccggggccccaccaacgtgcgcatcgagtatgctgacagcagcttccggctggacagcaactgcctgagccggccccgcatcctggccttcccagatgtggtgtccctggtgcagcactacgtggccagctgcacagctgacaccaggagtgacagcccagaccctgcccccaccccagccctgcccatgcccaaggaggatgcccccagcgaccctgccctgcctgcccctcctccagccacagctgtgcacctgaagctggtgcagccctttgtgagaagaagcagcgcccggagcctgcagcacctgtgccgcctggtgatcaaccggctggtggctgatgtggactgcctgcccctgcccaggaggatggctgactacctgcggcagtaccccttccagctgtag

SEQ ID NO: 149163 - DNA, 1269 bp, synthetic construct
  misc_feature 1..1269: note = Description of Artificial Sequence: Synthetic coding sequence
  source 1..1269: mol_type = other DNA
atgcctgctggaagaagaggccctgctgcccagagcgcccggcggcccccacccctgctgcccctgctgctgctgctgtgtgtgctgggcgccccccgggccggcagcggggcccacacagctgtgatcagcccccaggaccccaccctgctgattggcagcagcctgctggccacctgcagcgtgcatggagaccccccaggggccacagctgagggcctgtactggaccctgaatggaagaaggctgcccccagagctgagccgggtgctgaatgccagcaccctggccctggccctggccaacctgaatggcagccggcagaggtctggggacaacctggtgtgccacgccagagatggcagcatcctggccggcagctgcctgtatgtgggcctgcccccagagaagcctgtgaacatcagctgctggagcaagaacatgaaggacctgacctgccgctggacccctggggcccacggggagaccttcctgcacaccaactacagcctgaagtacaagctgcgctggtacggccaggacaacacctgtgaggagtaccacacagtgggcccccacagctgccacatccccaaggacctggccctcttcaccccctatgagatctgggtggaggccaccaaccggctgggcagcgcccggagtgatgtgctgaccctggacatcctggatgtggtgaccacagatcctcctccagatgtgcacgtgtcccgggtgggcggcctggaggaccagctgtctgtgcgctgggtgagccccccagccctgaaggacttcctgttccaggccaagtaccagatccgctacagagtggaggacagcgtggactggaaggtggtggatgatgtgagcaaccagaccagctgccgcctggccggcctgaagccaggcaccgtgtactttgtgcaggtgcgctgcaaccccttcggcatctacggcagcaagaaggccggcatctggagcgagtggagccaccccacagctgccagcacccccaggtctgagcggcccggccctgggggcggggcctgtgagccccggggcggggagcccagcagcggccctgtgcggcgggagctgaagcagttcctgggctggctgaagaagcacgcctactgcagcaacctgtccttccggctgtatgaccagtggagggcctggatgcagaagagccacaagaccaggaaccaggatgagggcatcctgcccagcggcagaagaggaacagcccggggccctgccaggtag

SEQ ID NO: 149164 - DNA, 702 bp, synthetic construct
  misc_feature 1..702: note = Description of Artificial Sequence: Synthetic coding sequence
  source 1..702: mol_type = other DNA
atgggccgcctggtgctgctgtggggcgctgctgtgttcctgctgggcggctggatggccctgggccagggcggcgctgctgagggcgtgcagatccagatcatctacttcaacctggagaccgtgcaggtgacctggaatgccagcaagtacagcaggaccaacctgaccttccactaccgcttcaatggagatgaggcctatgaccagtgcaccaactacctgctgcaggagggccacaccagcggctgcctgctggatgctgagcagagagatgacatcctgtacttcagcatcagaaatggcacccaccctgtgttcaccgccagccgctggatggtgtactacctgaagcccagcagccccaagcacgtgcgcttctcctggcaccaggatgctgtgacagtgacctgcagcgacctgtcctatggagacctgctgtatgaggtgcagtaccgcagcccctttgacacagagtggcagacccagagccgctctgtgacccaggccggcgtgcagtggtgtgacctgtgcctgctgcagcccagccccccacgcttcaagcgcttcagctgcctgagcctgcccagctcctgggactaccgccaccccccaccccggctggccaacttctgcatcatcagcagagatggagtgagcccctgctggccaggctggagcaggacctgtgacctgaggtag

SEQ ID NO: 149165 - DNA, 771 bp, synthetic construct
  misc_feature 1..771: note = Description of Artificial Sequence: Synthetic coding sequence
  source 1..771: mol_type = other DNA
atgggccgcctggtgctgctgtggggcgctgctgtgttcctgctgggcggctggatggccctgggccagggcggcgctgctgagggcgtgcagatccagatcatctacttcaacctggagaccgtgcaggtgacctggaatgccagcaagtacagcaggaccaacctgaccttccactaccgcttcaatggagatgaggcctatgaccagtgcaccaactacctgctgcaggagggccacaccagcggctgcctgctggatgctgagcagagagatgacatcctgtacttcagcatcagaaatggcacccaccctgtgttcaccgccagccgctggatggtgtactacctgaagcccagcagccccaagcacgtgcgcttctcctggcaccaggatgctgtgacagtgacctgcagcgacctgtcctatggagacctgctgtatgaggtgcagtaccgcagcccctttgacacagagtggcagagcaagcaggagaacacctgcaatgtgaccatcgagggcctggatgctgagaagtgctacagcttctgggtgcgggtgaaggccatggaggatgtgtatggccctgacacctaccccagcgactggagcgaggtgacctgctggcagagaggagagatcagagatgcctgtgccgagacccccaccccacccaagcccaagctgagcaagttcatcctgatcagcagcctggccatcctgctgatggtgtccctgctgctgctgagcctgtggaagctgtggaggtag

SEQ ID NO: 149166 - DNA, 768 bp, synthetic construct
  misc_feature 1..768: note = Description of Artificial Sequence: Synthetic coding sequence
  source 1..768: mol_type = other DNA
atgggccgcctggtgctgctgtggggcgctgctgtgttcctgctgggcggctggatggccctgggccagggcggcgctgctgagggcgtgcagatccagatcatctacttcaacctggagaccgtgcaggtgacctggaatgccagcaagtacagcaggaccaacctgaccttccactaccgcttcaatggagatgaggcctatgaccagtgcaccaactacctgctgcaggagggccacaccagcggctgcctgctggatgctgagcagagagatgacatcctgtacttcagcatcagaaatggcacccaccctgtgttcaccgccagccgctggatggtgtactacctgaagcccagcagccccaagcacgtgcgcttctcctggcaccaggatgctgtgacagtgacctgcagcgacctgtcctatggagacctgctgtatgaggtgcagtaccgcagcccctttgacacagagtggcagagcaagcaggagaacacctgcaatgtgaccatcgagggcctggatgctgagaagtgctacagcttctgggtgcgggtgaaggccatggaggatgtgtatggccctgacacctaccccagcgactggagcgaggtgacctgctggcagagaggagagatcagagatgcctgtgccgagacccccaccccacccaagcccaagctgagcaagttcatcctgatcagcagcctggccatcctgctgatggtgtccctgctgctgctgagcctgtggaagctgtggtag

SEQ ID NO: 149167 - DNA, 411 bp, synthetic construct
  misc_feature 1..411: note = Description of Artificial Sequence: Synthetic coding sequence
  source 1..411: mol_type = other DNA
atgaggaccccaggccccctgcctgtgctgctgctgctgctggccggggccccagctgcccggcccaccccacccacctgctacagcaggatgagggccctgagccaggagatcacccgggacttcaacctgctgcaggtgtctgagcccagcgagccctgtgtgcgctacctgccccggctgtacctggacatccacaactactgtgtgctggacaagctgcgggactttgtggccagccccccctgctggaaggtggcccaggtggacagcctgaaggacaaggccaggaagctgtacaccatcatgaacagcttctgccggcgggacctggtgttcctgctggatgactgcaatgccctggagtaccccatccctgtgaccaccgtgctgcctgaccggcagaggtag

SEQ ID NO: 149168 - DNA, 3762 bp, synthetic construct
  misc_feature 1..3762: note = Description of Artificial Sequence: Synthetic coding sequence
  source 1..3762: mol_type = other DNA
atggccgcccaggtgaccctggaggatgccctgagcaatgtggacctgctggaggagctgcccctgcctgaccagcagccctgcatcgagcccccacccagcagcctgctgtaccagcccaacttcaacaccaactttgaagatagaaatgcctttgtgacaggcatcgcccgctacatcgagcaggccaccgtgcacagctccatgaatgagatgctggaggagggccaggagtatgctgtgatgctgtacacctggaggagctgcagccgggccatcccccaggtgaagtgcaatgagcagcccaacagagtggagatctatgagaagacagtggaggtgctggagcctgaggtgaccaagctgatgaacttcatgtacttccagagaaatgccatcgagcgcttctgtggggaggtgcggcggctgtgccacgccgagaggaggaaggactttgtgtctgaggcctacctgatcaccctgggcaagttcatcaacatgtttgctgtgctggatgagctgaagaacatgaagtgcagcgtgaagaatgaccacagcgcctacaagagagctgcccagttcctgaggaagatggctgacccccagagcatccaggagagccagaacctgtccatgttcctggccaaccacaacaagatcacccagagcctgcagcagcagctggaggtgatcagcggctatgaggagctgctggccgacatcgtgaacctgtgtgtggactactatgagaacaggatgtacctgacccccagcgagaagcacatgctgctgaaggtgatgggcttcggcctgtacctgatggatggctctgtgagcaacatctacaagctggatgccaagaagaggatcaacctgagcaagattgacaagtacttcaagcagctgcaggtggtgcccctgtttggagacatgcagatcgagctggcccgctacatcaagaccagcgcccactatgaggagaacaagagccgctggacctgcaccagcagcggcagcagcccccagtacaacatctgtgagcagatgatccagatccgggaggaccacatgaggttcatcagcgagctggcccgctacagcaacagcgaggtggtgactggaagtggccggcaggaggcccagaagacagatgctgagtacaggaagctgtttgacctggccctgcagggcctgcagctgctgagccagtggagcgcccacgtgatggaggtgtacagctggaagctggtgcaccccacagacaagtacagcaacaaggactgcccagattctgctgaggagtatgagcgggccacccgctacaactacaccagcgaggagaagtttgccctggtggaggtgattgccatgatcaagggcctgcaggtgctgatgggccgcatggagagcgtcttcaaccacgccatccgccacacagtgtatgctgccctgcaggacttcagccaggtgaccctgcgggagcccctgcggcaggccatcaagaagaagaagaatgtcatccagagcgtgctgcaggccatcaggaagacagtgtgtgactgggagactggacatgagcccttcaatgaccctgccctgcggggggagaaggaccccaagagcggctttgacatcaaggtgcccaggagagctgtgggccccagcagcacccagctgtacatggtgaggaccatgctggagagcctgattgctgacaagagcggcagcaagaagaccctgcggagcagcctggagggccccaccatcctggacatcgagaagttccaccgggagagcttcttctacacccacctgatcaacttcagcgagaccctgcagcagtgctgtgacctgagccagctgtggttccgggagttcttcctggagctgaccatgggccgccgcatccagttccccatcgagatgtccatgccctggatcctgacagaccacatcctggagaccaaggaggcctccatgatggagtatgtgctgtacagcctggacctgtacaatgacagcgcccactacgccctgacccgcttcaacaagcagttcctgtatgatgaaattgaagctgaggtgaacctgtgctttgaccagtttgtgtacaagctggccgaccagatctttgcctactacaaggtgatggccggcagcctgctgctggacaagaggctgcggtctgagtgcaagaaccagggcgccaccatccacctgccccccagcaacagatatgagaccctgctgaagcagagacatgtgcagctgctgggccgcagcattgacctgaacagactcatcacccagagggtgtctgctgccatgtacaagagcctggagctggccatcggccgctttgaaagtgaggacctgaccagcatcgtggagctggatggcctgctggagatcaacaggatgacccacaagctgctgagccgctacctgaccctggatggctttgatgccatgttccgggaggccaaccacaacgtgtctgccccctacggccgcatcaccctgcacgtgttctgggagctgaactatgacttcctgcccaactactgctacaacggcagcaccaacagatttgtgaggacagtgctgcccttcagccaggagttccagagggacaagcagcccaatgcccagccccagtacctgcacggcagcaaggccctgaacctggcctacagcagcatctacggcagctacagaaactttgtgggccccccccacttccaggtgatctgccgcctgctgggctaccagggcattgctgtggtgatggaggagctgctgaaggtggtgaagagcctgctgcagggcaccatcctgcagtatgtgaagaccctgatggaggtgatgcccaagatctgccgcctgcccaggcatgaatatggcagccctggcatcctggagttcttccaccaccagctgaaggacatcgtggagtatgcagagctgaagacagtgtgcttccagaacctgcgggaggtgggcaatgccatcctcttctgcctgctgattgagcagagcctgagcctggaggaggtgtgtgacctgctgcatgctgcccccttccagaacatcctgccccgggtgcacgtgaaggagggggagcggctggatgccaagatgaagaggctggagagcaaatatgcccccctgcacctggtgcccctgattgagcggctgggcaccccccagcagatcgccatcgcccgggagggggacctgctgaccaaggagcggctgtgctgcggcctgtccatgtttgaagtcatcctgacccgcatccgctccttcctggatgaccccatctggaggggccccctgcccagcaatggagtgatgcacgtggatgaatgtgtggagttccaccggctgtggagcgccatgcagtttgtgtactgcatccctgtgggcacccatgagttcaccgtggagcagtgctttggagatggcctgcactgggccggctgcatgatcatcgtgctgctgggccagcagaggagatttgctgtgctggacttctgctaccacctgctgaaggtgcagaagcatgatggcaaggatgagatcatcaagaatgtgcccctgaagaagatggtggagcgcatcaggaagttccagatcctgaatgatgagatcatcaccatcctggacaagtacctgaagtctggagatggagagggcacccctgtggagcacgtgcgctgcttccagccccccatccaccagagcctggccagcagctag

SEQ ID NO: 149169 - DNA, 3768 bp, synthetic construct
  misc_feature 1..3768: note = Description of Artificial Sequence: Synthetic coding sequence
  source 1..3768: mol_type = other DNA
atgggccccaagcacgtgctgcggcagcccggccccagcgagcggcaccaccctgaggtgcctgcctggacccccagggctggccccccctgctggctgtgccggcagcgctggggctggaccctgcaccccccaggccggggctgcccagccctgctgctgtctgagcccaggatggccgcccaggtgaccctggaggatgccctgagcaatgtggacctgctggaggagctgcccctgcctgaccagcagccctgcatcgagcccccacccagcagcctgctgtaccagaatgagatgctggaggagggccaggagtatgctgtgatgctgtacacctggaggagctgcagccgggccatcccccaggtgaagtgcaatgagcagcccaacagagtggagatctatgagaagacagtggaggtgctggagcctgaggtgaccaagctgatgaacttcatgtacttccagagaaatgccatcgagcgcttctgtggggaggtgcggcggctgtgccacgccgagaggaggaaggactttgtgtctgaggcctacctgatcaccctgggcaagttcatcaacatgtttgctgtgctggatgagctgaagaacatgaagtgcagcgtgaagaatgaccacagcgcctacaagagagctgcccagttcctgaggaagatggctgacccccagagcatccaggagagccagaacctgtccatgttcctggccaaccacaacaagatcacccagagcctgcagcagcagctggaggtgatcagcggctatgaggagctgctggccgacatcgtgaacctgtgtgtggactactatgagaacaggatgtacctgacccccagcgagaagcacatgctgctgaaggtgatgggcttcggcctgtacctgatggatggctctgtgagcaacatctacaagctggatgccaagaagaggatcaacctgagcaagattgacaagtacttcaagcagctgcaggtggtgcccctgtttggagacatgcagatcgagctggcccgctacatcaagaccagcgcccactatgaggagaacaagagccgctggacctgcaccagcagcggcagcagcccccagtacaacatctgtgagcagatgatccagatccgggaggaccacatgaggttcatcagcgagctggcccgctacagcaacagcgaggtggtgactggaagtggccggcaggaggcccagaagacagatgctgagtacaggaagctgtttgacctggccctgcagggcctgcagctgctgagccagtggagcgcccacgtgatggaggtgtacagctggaagctggtgcaccccacagacaagtacagcaacaaggactgcccagattctgctgaggagtatgagcgggccacccgctacaactacaccagcgaggagaagtttgccctggtggaggtgattgccatgatcaagggcctgcaggtgctgatgggccgcatggagagcgtcttcaaccacgccatccgccacacagtgtatgctgccctgcaggacttcagccaggtgaccctgcgggagcccctgcggcaggccatcaagaagaagaagaatgtcatccagagcgtgctgcaggccatcaggaagacagtgtgtgactgggagactggacatgagcccttcaatgaccctgccctgcggggggagaaggaccccaagagcggctttgacatcaaggtgcccaggagagctgtgggccccagcagcacccagctgtacatggtgaggaccatgctggagagcctgattgctgacaagagcggcagcaagaagaccctgcggagcagcctggagggccccaccatcctggacatcgagaagttccaccgggagagcttcttctacacccacctgatcaacttcagcgagaccctgcagcagtgctgtgacctgagccagctgtggttccgggagttcttcctggagctgaccatgggccgccgcatccagttccccatcgagatgtccatgccctggatcctgacagaccacatcctggagaccaaggaggcctccatgatggagtatgtgctgtacagcctggacctgtacaatgacagcgcccactacgccctgacccgcttcaacaagcagttcctgtatgatgaaattgaagctgaggtgaacctgtgctttgaccagtttgtgtacaagctggccgaccagatctttgcctactacaaggtgatggccggcagcctgctgctggacaagaggctgcggtctgagtgcaagaaccagggcgccaccatccacctgccccccagcaacagatatgagaccctgctgaagcagagacatgtgcagctgctgggccgcagcattgacctgaacagactcatcacccagagggtgtctgctgccatgtacaagagcctggagctggccatcggccgctttgaaagtgaggacctgaccagcatcgtggagctggatggcctgctggagatcaacaggatgacccacaagctgctgagccgctacctgaccctggatggctttgatgccatgttccgggaggccaaccacaacgtgtctgccccctacggccgcatcaccctgcacgtgttctgggagctgaactatgacttcctgcccaactactgctacaacggcagcaccaacagatttgtgaggacagtgctgcccttcagccaggagttccagagggacaagcagcccaatgcccagccccagtacctgcacggcagcaaggccctgaacctggcctacagcagcatctacggcagctacagaaactttgtgggccccccccacttccaggtgatctgccgcctgctgggctaccagggcattgctgtggtgatggaggagctgctgaaggtggtgaagagcctgctgcagggcaccatcctgcagtatgtgaagaccctgatggaggtgatgcccaagatctgccgcctgcccaggcatgaatatggcagccctggcatcctggagttcttccaccaccagctgaaggacatcgtggagtatgcagagctgaagacagtgtgcttccagaacctgcatgctgcccccttccagaacatcctgccccgggtgcacgtgaaggagggggagcggctggatgccaagatgaagaggctggagagcaaatatgcccccctgcacctggtgcccctgattgagcggctgggcaccccccagcagatcgccatcgcccgggagggggacctgctgaccaaggagcggctgtgctgcggcctgtccatgtttgaagtcatcctgacccgcatccgctccttcctggatgaccccatctggaggggccccctgcccagcaatggagtgatgcacgtggatgaatgtgtggagttccaccggctgtggagcgccatgcagtttgtgtactgcatccctgtgggcacccatgagttcaccgtggagcagtgctttggagatggcctgcactgggccggctgcatgatcatcgtgctgctgggccagcagaggagatttgctgtgctggacttctgctaccacctgctgaaggtgcagaagcatgatggcaaggatgagatcatcaagaatgtgcccctgaagaagatggtggagcgcatcaggaagttccagatcctgaatgatgagatcatcaccatcctggacaagtacctgaagtctggagatggagagggcacccctgtggagcacgtgcgctgcttccagccccccatccaccagagcctggccagcagctag

SEQ ID NO: 149170 - DNA, 2469 bp, synthetic construct
  misc_feature 1..2469: note = Description of Artificial Sequence: Synthetic coding sequence
  source 1..2469: mol_type = other DNA
atggccgagagcctgggcagcgctgagctgctgcggcagctgaagagcctgggcatggagcggctgctgcatgctgtgaacaccttcctgcggcagagctgcacctacctgcccctgctgaccttcggcggcaagaccagctttgtgtccctggatgtgtatggaacagaggccaactgcagcgccaccagctgcagcttccccaaggctgctgccacctggccccggcggcaggcccctggccccctgggggagctggtgcggggccccccagaccagggcgtggccgagcagagcttcagccacggcctgtttgaatttggcatcaccaacgtgccctgcatcttcagccccccccagatgttcccctggatcatccagctgtacatggtgaggaccatgctggagagcctgattgctgacaagagcggcagcaagaagaccctgcggagcagcctggagggccccaccatcctggacatcgagaagttccaccgggagagcttcttctacacccacctgatcaacttcagcgagaccctgcagcagtgctgtgacctgagccagctgtggttccgggagttcttcctggagctgaccatgggccgccgcatccagttccccatcgagatgtccatgccctggatcctgacagaccacatcctggagaccaaggaggcctccatgatggagtatgtgctgtacagcctggacctgtacaatgattctgcccactacgccctgacccgcttcaacaagcagttcctgtatgatgaaattgaggccgaggtgaacctgtgctttgaccagtttgtgtacaagctggccgaccagatctttgcctactacaaggtgatggccggcagcctgctgctggacaagaggctgcggtctgagtgcaagaaccagggcgccaccatccacctgccccccagcaacagatatgagaccctgctgaagcagagacatgtgcagctgctgggccgcagcattgacctgaacagactcatcacccagagggtgtctgctgccatgtacaagagcctggagctggccatcggccgctttgaaagtgaggacctgaccagcatcgtggagctggatggcctgctggagatcaacaggatgacccacaagctgctgagccgctacctgaccctggatggctttgatgccatgttccgggaggccaaccacaacgtgtctgccccctacggccgcatcaccctgcacgtgttctgggagctgaactatgacttcctgcccaactactgctacaacggcagcaccaacagatttgtgaggacagtgctgcccttcagccaggagttccagagggacaagcagcccaatgcccagccccagtacctgcacggcagcaaggccctgaacctggcctacagcagcatctacggcagctacagaaactttgtgggccccccccacttccaggtgatctgccgcctgctgggctaccagggcattgctgtggtgatggaggagctgctgaaggtggtgaagagcctgctgcagggcaccatcctgcagtatgtgaagaccctgatggaggtgatgcccaagatctgccgcctgcccaggcatgaatatggcagccctggcatcctggagttcttccaccaccagctgaaggacatcgtggagtatgcagagctgaagacagtgtgcttccagaacctgcgggaggtgggcaatgccatcctcttctgcctgctgattgagcagagcctgagcctggaggaggtgtgtgacctgctgcacgccgcccccttccagaacatcctgccccgggtgcacgtgaaggagggggagcggctggatgccaagatgaagaggctggagagcaaatatgcccccctgcacctggtgcccctcatcgagcggctgggcaccccccagcagatcgccatcgcccgggagggggacctgctgaccaaggagcggctgtgctgcggcctgtccatgtttgaggtgatcctgacccgcatccgctccttcctggatgaccccatctggaggggccccctgcccagcaatggagtgatgcacgtggatgaatgtgtggagttccaccggctgtggagcgccatgcagtttgtgtactgcatccctgtgggcacccatgagttcaccgtggagcagtgctttggagatggcctgcactgggccggctgcatgatcatcgtgctgctgggccagcagaggagatttgctgtgctggacttctgctaccacctgctgaaggtgcagaagcatgatggcaaggatgagatcatcaagaatgtgcccctgaagaagatggtggagcgcatcaggaagttccagatcctgaatgatgagatcatcaccatcctggacaagtacctgaagtctggagatggagagggcacccctgtggagcacgtgcgctgcttccagccccccatccaccagagcctggccagcagctag

SEQ ID NO: 149171 - DNA, 3762 bp, synthetic construct; identical to SEQ ID NO: 149168
  misc_feature 1..3762: note = Description of Artificial Sequence: Synthetic coding sequence
  source 1..3762: mol_type = other DNA

SEQ ID NO: 149172 - DNA, 486 bp, synthetic construct
  misc_feature 1..486: note = Description of Artificial Sequence: Synthetic coding sequence
  source 1..486: mol_type = other DNA
atggccgcccaggtgaccctggaggatgccctgagcaatgtggacctgctggaggagctgcccctgcctgaccagcagccctgcatcgagcccccacccagcagcctgctgtaccagcccaacttcaacaccaactttgaagatagaaatgcctttgtgacaggcatcgcccgctacatcgagcaggccaccgtgcacagctccatgaatgagatgctggaggagggccaggagtatgctgtgatgctgtacacctggaggagctgcagccgggccatcccccaggtgaagtgcaatgagcagcccaacagagtggagatctatgagaagacagtggaggtgctggagcctgaggtgaccaagctgatgaacttcatgtacttccagagaaatgccatcgagcgcttctgtggggaggtgcggcggctgtgccacgccgagaggaggaaggactttgtgtctgaggcctacctgatcaccctgtag

SEQ ID NO: 149173 - DNA, 456 bp, synthetic construct
  misc_feature 1..456: note = Description of Artificial Sequence: Synthetic coding sequence
  source 1..456: mol_type = other DNA
atggccgcccaggtgaccctggaggatgccctgagcaatgtggacctgctggaggagctgcccctgcctgaccagcagccctgcatcgagcccccacccagcagcctgctgtaccagcccaacttcaacaccaactttgaagatagaaatgcctttgtgacaggcatcgcccgctacatcgagcaggccaccgtgcacagctccatgaatgagatgctggaggagggccaggagtatgctgtgatgctgtacacctggaggagctgcagccgggccatcccccaggtgaagtgcaatgagcagcccaacagagtggagatctatgagaagacagtggaggtgctggagcctgaggtgaccaagctgatgaacttcatgtacttccagagaaatgccatcgagcgcttctgtggggaggtgcggcggctgtgccacgccgagaggaggaaggactag

SEQ ID NO: 149174 - DNA, 3837 bp, synthetic construct
  misc_feature 1..3837: note = Description of Artificial Sequence: Synthetic coding sequence
  source 1..3837: mol_type = other DNA
atgaccacccacgtgaccctggaggatgccctgagcaatgtggacctgctggaggagctgcccctgcctgaccagcagccctgcatcgagcccccacccagcagcatcatgtaccaggccaactttgacaccaactttgaagatagaaatgcctttgtgacaggcatcgcccgctacatcgagcaggccaccgtgcacagctccatgaatgagatgctggaggagggccatgaatatgctgtgatgctgtacacctggaggagctgcagccgggccatcccccgggtgaagtgcaatgagcagcccaacagagtggagatctatgagaagacagtggaggtgctggagcctgaggtgaccaagctgatgaagttcatgtacttccagaggaaggccatcgagcgcttctgcagcgaggtgaagaggctgtgccacgccgagaggaggaaggactttgtgtctgaggcctacctgctgaccctgggcaagttcatcaacatgtttgctgtgctggatgagctgaagaacatgaagtgcagcgtgaagaatgaccacagcgcctacaagagagctgcccagttcctgaggaagatggctgacccccagagcatccaggagagccagaacctgtccatgttcctggccaaccacaaccgcatcacccagtgcctgcaccagcagctggaggtgattcctggctatgaggagctgctggccgacatcgtgaacatctgtgtggactactatgagaacaagatgtacctgacccccagcgagaagcacatgctgctgaaggtgatgggcttcggcctgtacctgatggatggaaatgtgagcaacatctacaagctggatgccaagaagaggatcaacctgagcaagattgacaagttcttcaagcagctgcaggtggtgcccctgtttggagacatgcagatcgagctggcccgctacatcaagaccagcgcccactatgaggagaacaagagcaagtggacctgcacccagagcagcatcagcccccagtacaacatctgtgagcagatggtgcagatcagagatgaccacatccgcttcatcagcgagctggcccgctacagcaacagcgaggtggtgactggaagtggcctggacagccagaagagtgatgaggagtaccgggagctgtttgacctggccctgcggggcctgcagctgctgagcaagtggagcgcccacgtgatggaggtgtacagctggaagctggtgcaccccacagacaagttctgcaacaaggactgccccggcacagctgaggagtatgaaagagccacccgctacaactacaccagcgaggagaagtttgcctttgtggaggtgattgccatgatcaagggcctgcaggtgctgatgggccgcatggagagcgtcttcaaccaggccatccggaacaccatctatgctgccctgcaggactttgcccaggtgaccctgcgggagcccctgcggcaggccgtgaggaagaagaagaatgtgctgatctctgtgctgcaggccatcaggaagaccatctgtgactgggagggcggccgggagcccccaaatgacccctgcctgcggggggagaaggaccccaagggcggctttgacatcaaggtgccccggcgggctgtgggccccagcagcacccaggcctgccagtggagcccccgggccctcttccaccccaccggcggcacccagggccggcggggctgccgcagcctgctgtacatggtgaggaccatgctggagagcctgattgctgacaagagcggcagcaagaagaccctgcggagcagcctggatggccccatcgtgctggccatcgaggacttccacaagcagagcttcttcttcacccacctgctgaacatcagcgaggccctgcagcagtgctgtgacctgagccagctgtggttccgggagttcttcctggagctgaccatgggccgccgcatccagttccccatcgagatgtccatgccctggatcctgacagaccacatcctggagaccaaggagcccagcatgatggagtatgtgctgtaccccctggacctgtacaatgacagcgcctactatgccctgaccaagttcaagaagcagttcctgtatgatgaaattgaagctgaggtgaacctgtgctttgaccagtttgtgtacaagctggccgaccagatctttgcctactacaaggccatggccggctctgtgctgctggacaagcgcttccgggcagagtgcaagaactacggcgtcatcatcccctacccacccagcaacagatatgagaccctgctgaagcagagacatgtgcagctgctgggccgcagcattgacctgaacagactcatcacccagaggatctctgctgccatgtacaagagcctggaccaggccatcagcagatttgaaagtgaggacctgaccagcatcgtggagctggagtggctgctggagatcaaccggctgacccaccggctgctgtgcaagcacatgaccctggacagctttgatgccatgttccgggaggccaaccacaacgtgtctgccccctacggccgcatcaccctgcacgtgttctgggagctgaactttgacttcctgcccaactactgctacaacggcagcaccaacagatttgtgaggacagccatccccttcacccaggagccccagagggacaagccagccaacgtgcagccctactacctgtatggcagcaagcccctgaacatcgcctacagccacatctacagcagctacagaaactttgtgggccccccccacttcaagaccatctgccgcctgctgggctaccagggcattgctgtggtgatggaggagctgctgaagatcgtgaagagcctgctgcagggcaccatcctgcagtatgtgaagaccctgattgaggtgatgcccaagatctgccgcctgcccaggcatgaatatggcagccctggcatcctggagttcttccaccaccagctgaaggacatcatcgagtatgcagagctgaagacagatgtgttccagagcctgcgggaggtgggcaatgccatcctcttctgcctgctgattgagcaggccctgagccaggaggaggtgtgtgacctgctgcatgctgcccccttccagaacatcctgccccgggtgtacatcaaggagggggagcggctggaggtgaggatgaagaggctggaggccaagtatgcccccctgcacctggtgcccctgattgagcggctgggcaccccccagcagatcgccatcgcccgggagggggacctgctgaccaaggagcggctgtgctgcggcctgtccatgtttgaagtcatcctgacccgcatccgcagctacctgcaggaccccatctggaggggccccccacccaccaacggggtgatgcacgtggatgaatgtgtggagttccaccggctgtggagcgccatgcagtttgtgtactgcatccctgtgggcaccaatgagttcaccgctgagcagtgctttggagatggcctgaactgggccggctgcagcatcatcgtgctgctgggccagcagaggagatttgacctgtttgacttctgctaccacctgctgaaggtgcagaggcaggacggcaaggatgagatcatcaagaatgtgcccctgaagaagatggctgaccgcatcaggaagtaccagatcctgaacaatgaggtgtttgccatcctgaacaagtacatgaagtctgtggagacagacagcagcacagtggagcacgtgcgctgcttccagccccccatccaccagagcctggccaccacctgctag

SEQ ID NO: 149175 - DNA, 3762 bp, synthetic construct
  misc_feature 1..3762: note = Description of Artificial Sequence: Synthetic coding sequence
  source 1..3762: mol_type = other DNA
atgaccacccacgtgaccctggaggatgccctgagcaatgtggacctgctggaggagctgcccctgcctgaccagcagccctgcatcgagcccccacccagcagcatcatgtaccaggccaactttgacaccaactttgaagatagaaatgcctttgtgacaggcatcgcccgctacatcgagcaggccaccgtgcacagctccatgaatgagatgctggaggagggccatgaatatgctgtgatgctgtacacctggaggagctgcagccgggccatccccaaggtgaagtgcaatgagcagcccaacagagtggagatctatgagaagacagtggaggtgctggagcctgaggtgaccaagctgatgaagttcatgtacttccagaggaaggccatcgagcgcttctgcagcgaggtgaagaggctgtgccacgccgagaggaggaaggactttgtgtctgaggcctacctgctgaccctgggcaagttcatcaacatgtttgctgtgctggatgagctgaagaacatgaagtgcagcgtgaagaatgaccacagcgcctacaagagagctgcccagttcctgaggaagatggctgacccccagagcatccaggagagccagaacctgtccatgttcctggccaaccacaaccgcatcacccagtgcctgcaccagcagctggaggtgattcctggctatgaggagctgctggccgacatcgtgaacatctgtgtggactactatgagaacaagatgtacctgacccccagcgagaagcacatgctgctgaaggtgatgggcttcggcctgtacctgatggatggaaatgtgagcaacatctacaagctggatgccaagaagaggatcaacctgagcaagattgacaagttcttcaagcagctgcaggtggtgcccctgtttggagacatgcagatcgagctggcccgctacatcaagaccagcgcccactatgaggagaacaagagcaagtggacctgcacccagagcagcatcagcccccagtacaacatctgtgagcagatggtgcagatcagagatgaccacatccgcttcatcagcgagctggcccgctacagcaacagcgaggtggtgactggaagtggcctggacagccagaagagtgatgaggagtaccgggagctgtttgacctggccctgcggggcctgcagctgctgagcaagtggagcgcccacgtgatggaggtgtacagctggaagctggtgcaccccacagacaagttctgcaacaaggactgccccggcacagctgaggagtatgaaagagccacccgctacaactacaccagcgaggagaagtttgcctttgtggaggtgattgccatgatcaagggcctgcaggtgctgatgggccgcatggagagcgtcttcaaccaggccatccggaacaccatctatgctgccctgcaggactttgcccaggtgaccctgcgggagcccctgcggcaggccgtgaggaagaagaagaatgtgctgatctctgtgctgcaggccatcaggaagaccatctgtgactgggagggcggccgggagcccccaaatgacccctgcctgcggggggagaaggaccccaagggcggctttgacatcaaggtgccccggcgggctgtgggccccagcagcacccagctgtacatggtgaggaccatgctggagagcctgattgctgacaagagcggcagcaagaagaccctgcggagcagcctggatggccccatcgtgctggccatcgaggacttccacaagcagagcttcttcttcacccacctgctgaacatcagcgaggccctgcagcagtgctgtgacctgagccagctgtggttccgggagttcttcctggagctgaccatgggccgccgcatccagttccccatcgagatgtccatgccctggatcctgacagaccacatcctggagaccaaggagcccagcatgatggagtatgtgctgtaccccctggacctgtacaatgattctgcctactatgccctgaccaagttcaagaagcagttcctgtatgatgaaattgaggccgaggtgaacctgtgctttgaccagtttgtgtacaagctggccgaccagatctttgcctactacaaggccatggccggctctgtgctgctggacaagcgcttccgggcagagtgcaagaactatggagtcatcatcccctacccacccagcaacagatatgagaccctgctgaagcagagacatgtgcagctgctgggccgcagcattgacctgaacagactcatcacccagaggatctctgctgccatgtacaagagcctggaccaggccatcagcagatttgaaagtgaggacctgaccagcatcgtggagctggagtggctgctggagatcaaccggctgacccaccggctgctgtgcaagcacatgaccctggacagctttgatgccatgttccgggaggccaaccacaacgtgtctgccccctacggccgcatcaccctgcacgtgttctgggagctgaactttgacttcctgcccaactactgctacaacggcagcaccaacagatttgtgaggacagccatccccttcacccaggagccccagagggacaagccagccaacgtgcagccctactacctgtatggcagcaagcccctgaacatcgcctacagccacatctacagcagctacagaaactttgtgggccccccccacttcaagaccatctgccgcctgctgggctaccagggcattgctgtggtgatggaggagctgctgaagatcgtgaagagcctgctgcagggcaccatcctgcagtatgtgaagaccctcatcgaggtgatgcccaagatctgccgcctgcccaggcatgaatatggcagccctggcatcctggagttcttccaccaccagctgaaggacatcattgaatatgcagagctgaagacagatgtgttccagagcctgcgggaggtgggcaatgccatcctcttctgcctgctgattgagcaggccctgagccaggaggaggtgtgtgacctgctgcacgccgcccccttccagaacatcctgccccgggtgtacatcaaggagggggagcggctggaggtgaggatgaagaggctggaggccaagtatgcccccctgcacctggtgcccctcatcgagcggctgggcaccccccagcagatcgccatcgcccgggagggggacctgctgaccaaggagcggctgtgctgcggcctgtccatgtttgaggtgatcctgacccgcatccgcagctacctgcaggaccccatctggaggggccccccacccaccaatggagtgatgcacgtggatgaatgtgtggagttccaccggctgtggagcgccatgcagtttgtgtactgcatccctgtgggcaccaatgagttcaccgctgagcagtgctttggagatggcctgaactgggccggctgcagcatcatcgtgctgctgggccagcagaggagatttgacctgtttgacttctgctaccacctgctgaaggtgcagaggcaggacggcaaggatgagatcatcaagaatgtgcccctgaagaagatggctgaccgcatcaggaagtaccagatcctgaacaatgaggtgtttgccatcctgaacaagtacatgaagtctgtggagacagacagcagcacagtggagcacgtgcgctgcttccagccccccatccaccagagcctggccaccacctgctag

SEQ ID NO: 149176 - DNA, 3762 bp, synthetic construct; identical to SEQ ID NO: 149175
  misc_feature 1..3762: note = Description of Artificial Sequence: Synthetic coding sequence
  source 1..3762: mol_type = other DNA

SEQ ID NO: 149177 - DNA, 2859 bp, synthetic construct
  misc_feature 1..2859: note = Description of Artificial Sequence: Synthetic coding sequence
  source 1..2859: mol_type = other DNA
gagaagagaagacgctggacctgcacccagagcagcatcagcccccagtacaacatctgtgagcagatggtgcagatcagagatgaccacatccgcttcatcagcgagctggcccgctacagcaacagcgaggtggtgactggaagtggcctggacagccagaagagtgatgaggagtaccgggagctgtttgacctggccctgcggggcctgcagctgctgagcaagtggagcgcccacgtgatggaggtgtacagctggaagctggtgcaccccacagacaagttctgcaacaaggactgccccggcacagctgaggagtatgaaagagccacccgctacaactacaccagcgaggagaagtttgcctttgtggaggtgattgccatgatcaagggcctgcaggtgctgatgggccgcatggagagcgtcttcaaccaggccatccggaacaccatctatgctgccctgcaggactttgcccaggtgaccctgcgggagcccctgcggcaggccgtgaggaagaagaagaatgtgctgatctctgtgctgcaggccatcaggaagaccatctgtgactgggagggcggccgggagcccccaaatgacccctgcctgcggggggagaaggaccccaagggcggctttgacatcaaggtgccccggcgggctgtgggccccagcagcacccaggcctgccagtggagcccccgggccctcttccaccccaccggcggcacccagggccggcggggctgccgcagcctgctgtacatggtgaggaccatgctggagagcctgattgctgacaagagcggcagcaagaagaccctgcggagcagcctggatggccccatcgtgctggccatcgaggacttccacaagcagagcttcttcttcacccacctgctgaacatcagcgaggccctgcagcagtgctgtgacctgagccagctgtggttccgggagttcttcctggagctgaccatgggccgccgcatccagttccccatcgagatgtccatgccctggatcctgacagaccacatcctggagaccaaggagcccagcatgatggagtatgtgctgtaccccctggacctgtacaatgacagcgcctactatgccctgaccaagttcaagaagcagttcctgtatgatgaaattgaagctgaggtgaacctgtgctttgaccagtttgtgtacaagctggccgaccagatctttgcctactacaaggccatggccggctctgtgctgctggacaagcgcttccgggcagagtgcaagaactacggcgtcatcatcccctacccacccagcaacagatatgagaccctgctgaagcagagacatgtgcagctgctgggccgcagcattgacctgaacagactcatcacccagaggatctctgctgccatgtacaagagcctggaccaggccatcagcagatttgaaagtgaggacctgaccagcatcgtggagctggagtggctgctggagatcaaccggctgacccaccggctgctgtgcaagcacatgaccctggacagctttgatgccatgttccgggaggccaaccacaacgtgtctgccccctacggccgcatcaccctgcacgtgttctgggagctgaactttgacttcctgcccaactactgctacaacggcagcaccaacagatttgtgaggacagccatccccttcacccaggagccccagagggacaagccagccaacgtgcagccctactacctgtatggcagcaagcccctgaacatcgcctacagccacatctacagcagctacagaaactttgtgggccccccccacttcaagaccatctgccgcctgctgggctaccagggcattgctgtggtgatggaggagctgctgaagatcgtgaagagcctgctgcagggcaccatcctgcagtatgtgaagaccctgattgaggtgatgcccaagatctgccgcctgcccaggcatgaatatggcagccctggcatcctggagttcttccaccaccagctgaaggacatcatcgagtatgcagagctgaagacagatgtgttccagagcctgcgggaggtgggcaatgccatcctcttctgcctgctgattgagcaggccctgagccaggaggaggtgtgtgacctgctgcatgctgcccccttccagaacatcctgccccgggtgtacatcaaggagggggagcggctggaggtgaggatgaagaggctggaggccaagtatgcccccctgcacctggtgcccctgattgagcggctgggcaccccccagcagatcgccatcgcccgggagggggacctgctgaccaaggagcggctgtgctgcggcctgtccatgtttgaagtcatcctgacccgcatccgcagctacctgcaggaccccatctggaggggccccccacccaccaacggggtgatgcacgtggatgaatgtgtggagttccaccggctgtggagcgccatgcagtttgtgtactgcatccctgtgggcaccaatgagttcaccgctgagcagtgctttggagatggcctgaactgggccggctgcagcatcatcgtgctgctgggccagcagaggagatttgacctgtttgacttctgctaccacctgctgaaggtgcagaggcaggacggcaaggatgagatcatcaagaatgtgcccctgaagaagatggctgaccgcatcaggaagtaccagatcctgaacaatgaggtgtttgccatcctgaacaagtacatgaagtctgtggagacagacagcagcacagtggagcacgtgcgctgcttccagccccccatccaccagagcctggccaccacctgctag

SEQ ID NO: 149178 - DNA, 651 bp, synthetic construct
  misc_feature 1..651: note = Description of Artificial Sequence: Synthetic coding sequence
  source 1..651: mol_type = other DNA
atggccggctctgtgctgctggacaagcgcttccgggcagagtgcaagaactacggcgtcatcatcccctacccacccagcaacagatatgagaccctgctgaagcagagacatgtgcagctgctgggccgcagcattgacctgaacagactcatcacccagaggatctctgctgccatgtacaagagcctggaccaggccatcagcagatttgaaagtgaggacctgaccagcatcgtggagctggagtggctgctggagatcaaccggctgacccaccggctgctgtgcaagcacatgaccctggacagctttgatgccatgttccgggaggccaaccacaacgtgtctgccccctacggccgcatcaccctgcacgtgttctgggagctgaactttgacttcctgcccaactactgctacaacggcagcaccaacagatttgtgaggacagccagcttccaccccaggaccaccacccggcagacctgccagaggcctgccctgctgcccctgtggatccaggccagccagcactgcctgcagccccacctgcagctgctgcaggagttccggggggccaccagcttccaggactatgctgacagctgggtgatccgggccagcctgtggagctggaggaactgctag

SEQ ID NO: 149179 - DNA, 3537 bp, synthetic construct
  misc_feature 1..3537: note = Description of Artificial Sequence: Synthetic coding sequence
  source 1..3537: mol_type = other DNA
atgaccacccacgtgaccctggaggatgccctgagcaatgtggacctgctggaggagctgcccctgcccaatgagcagcccaacagagtggagatctatgagaagacagtggaggtgctggagcctgaggtgaccaagctgatgaagttcatgtacttccagaggaaggccatcgagcgcttctgcagcgaggtgaagaggctgtgccacgccgagaggaggaaggactttgtgtctgaggcctacctgctgaccctgggcaagttcatcaacatgtttgctgtgctggatgagctgaagaacatgaagtgcagcgtgaagaatgaccacagcgcctacaagagagctgcccagttcctgaggaagatggctgacccccagagcatccaggagagccagaacctgtccatgttcctggccaaccacaaccgcatcacccagtgcctgcaccagcagctggaggtgattcctggctatgaggagctgctggccgacatcgtgaacatctgtgtggactactatgagaacaagatgtacctgaccccatctgagaagcacatgctgctgaaggtgatgggcttcggcctgtacctgatggatggaaatgtgagcaacatctacaagctggatgccaagaagaggatcaacctgagcaagattgacaagttcttcaagcagctgcaggtggtgcccctgtttggagacatgcagatcgagctggcccgctacatcaagaccagcgcccactatgaggagaacaagagcaagtggacctgcacccagagcagcatcagcccccagtacaacatctgtgagcagatggtgcagatcagagatgaccacatccgcttcatcagcgagctggcccgctacagcaacagcgaggtggtgacaggcagcggcctggacagccagaagagtgatgaggagtaccgggagctgtttgacctggccctgcggggcctgcagctgctgagcaagtggagcgcccacgtgatggaggtgtacagctggaagctggtgcaccccacagacaagttctgcaacaaggactgccctggaacagctgaggagtatgagcgggccacccgctacaactacaccagcgaggagaagtttgcctttgtggaggtgattgccatgatcaagggcctgcaggtgctgatgggccgcatggagagcgtcttcaaccaggccatccggaacaccatctatgctgccctgcaggactttgcccaggtgaccctgcgggagcccctgcggcaggccgtgaggaagaagaagaatgtgctgatctctgtgctgcaggccatcaggaagaccatctgtgactgggagggcggccgggagcccccaaatgacccctgcctgcggggggagaaggaccccaagggcggctttgacatcaaggtgcccaggagagctgtgggccccagcagcacccagctgtacatggtgaggaccatgctggagagcctgattgctgacaagagcggcagcaagaagaccctgcggagcagcctggatggccccatcgtgctggccatcgaggacttccacaagcagagcttcttcttcacccacctgctgaacatcagcgaggccctgcagcagtgctgtgacctgagccagctgtggttccgggagttcttcctggagctgaccatgggccgccgcatccagttccccatcgagatgtccatgccctggatcctgacagaccacatcctggagaccaaggagcccagcatgatggagtatgtgctgtaccccctggacctgtacaatgacagcgcctactatgccctgaccaagttcaagaagcagttcctgtatgatgaaattgaagctgaggtgaacctgtgctttgaccagtttgtgtacaagctggccgaccagatctttgcctactacaaggccatggccggctctgtgctgctggacaagcgcttccgggcagagtgcaagaactacggcgtcatcatcccctacccacccagcaacagatatgagaccctgctgaagcagagacatgtgcagctgctgggccgcagcattgacctgaacagactcatcacccagaggatctctgctgccatgtacaagagcctggaccaggccatcagcagatttgaaagtgaggacctgaccagcatcgtggagctggagtggctgctggagatcaaccggctgacccaccggctgctgtgcaagcacatgaccctggacagctttgatgccatgttccgggaggccaaccacaacgtgtctgccccctacggccgcatcaccctgcacgtgttctgggagctgaactttgacttcctgcccaactactgctacaacggcagcaccaacagatttgtgaggacagccatccccttcacccaggagccccagagggacaagccagccaacgtgcagccctactacctgtatggcagcaagcccctgaacatcgcctacagccacatctacagcagctacagaaactttgtgggccccccccacttcaagaccatctgccgcctgctgggctaccagggcattgctgtggtgatggaggagctgctgaagatcgtgaagagcctgctgcagggcaccatcctgcagtatgtgaagaccctgattgaggtgatgcccaagatctgccgcctgcccaggcatgaatatggcagccctggcatcctggagttcttccaccaccagctgaaggacatcatcgagtatgcagagctgaagacagatgtgttccagagcctgcgggaggtgggcaatgccatcctcttctgcctgctgattgagcaggccctgagccaggaggaggtgtgtgacctgctgcatgctgcccccttccagaacatcctgccccgggtgtacatcaaggagggggagcggctggaggtgaggatgaagaggctggaggccaagtatgcccccctgcacctggtgcccctgattgagcggctgggcaccccccagcagatcgccatcgcccgggagggggacctgctgaccaaggagcggctgtgctgcggcctgtccatgtttgaagtcatcctgacccgcatccgcagctacctgcaggaccccatctggaggggccccccacccaccaacggggtgatgcacgtggatgaatgtgtggagttccaccggctgtggagcgccatgcagtttgtgtactgcatccctgtgggcaccaatgagttcaccgctgagcagtgctttggagatggcctgaactgggccggctgcagcatcatcgtgctgctgggccagcagaggagatttgacctgtttgacttctgctaccacctgctgaaggtgcagaggcaggacggcaaggatgagatcatcaagaatgtgcccctgaagaagatggctgaccgcatcaggaagtaccagatcctgaacaatgaggtgtttgccatcctgaacaagtacatgaagtctgtggagacagacagcagcacagtggagcacgtgcgctgcttccagccccccatccaccagagcctggccaccacctgctag

SEQ ID NO: 149180 - DNA, 4617 bp, synthetic construct
  misc_feature 1..4617: note = Description of Artificial Sequence: Synthetic coding sequence
  source 1..4617: mol_type = other DNA
atggagcccaggatggagagctgcctggcccaggtgctgcagaaggatgtgggcaagaggctgcaggtgggccaggagctgattgactacttcagtgacaagcagaagtctgctgacctggagcatgaccagaccatgctggacaagctggtggatggcctggccacctcctgggtgaacagcagcaactacaaggtggtgctgctgggcatggacatcctgagcgccctggtgacccggctgcaggaccgcttcaaggcccagattggaacagtgctgcccagcctgattgaccggctgggagatgccaaggacagcgtgcgggagcaggaccagaccctgctgctgaagatcatggaccaggccgccaacccccagtatgtgtgggacaggatgctgggcggcttcaagcacaagaacttccgcacccgggagggcatctgcctgtgcctgattgccaccctgaatgccagcggggcccagaccctgaccctgagcaagatcgtgccccacatctgcaacctgctgggggaccccaacagccaggtgagagatgctgccatcaacagcctggtggagatctacagacatgtgggggagcgggtgcgggctgacctgagcaagaagggcctgccccagagccggctgaatgtcatcttcaccaagtttgatgaggtgcagaagagcggcaacatgatccagagcgccaatgacaagaactttgatgatgaggacagcgtggatggcaaccggcccagcagcgccagcagcaccagcagcaaggccccacccagcagcagaagaaatgtgggcatgggcaccacccggcggctgggcagcagcaccctgggcagcaagagcagcgctgccaaggagggcgctggagctgtggatgaggaggacttcatcaaggcctttgatgatgtgcctgtggtgcagatctacagcagccgggacctggaggagagcatcaacaagatccgggagatcctgagtgatgacaagcatgactgggagcagagggtgaatgccctgaagaagatccgcagcctgctgctggccggggctgctgaatatgacaacttcttccagcacctgcggctgctggatggagccttcaagctgagcgccaaggacctgcggagccaggtggtgcgggaggcctgcatcaccctgggccacctgagctctgtgctgggcaacaagtttgaccatggagctgaggccatcatgcccaccatcttcaacctgatccccaacagcgccaagatcatggccaccagcggcgtggtggccgtgcggctcatcatccgccacacccacatccccaggctcatccctgtgatcaccagcaactgcaccagcaagtctgtggccgtgagaagacgctgctttgagttcctggacctgctgctgcaggagtggcagacccacagcctggagcggcacatctctgtgctggccgagaccatcaagaagggcatccatgatgctgacagcgaggcccgcatcgaggccaggaagtgctactggggcttccacagccacttcagccgggaggccgagcacctgtaccacaccctggagagcagctaccagaaggccctgcagagccacctgaagaacagcgacagcatcgtgtccctgccccagagcgacaggagcagcagcagcagccaggagagcctgaaccggcccctgagcgccaagaggagccccaccggcagcaccaccagccgggccagcacagtgtccaccaagtctgtgtccaccaccggcagcctgcagaggagcagaagtgacattgatgtgaatgctgctgccagcgccaagagcaaggtgagcagcagcagcggcaccacccccttcagcagcgctgctgccctgcccccaggcagctatgccagcctgggccgcatccgcacccggcggcagagcagcggcagcgccaccaacgtggccagcaccccagacaacagaggccgcagccgggccaaggtggtgtcccagagccagaggagccgcagcgccaacccagctggggccggcagccgcagcagcagccctgggaagctgctgggcagcggctatggaggcctgactggaggcagcagccggggcccccctgtgacccccagcagcgagaagaggagcaagatccccaggagccagggctgcagccgggagaccagccccaacagaattggcctggcccggagcagccgcatcccccggcccagcatgagccagggctgcagccgggacaccagccgggagagcagccgggacaccagccctgcccggggcttcccccccctggaccgcttcggcctgggccagcccggccgcatccctggctctgtgaatgccatgagggtgctgagcaccagcacagacctggaggccgctgtggctgatgccctgaagaagcctgtgagaagaagatatgagccctacggcatgtacagtgatgatgatgccaacagtgatgccagctctgtgtgcagcgagaggagctatggcagcagaaatggaggcatcccccactacctgcggcagacagaagatgtggccgaggtgctgaaccactgtgccagcagcaactggagcgagaggaaggagggcctgctgggcctgcagaacctgctgaagagccagaggaccctgagccgggtggagctgaagaggctgtgtgagatcttcaccaggatgtttgctgacccccacagcaagagggtcttctccatgttcctggagaccctggtggacttcatcatcatccacaaggatgacctgcaggactggctgtttgtgctgctgacccagctgctgaagaagatgggcgctgacctgctgggctctgtgcaggccaaggtgcagaaggccctggatgtgacccgggacagcttcccctttgaccagcagttcaacatcctgatgaggttcatcgtggaccagacccagacccccaacctgaaggtgaaggtggccatcctgaagtacatcgagagcctggcccggcagatggaccccacagactttgtgaacagcagcgagacccggctggccgtgagccgcatcatcacctggaccacagagcccaagagcagtgatgtgaggaaggccgcccagatcgtgctgatcagcctgtttgagctgaacaccccagagttcaccatgctgctgggcgccctgcccaagaccttccaggatggagccaccaagctgctgcacaaccacctgaagaacagcagcaacacctctgtgggcagccccagcaacaccatcggccgcacccccagccgccacaccagcagcaggaccagccccctgaccagccccaccaactgcagccatggaggcctgagccccagccggctgtggggctggagcgcagatggcctggccaagcaccccccacccttcagccagcccaacagcatccccacagcccccagccacaaggccctgcggcgcagctacagccccagcatgctggactatgacacagagaacctgaacagcgaggagatctacagcagcctgcggggcgtgacagaggccatcgagaagttctccttccgcagccaggaggacctgaatgagcccatcaagagagatggcaagaaggaatgtgacatcgtgtccagagatggaggagctgccagccctgccacagagggccggggcggcagcgaggtggagggcggccgcacagccctggacaacaagaccagcctgctgaacacccagcccccccgggccttccctggcccccgggcccgggactacaacccctacccctacagtgatgccatcaacacctatgacaagacagccctgaaggaggccgtgtttgatgatgacatggagcagctgagagatgtgcccatcgaccacagcgacctggtggccgacctgctgaaggagctgagcaaccacaatgaaagagtggaggagaggaagggggccctgctggagctgctgaagatcacccgggaggacagcctgggcgtgtgggaggagcacttcaagaccatcctgctgctgctgctggagaccctgggggacaaggaccacagcatccgggccctggccctgcgggtgctgcgggagatcctgaggaaccagcctgcccgcttcaagaactatgcagagctgaccatcatgaagaccctggaggcccacaaggacagccacaaggaggtggtgcgggctgctgaggaggccgccagcaccctggccagcagcatccaccctgagcagtgcatcaaggtgctgtgccccatcatccagacagctgactaccccatcaacctggccgccatcaagatgcagaccaaggtggtggagagaattgccaaggagagcctgctgcagctgctggtggacatcatccctggcctgctgcagggctatgacaacacagagagctctgtgaggaaggccagcgtcttctgcctggtggccatctacagcgtgattggagaggacctgaagccccacctggcccagctgaccggcagcaagatgaagctgctgaacctgtacatcaagagggcccagaccaccaacagcaacagcagcagcagcagtgatgtgtccacccacagctag

SEQ ID NO: 149181 - DNA, 4437 bp, synthetic construct
  misc_feature 1..4437: note = Description of Artificial Sequence: Synthetic coding sequence
  source 1..4437: mol_type = other DNA
atggagcccaggatggagagctgcctggcccaggtgctgcagaaggatgtgggcaagaggctgcaggtgggccaggagctgattgactacttcagtgacaagcagaagtctgctgacctggagcatgaccagaccatgctggacaagctggtggatggcctggccacctcctgggtgaacagcagcaactacaaggtggtgctgctgggcatggacatcctgagcgccctggtgacccggctgcaggaccgcttcaaggcccagattggaacagtgctgcccagcctgattgaccggctgggagatgccaaggacagcgtgcgggagcaggaccagaccctgctgctgaagatcatggaccaggccgccaacccccagtatgtgtgggacaggatgctgggcggcttcaagcacaagaacttccgcacccgggagggcatctgcctgtgcctgattgccaccctgaatgccagcggggcccagaccctgaccctgagcaagatcgtgccccacatctgcaacctgctgggggaccccaacagccaggtgagagatgctgccatcaacagcctggtggagatctacagacatgtgggggagcgggtgcgggctgacctgagcaagaagggcctgccccagagccggctgaatgtcatcttcaccaagtttgatgaggtgcagaagagcggcaacatgatccagagcgccaatgacaagaactttgatgatgaggacagcgtggatggcaaccggcccagcagcgccagcagcaccagcagcaaggccccacccagcagcagaagaaatgtgggcatgggcaccacccggcggctgggcagcagcaccctgggcagcaagagcagcgctgccaaggagggcgctggagctgtggatgaggaggacttcatcaaggcctttgatgatgtgcctgtggtgcagatctacagcagccgggacctggaggagagcatcaacaagatccgggagatcctgagtgatgacaagcatgactgggagcagagggtgaatgccctgaagaagatccgcagcctgctgctggccggggctgctgaatatgacaacttcttccagcacctgcggctgctggatggagccttcaagctgagcgccaaggacctgcggagccaggtggtgcgggaggcctgcatcaccctgggccacctgagctctgtgctgggcaacaagtttgaccatggagctgaggccatcatgcccaccatcttcaacctgatccccaacagcgccaagatcatggccaccagcggcgtggtggccgtgcggctcatcatccgccacacccacatccccaggctcatccctgtgatcaccagcaactgcaccagcaagtctgtggccgtgagaagacgctgctttgagttcctggacctgctgctgcaggagtggcagacccacagcctggagcggcacatctctgtgctggccgagaccatcaagaagggcatccatgatgctgacagcgaggcccgcatcgaggccaggaagtgctactggggcttccacagccacttcagccgggaggccgagcacctgtaccacaccctggagagcagctaccagaaggccctgcagagccacctgaagaacagcgacagcatcgtgtccctgccccagagcgacaggagcagcagcagcagccaggagagcctgaaccggcccctgagcgccaagaggagccccaccggcagcaccaccagccgggccagcacagtgtccaccaagtctgtgtccaccaccggcagcctgcagaggagcagaagtgacattgatgtgaatgctgctgccagcgccaagagcaaggtgagcagcagcagcggcaccacccccttcagcagcgctgctgccctgcccccaggcagctatgccagcctggatggcaccaccaccaaggccgagggccgcatccgcacccggcggcagagcagcggcagcgccaccaacgtggccagcaccccagacaacagaggccgcagccgggccaaggtggtgtcccagagccagaggagccgcagcgccaacccagctggggccggcagccgcagcagcagccctgggaagctgctgggcagcggctatggaggcctgactggaggcagcagccggggcccccctgtgacccccagcagcgagaagaggagcaagatccccaggagccagggctgcagccgggagaccagccccaacagaattggcctggaccgcttcggcctgggccagcccggccgcatccctggctctgtgaatgccatgagggtgctgagcaccagcacagacctggaggccgctgtggctgatgccctgctgctgggggacagccgcagcaagaagaagcctgtgagaagaagatatgagccctacggcatgtacagtgatgatgatgccaacagtgatgccagctctgtgtgcagcgagaggagctatggcagcagaaatggaggcatcccccactacctgcggcagacagaagatgtggccgaggtgctgaaccactgtgccagcagcaactggagcgagaggaaggagggcctgctgggcctgcagaacctgctgaagagccagaggaccctgagccgggtggagctgaagaggctgtgtgagatcttcaccaggatgtttgctgacccccacagcaaggtgttctccatgttcctggagaccctggtggacttcatcatcatccacaaggatgacctgcaggactggctgtttgtgctgctgacccagctgctgaagaagatgggcgctgacctgctgggctctgtgcaggccaaggtgcagaaggccctggatgtgacccgggacagcttcccctttgaccagcagttcaacatcctgatgaggttcatcgtggaccagacccagacccccaacctgaaggtgaaggtggccatcctgaagtacatcgagagcctggcccggcagatggaccccacagactttgtgaacagcagcgagacccggctggccgtgagccgcatcatcacctggaccacagagcccaagagcagtgatgtgaggaaggccgcccagatcgtgctgatcagcctgtttgagctgaacaccccagagttcaccatgctgctgggcgccctgcccaagaccttccaggatggagccaccaagctgctgcacaaccacctgaagaacagcagcaacacctctgtgggcagccccagcaacaccatcggccgcacccccagccgccacaccagcagcaggaccagccccctgaccagccccaccaactgcagccacggcggcctgagccccagcatgctggactatgacacagagaacctgaacagcgaggagatctacagcagcctgcggggcgtgacagaggccatcgagaagttctccttccgcagccaggaggacctgaatgagcccatcaagagagatggcaagaaggaatgtgacatcgtgtccagagatggaggagctgccagccctgccacagagggccggggcggcagcgaggtggagggcggccgcacagccctggacaacaagaccagcctgctgaacacccagcccccccgggccttccctggcccccgggcccgggactacaacccctacccctacagtgatgccatcaacacctatgacaagacagccctgaaggaggccgtgtttgatgatgacatggagcagctgagagatgtgcccatcgaccacagcgacctggtggccgacctgctgaaggagctgagcaaccacaatgaaagagtggaggagaggaagggggccctgctggagctgctgaagatcacccgggaggacagcctgggcgtgtgggaggagcacttcaagaccatcctgctgctgctgctggagaccctgggggacaaggaccacagcatccgggccctggccctgcgggtgctgcgggagatcctgaggaaccagcctgcccgcttcaagaactatgcagagctgaccatcatgaagaccctggaggcccacaaggacagccacaaggaggtggtgcgggctgctgaggaggccgccagcaccctggccagcagcatccaccctgagcagtgcatcaaggtgctgtgccccatcatccagacagctgactaccccatcaacctggccgccatcaagatgcagaccaaggtggtggagagaattgccaaggagagcctgctgcagctgctggtggacatcatccctggcctgctgcagggctatgacaacacagagagctctgtgaggaaggccagcgtcttctgcctggtggccatctacagcgtgattggagaggacctgaagccccacctggcccagctgaccggcagcaagatgaagctgctgaacctgtacatcaagagggcccagaccaccaacagcaacagcagcagcagcagtgatgtgtccacccacagctag

SEQ ID NO: 149182 - DNA, 4416 bp, synthetic construct
  misc_feature 1..4416: note = Description of Artificial Sequence: Synthetic coding sequence
  source 1..4416: mol_type = other DNA
atggagcccaggatggagagctgcctggcccaggtgctgcagaaggatgtgggcaagaggctgcaggtgggccaggagctgattgactacttcagtgacaagcagaagtctgctgacctggagcatgaccagaccatgctggacaagctggtggatggcctggccacctcctgggtgaacagcagcaactacaaggtggtgctgctgggcatggacatcctgagcgccctggtgacccggctgcaggaccgcttcaaggcccagattggaacagtgctgcccagcctgattgaccggctgggagatgccaaggacagcgtgcgggagcaggaccagaccctgctgctgaagatcatggaccaggccgccaacccccagtatgtgtgggacaggatgctgggcggcttcaagcacaagaacttccgcacccgggagggcatctgcctgtgcctgattgccaccctgaatgccagcggggcccagaccctgaccctgagcaagatcgtgccccacatctgcaacctgctgggggaccccaacagccaggtgagagatgctgccatcaacagcctggtggagatctacagacatgtgggggagcgggtgcgggctgacctgagcaagaagggcctgccccagagccggctgaatgtcatcttcaccaagtttgatgaggtgcagaagagcggcaacatgatccagagcgccaatgacaagaactttgatgatgaggacagcgtggatggcaaccggcccagcagcgccagcagcaccagcagcaaggccccacccagcagcagaagaaatgtgggcatgggcaccacccggcggctgggcagcagcaccctgggcagcaagagcagcgctgccaaggagggcgctggagctgtggatgaggaggacttcatcaaggcctttgatgatgtgcctgtggtgcagatctacagcagccgggacctggaggagagcatcaacaagatccgggagatcctgagtgatgacaagcatgactgggagcagagggtgaatgccctgaagaagatccgcagcctgctgctggccggggctgctgaatatgacaacttcttccagcacctgcggctgctggatggagccttcaagctgagcgccaaggacctgcggagccaggtggtgcgggaggcctgcatcaccctgggccacctgagctctgtgctgggcaacaagtttgaccatggagctgaggccatcatgcccaccatcttcaacctgatccccaacagcgccaagatcatggccaccagcggcgtggtggccgtgcggctcatcatccgccacacccacatccccaggctcatccctgtgatcaccagcaactgcaccagcaagtctgtggccgtgagaagacgctgctttgagttcctggacctgctgctgcaggagtggcagacccacagcctggagcggcacatctctgtgctggccgagaccatcaagaagggcatccatgatgctgacagcgaggcccgcatcgaggccaggaagtgctactggggcttccacagccacttcagccgggaggccgagcacctgtaccacaccctggagagcagctaccagaaggccctgcagagccacctgaagaacagcgacagcatcgtgtccctgccccagagcgacaggagcagcagcagcagccaggagagcctgaaccggcccctgagcgccaagaggagccccaccggcagcaccaccagccgggccagcacagtgtccaccaagtctgtgtccaccaccggcagcctgcagaggagcagaagtgacattgatgtgaatgctgctgccagcgccaagagcaaggtgagcagcagcagcggcaccacccccttcagcagcgctgctgccctgcccccaggcagctatgccagcctgggccgcatccgcacccggcggcagagcagcggcagcgccaccaacgtggccagcaccccagacaacagaggccgcagccgggccaaggtggtgtcccagagccagaggagccgcagcgccaacccagctggggccggcagccgcagcagcagccctgggaagctgctgggcagcggctatggaggcctgactggaggcagcagccggggcccccctgtgacccccagcagcgagaagaggagcaagatccccaggagccagggctgcagccgggagaccagccccaacagaattggcctggaccgcttcggcctgggccagcccggccgcatccctggctctgtgaatgccatgagggtgctgagcaccagcacagacctggaggccgctgtggctgatgccctgctgctgggggacagccgcagcaagaagaagcctgtgagaagaagatatgagccctacggcatgtacagtgatgatgatgccaacagtgatgccagctctgtgtgcagcgagaggagctatggcagcagaaatggaggcatcccccactacctgcggcagacagaagatgtggccgaggtgctgaaccactgtgccagcagcaactggagcgagaggaaggagggcctgctgggcctgcagaacctgctgaagagccagaggaccctgagccgggtggagctgaagaggctgtgtgagatcttcaccaggatgtttgctgacccccacagcaagctggtgttctccatgttcctggagaccctggtggacttcatcatcatccacaaggatgacctgcaggactggctgtttgtgctgctgacccagctgctgaagaagatgggcgctgacctgctgggctctgtgcaggccaaggtgcagaaggccctggatgtgacccgggacagcttcccctttgaccagcagttcaacatcctgatgaggttcatcgtggaccagacccagacccccaacctgaaggtgaaggtggccatcctgaagtacatcgagagcctggcccggcagatggaccccacagactttgtgaacagcagcgagacccggctggccgtgagccgcatcatcacctggaccacagagcccaagagcagtgatgtgaggaaggccgcccagatcgtgctgatcagcctgtttgagctgaacaccccagagttcaccatgctgctgggcgccctgcccaagaccttccaggatggagccaccaagctgctgcacaaccacctgaagaacagcagcaacacctctgtgggcagccccagcaacaccatcggccgcacccccagccgccacaccagcagcaggaccagccccctgaccagccccaccaactgcagccatggaggcctgagccccagcatgctggactatgacacagagaacctgaacagcgaggagatctacagcagcctgcggggcgtgacagaggccatcgagaagttctccttccgcagccaggaggacctgaatgagcccatcaagagagatggcaagaaggaatgtgacatcgtgtccagagatggaggagctgccagccctgccacagagggccggggcggcagcgaggtggagggcggccgcacagccctggacaacaagaccagcctgctgaacacccagcccccccgggccttccctggcccccgggcccgggactacaacccctacccctacagtgatgccatcaacacctatgacaagacagccctgaaggaggccgtgtttgatgatgacatggagcagctgagagatgtgcccatcgaccacagcgacctggtggccgacctgctgaaggagctgagcaaccacaatgaaagagtggaggagaggaaaggagccctgctggagctgctgaagatcacccgggaggacagcctgggcgtgtgggaggagcacttcaagaccatcctgctgctgctgctggagaccctgggggacaaggaccacagcatccgggccctggccctgcgggtgctgcgggagatcctgaggaaccagcctgcccgcttcaagaactatgcagagctgaccatcatgaagaccctggaggcccacaaggacagccacaaggaggtggtgcgggctgctgaggaggccgccagcaccctggccagcagcatccaccctgagcagtgcatcaaggtgctgtgccccatcatccagacagctgactaccccatcaacctggccgccatcaagatgcagaccaaggtggtggagcgcatcgccaaggagagcctgctgcagctgctggtggacatcatccctggcctgctgcagggctatgacaacacagagagctctgtgaggaaggcctctgtgttctgcctggtggccatctacagcgtcatcggggaggacctgaagccccacctggcccagctgaccggcagcaagatgaagctgctgaacctgtacatcaagagggcccagaccaccaacagcaacagcagcagcagcagtgatgtgtccacccacagctag

SEQ ID NO: 149183 - DNA, 2115 bp, synthetic construct
  misc_feature 1..2115: note = Description of Artificial Sequence: Synthetic coding sequence
  source 1..2115: mol_type = other DNA
tgaaccaagtttgatgaggtgcagaagagcggcaacatgatccagagcgccaatgacaagaactttgatgatgaagattctgtggatggcaaccggcccagcagcgccagcagcaccagcagcaaggccccacccagcagcagaagaaatgtgggcatgggcaccacccggcggctgggcagcagcaccctgggcagcaagagcagcgctgccaaggagggcgctggagctgtggatgaggaggacttcatcaaggcctttgatgatgtgcctgtggtgcagatctacagcagccgggacctggaggagagcatcaacaagatccgggagatcctgagtgatgacaagcatgactgggagcagagggtgaatgccctgaagaagatccgcagcctgctgctggccggggctgctgaatatgacaacttcttccagcacctgcggctgctggatggagccttcaagctgagcgccaaggacctgcggagccaggtggtgcgggaggcctgcatcaccctgggccacctgagctctgtgctgggcaacaagtttgaccacggggctgaggccatcatgcccaccatcttcaacctgatccccaacagcgccaagatcatggccaccagcggcgtggtggccgtgcggctcatcatccgccacacccacatccccaggctcatccctgtgatcaccagcaactgcaccagcaagtctgtggccgtgagaagacgctgctttgagttcctggacctgctgctgcaggagtggcagacccacagcctggagcggcacatctctgtgctggccgagaccatcaagaagggcatccatgatgctgacagcgaggccagaattgaggccaggaagtgctactggggcttccacagccacttcagccgggaggccgagcacctgtaccacaccctggagagcagctaccagaaggccctgcagagccacctgaagaacagcgacagcatcgtgtccctgccccagagcgacaggagcagcagcagcagccaggagagcctgaaccggcccctgagcgccaagaggagccccaccggcagcaccaccagccgggccagcacagtgtccaccaagtctgtgtccaccaccggcagcctgcagaggagcagaagtgacattgatgtgaatgctgctgccagcgccaagagcaaggtgagcagcagcagcggcaccacccccttcagcagcgctgctgccctgcccccaggcagctatgccagcctgggccgcatccgcacccggcggcagagcagcggcagcgccaccaacgtggccagcaccccagacaacagaggccgcagccgggccaaggtggtgtcccagagccagaggagccgcagcgccaacccagctggagctggcagccgcagcagcagccctgggaagctgctgggcagcggctacggcggcctgaccggcggcagcagccggggcccccctgtgacccccagcagcgagaagaggagcaagatccccaggagccagggctgcagccgggagaccagccccaaccgcatcggcctggacagatttggcctgggccagcccggccgcatccctggctctgtgaatgccatgagggtgctgagcaccagcacagacctggaggccgctgtggctgatgccctgctgctgggggacagccgcagcaagaagaagcctgtgagaagaagatatgagccctacggcatgtacagtgatgatgatgccaacagtgatgccagctctgtgtgcagcgagaggagctatggcagcagaaatggaggcatcccccactacctgcggcagacagaagatgtggccgaggtgctgaaccactgtgccagcagcaactggagcgagaggaaggagggcctgctgggcctgcagaacctgctgaagagccagaggaccctgagccgggtggagctgaagaggctgtgtgagatcttcaccaggatgtttgctgacccccacagcaagattgctgacagcgaggctgaatgtgaggacaaggagggcaacctcttccccagcgaggtgtcctgcaccgtgtccttccagtatgtgtttggagacagctgtggcttctacaacaacagctag

SEQ ID NO: 149184 - DNA, 4485 bp, synthetic construct
  misc_feature 1..4485: note = Description of Artificial Sequence: Synthetic coding sequence
  source 1..4485: mol_type = other DNA
atggagcccaggatggagagctgcctggcccaggtgctgcagaaggatgtgggcaagaggctgcaggtgggccaggagctgattgactacttcagtgacaagcagaagtctgctgacctggagcatgaccagaccatgctggacaagctggtggatggcctggccacctcctgggtgaacagcagcaactacaaggtggtgctgctgggcatggacatcctgagcgccctggtgacccggctgcaggaccgcttcaaggcccagattggaacagtgctgcccagcctgattgaccggctgggagatgccaaggacagcgtgcgggagcaggaccagaccctgctgctgaagatcatggaccaggccgccaacccccagtatgtgtgggacaggatgctgggcggcttcaagcacaagaacttccgcacccgggagggcatctgcctgtgcctgattgccaccctgaatgccagcggggcccagaccctgaccctgagcaagatcgtgccccacatctgcaacctgctgggggaccccaacagccaggtgagagatgctgccatcaacagcctggtggagatctacagacatgtgggggagcgggtgcgggctgacctgagcaagaagggcctgccccagagccggctgaatgtcatcttcaccaagtttgatgaggtgcagaagagcggcaacatgatccagagcgccaatgacaagaactttgatgatgaggacagcgtggatggcaaccggcccagcagcgccagcagcaccagcagcaaggccccacccagcagcagaagaaatgtgggcatgggcaccacccggcggctgggcagcagcaccctgggcagcaagagcagcgctgccaaggagggcgctggagctgtggatgaggaggacttcatcaaggcctttgatgatgtgcctgtggtgcagatctacagcagccgggacctggaggagagcatcaacaagatccgggagatcctgagtgatgacaagcatgactgggagcagagggtgaatgccctgaagaagatccgcagcctgctgctggccggggctgctgaatatgacaacttcttccagcacctgcggctgctggatggagccttcaagctgagcgccaaggacctgcggagccaggtggtgcgggaggcctgcatcaccctgggccacctgagctctgtgctgggcaacaagtttgaccatggagctgaggccatcatgcccaccatcttcaacctgatccccaacagcgccaagatcatggccaccagcggcgtggtggccgtgcggctcatcatccgccacacccacatccccaggctcatccctgtgatcaccagcaactgcaccagcaagtctgtggccgtgagaagacgctgctttgagttcctggacctgctgctgcaggagtggcagacccacagcctggagcggcacatctctgtgctggccgagaccatcaagaagggcatccatgatgctgacagcgaggcccgcatcgaggccaggaagtgctactggggcttccacagccacttcagccgggaggccgagcacctgtaccacaccctggagagcagctaccagaaggccctgcagagccacctgaagaacagcgacagcatcgtgtccctgccccagagcgacaggagcagcagcagcagccaggagagcctgaaccggcccctgagcgccaagaggagccccaccggcagcaccaccagccgggccagcacagtgtccaccaagtctgtgtccaccaccggcagcctgcagaggagcagaagtgacattgatgtgaatgctgctgccagcgccaagagcaaggtgagcagcagcagcggcaccacccccttcagcagcgctgctgccctgcccccaggcagctatgccagcctgggccgcatccgcacccggcggcagagcagcggcagcgccaccaacgtggccagcaccccagacaacagaggccgcagccgggccaaggtggtgtcccagagccagaggagccgcagcgccaacccagctggggccggcagccgcagcagcagccctgggaagctgctgggcagcggctatggaggcctgactggaggcagcagccggggcccccctgtgacccccagcagcgagaagaggagcaagatccccaggagccagggctgcagccgggagaccagccccaacagaattggcctggaccgcttcggcctgggccagcccggccgcatccctggctctgtgaatgccatgagggtgctgagcaccagcacagacctggaggccgctgtggctgatgccctggtgcggggcaccagcacaggcaagaagaagcctgtgagaagaagatatgagccctacggcatgtacagtgatgatgatgccaacagtgatgccagctctgtgtgcagcgagaggagctatggcagcagaaatggaggcatcccccactacctgcggcagacagaagatgtggccgaggtgctgaaccactgtgccagcagcaactggagcgagaggaaggagggcctgctgggcctgcagaacctgctgaagagccagaggaccctgagccgggtggagctgaagaggctgtgtgagatcttcaccaggatgtttgctgacccccacagcaagattgctgacagcgaggccgagtgtgaggacaaggagggcaacctcttccccagcgaggtgtcctgcaccagggtcttctccatgttcctggagaccctggtggacttcatcatcatccacaaggatgacctgcaggactggctgtttgtgctgctgacccagctgctgaagaagatgggcgctgacctgctgggctctgtgcaggccaaggtgcagaaggccctggatgtgacccgggacagcttcccctttgaccagcagttcaacatcctgatgaggttcatcgtggaccagacccagacccccaacctgaaggtgaaggtggccatcctgaagtacatcgagagcctggcccggcagatggaccccacagactttgtgaacagcagcgagacccggctggccgtgagccgcatcatcacctggaccacagagcccaagagcagtgatgtgaggaaggccgcccagatcgtgctgatcagcctgtttgagctgaacaccccagagttcaccatgctgctgggcgccctgcccaagaccttccaggatggagccaccaagctgctgcacaaccacctgaagaacagcagcaacacctctgtgggcagccccagcaacaccatcggccgcacccccagccgccacaccagcagcaggaccagccccctgaccagccccaccaactgcagccacggcggcctgagccccagcatgctggactatgacacagagaacctgaacagcgaggagatctacagcagcctgcggggcgtgacagaggccatcgagaagttctccttccgcagccaggaggacctgaatgagcccatcaagagagatggcaagaaggaatgtgacatcgtgtccagagatggaggagctgccagccctgccacagagggccggggcggcagcgaggtggagggcggccgcacagccctggacaacaagaccagcctgctgaacacccagcccccccgggccttccctggcccccgggcccgggactacaacccctacccctacagtgatgccatcaacacctatgacaagacagccctgaaggaggccgtgtttgatgatgacatggagcagctgagagatgtgcccatcgaccacagcgacctggtggccgacctgctgaaggagctgagcaaccacaatgaaagagtggaggagaggaagggggccctgctggagctgctgaagatcacccgggaggacagcctgggcgtgtgggaggagcacttcaagaccatcctgctgctgctgctggagaccctgggggacaaggaccacagcatccgggccctggccctgcgggtgctgcgggagatcctgaggaaccagcctgcccgcttcaagaactatgcagagctgaccatcatgaagaccctggaggcccacaaggacagccacaaggaggtggtgcgggctgctgaggaggccgccagcaccctggccagcagcatccaccctgagcagtgcatcaaggtgctgtgccccatcatccagacagctgactaccccatcaacctggccgccatcaagatgcagaccaaggtggtggagagaattgccaaggagagcctgctgcagctgctggtggacatcatccctggcctgctgcagggctatgacaacacagagagctctgtgaggaaggccagcgtcttctgcctggtggccatctacagcgtgattggagaggacctgaagccccacctggcccagctgaccggcagcaagatgaagctgctgaacctgtacatcaagagggcccagaccaccaacagcaacagcagcagcagcagtgatgtgtccacccacagctag

SEQ ID NO: 149185 - DNA, 4434 bp, synthetic construct
  misc_feature 1..4434: note = Description of Artificial Sequence: Synthetic coding sequence
  source 1..4434: mol_type = other DNA
atggagcccaggatggagagctgcctggcccaggtgctgcagaaggatgtgggcaagaggctgcaggtgggccaggagctgattgactacttcagtgacaagcagaagtctgctgacctggagcatgaccagaccatgctggacaagctggtggatggcctggccacctcctgggtgaacagcagcaactacaaggtggtgctgctgggcatggacatcctgagcgccctggtgacccggctgcaggaccgcttcaaggcccagattggaacagtgctgcccagcctgattgaccggctgggagatgccaaggacagcgtgcgggagcaggaccagaccctgctgctgaagatcatggaccaggccgccaacccccagtatgtgtgggacaggatgctgggcggcttcaagcacaagaacttccgcacccgggagggcatctgcctgtgcctgattgccaccctgaatgccagcggggcccagaccctgaccctgagcaagatcgtgccccacatctgcaacctgctgggggaccccaacagccaggtgagagatgctgccatcaacagcctggtggagatctacagacatgtgggggagcgggtgcgggctgacctgagcaagaagggcctgccccagagccggctgaatgtcatcttcaccaagtttgatgaggtgcagaagagcggcaacatgatccagagcgccaatgacaagaactttgatgatgaggacagcgtggatggcaaccggcccagcagcgccagcagcaccagcagcaaggccccacccagcagcagaagaaatgtgggcatgggcaccacccggcggctgggcagcagcaccctgggcagcaagagcagcgctgccaaggagggcgctggagctgtggatgaggaggacttcatcaaggcctttgatgatgtgcctgtggtgcagatctacagcagccgggacctggaggagagcatcaacaagatccgggagatcctgagtgatgacaagcatgactgggagcagagggtgaatgccctgaagaagatccgcagcctgctgctggccggggctgctgaatatgacaacttcttccagcacctgcggctgctggatggagccttcaagctgagcgccaaggacctgcggagccaggtggtgcgggaggcctgcatcaccctgggccacctgagctctgtgctgggcaacaagtttgaccatggagctgaggccatcatgcccaccatcttcaacctgatccccaacagcgccaagatcatggccaccagcggcgtggtggccgtgcggctcatcatccgccacacccacatccccaggctcatccctgtgatcaccagcaactgcaccagcaagtctgtggccgtgagaagacgctgctttgagttcctggacctgctgctgcaggagtggcagacccacagcctggagcggcacatctctgtgctggccgagaccatcaagaagggcatccatgatgctgacagcgaggcccgcatcgaggccaggaagtgctactggggcttccacagccacttcagccgggaggccgagcacctgtaccacaccctggagagcagctaccagaaggccctgcagagccacctgaagaacagcgacagcatcgtgtccctgccccagagcgacaggagcagcagcagcagccaggagagcctgaaccggcccctgagcgccaagaggagccccaccggcagcaccaccagccgggccagcacagtgtccaccaagtctgtgtccaccaccggcagcctgcagaggagcagaagtgacattgatgtgaatgctgctgccagcgccaagagcaaggtgagcagcagcagcggcaccacccccttcagcagcgctgctgccctgcccccaggcagctatgccagcctggagagccgccacatgagggaggacatggagtacatcggcctggacagcggccgcatccgcacccggcggcagagcagcggcagcgccaccaacgtggccagcaccccagacaacagaggccgcagccgggccaaggtggtgtcccagagccagcccggcagccgcagcagcagccctgggaagctgctgggcagcggctacggcggcctgaccggcggcagcagccggggcccccctgtgacccccagcagcgagaagaggagcaagatccccaggagccagggctgcagccgggagaccagccccaaccgcatcggcctggacagatttggcctgggccagcccggccgcatccctggctctgtgaatgccatgagggtgctgagcaccagcacagacctggaggccgctgtggctgatgccctgctgctgggggacagccgcagcaagaagcctgtgagaagaagatatgagccctacggcatgtacagtgatgatgatgccaacagtgatgccagctctgtgtgcagcgagaggagctatggcagcagaaatggaggcatcccccactacctgcggcagacagaagatgtggccgaggtgctgaaccactgtgccagcagcaactggagcgagaggaaggagggcctgctgggcctgcagaacctgctgaagagccagaggaccctgagccgggtggagctgaagaggctgtgtgagatcttcaccaggatgtttgctgacccccacagcaagagggtcttctccatgttcctggagaccctggtggacttcatcatcatccacaaggatgacctgcaggactggctgtttgtgctgctgacccagctgctgaagaagatgggcgctgacctgctgggctctgtgcaggccaaggtgcagaaggccctggatgtgacccgggacagcttcccctttgaccagcagttcaacatcctgatgaggttcatcgtggaccagacccagacccccaacctgaaggtgaaggtggccatcctgaagtacatcgagagcctggcccggcagatggaccccacagactttgtgaacagcagcgagacccggctggccgtgagccgcatcatcacctggaccacagagcccaagagcagtgatgtgaggaaggccgcccagatcgtgctgatcagcctgtttgagctgaacaccccagagttcaccatgctgctgggcgccctgcccaagaccttccaggatggagccaccaagctgctgcacaaccacctgaagaacagcagcaacacctctgtgggcagccccagcaacaccatcggccgcacccccagccgccacaccagcagcaggaccagccccctgaccagccccaccaactgcagccatggaggcctgagccccagcatgctggactatgacacagagaacctgaacagcgaggagatctacagcagcctgcggggcgtgacagaggccatcgagaagttctccttccgcagccaggaggacctgaatgagcccatcaagagagatggcaagaaggaatgtgacatcgtgtccagagatggaggagctgccagccctgccacagagggccggggcggcagcgaggtggagggcggccgcacagccctggacaacaagaccagcctgctgaacacccagcccccccgggccttccctggcccccgggcccgggactacaacccctacccctacagtgatgccatcaacacctatgacaagacagccctgaaggaggccgtgtttgatgatgacatggagcagctgagagatgtgcccatcgaccacagcgacctggtggccgacctgctgaaggagctgagcaaccacaatgaaagagtggaggagaggaaaggagccctgctggagctgctgaagatcacccgggaggacagcctgggcgtgtgggaggagcacttcaagaccatcctgctgctgctgctggagaccctgggggacaaggaccacagcatccgggccctggccctgcgggtgctgcgggagatcctgaggaaccagcctgcccgcttcaagaactatgcagagctgaccatcatgaagaccctggaggcccacaaggacagccacaaggaggtggtgcgggctgctgaggaggccgccagcaccctggccagcagcatccaccctgagcagtgcatcaaggtgctgtgccccatcatccagacagctgactaccccatcaacctggccgccatcaagatgcagaccaaggtggtggagcgcatcgccaaggagagcctgctgcagctgctggtggacatcatccctggcctgctgcagggctatgacaacacagagagctctgtgaggaaggcctctgtgttctgcctggtggccatctacagcgtcatcggggaggacctgaagccccacctggcccagctgaccggcagcaagatgaagctgctgaacctgtacatcaagagggcccagaccaccaacagcaacagcagcagcagcagtgatgtgtccacccacagctag

SEQ ID NO: 149186 - DNA, 3768 bp, synthetic construct
  misc_feature 1..3768: note = Description of Artificial Sequence: Synthetic coding sequence
  source 1..3768: mol_type = other DNA
atgctgcagaactgcagcgacaagaactttgatgatgaagattctgtggatggcaaccggcccagcagcgccagcagcaccagcagcaaggccccacccagcagcagaagaaatgtgggcatgggcaccacccggcggctgggcagcagcaccctgggcagcaagagcagcgctgccaaggagggcgctggagctgtggatgaggaggacttcatcaaggcctttgatgatgtgcctgtggtgcagatctacagcagccgggacctggaggagagcatcaacaagatccgggagatcctgagtgatgacaagcatgactgggagcagagggtgaatgccctgaagaagatccgcagcctgctgctggccggggctgctgaatatgacaacttcttccagcacctgcggctgctggatggagccttcaagctgagcgccaaggacctgcggagccaggtggtgcgggaggcctgcatcaccctgggccacctgagctctgtgctgggcaacaagtttgaccacggggctgaggccatcatgcccaccatcttcaacctgatccccaacagcgccaagatcatggccaccagcggcgtggtggccgtgcggctcatcatccgccacacccacatccccaggctcatccctgtgatcaccagcaactgcaccagcaagtctgtggccgtgagaagacgctgctttgagttcctggacctgctgctgcaggagtggcagacccacagcctggagcggcacatctctgtgctggccgagaccatcaagaagggcatccatgatgctgacagcgaggccagaattgaggccaggaagtgctactggggcttccacagccacttcagccgggaggccgagcacctgtaccacaccctggagagcagctaccagaaggccctgcagagccacctgaagaacagcgacagcatcgtgtccctgccccagagcgacaggagcagcagcagcagccaggagagcctgaaccggcccctgagcgccaagaggagccccaccggcagcaccaccagccgggccagcacagtgtccaccaagtctgtgtccaccaccggcagcctgcagaggagcagaagtgacattgatgtgaatgctgctgccagcgccaagagcaaggtgagcagcagcagcggcaccacccccttcagcagcgctgctgccctgcccccaggcagctatgccagcctgggccgcatccgcacccggcggcagagcagcggcagcgccaccaacgtggccagcaccccagacaacagaggccgcagccgggccaaggtggtgtcccagagccagaggagccgcagcgccaacccagctggagctggcagccgcagcagcagccctgggaagctgctgggcagcggctacggcggcctgaccggcggcagcagccggggcccccctgtgacccccagcagcgagaagaggagcaagatccccaggagccagggctgcagccgggagaccagccccaaccgcatcggcctggacagatttggcctgggccagcccggccgcatccctggctctgtgaatgccatgagggtgctgagcaccagcacagacctggaggccgctgtggctgatgccctgaagaagcctgtgagaagaagatatgagccctacggcatgtacagtgatgatgatgccaacagtgatgccagctctgtgtgcagcgagaggagctatggcagcagaaatggaggcatcccccactacctgcggcagacagaagatgtggccgaggtgctgaaccactgtgccagcagcaactggagcgagaggaaggagggcctgctgggcctgcagaacctgctgaagagccagaggaccctgagccgggtggagctgaagaggctgtgtgagatcttcaccaggatgtttgctgacccccacagcaagattgctgacagcgaggctgaatgtgaggacaaggagggcaacctcttccccagcgaggtgtcctgcaccagggtcttctccatgttcctggagaccctggtggacttcatcatcatccacaaggatgacctgcaggactggctgtttgtgctgctgacccagctgctgaagaagatgggcgctgacctgctgggctctgtgcaggccaaggtgcagaaggccctggatgtgacccgggacagcttcccctttgaccagcagttcaacatcctgatgaggttcatcgtggaccagacccagacccccaacctgaaggtgaaggtggccatcctgaagtacatcgagagcctggcccggcagatggaccccacagactttgtgaacagcagcgagacccggctggccgtgagccgcatcatcacctggaccacagagcccaagagcagtgatgtgaggaaggccgcccagatcgtgctgatcagcctgtttgagctgaacaccccagagttcaccatgctgctgggcgccctgcccaagaccttccaggatggagccaccaagctgctgcacaaccacctgaagaacagcagcaacacctctgtgggcagccccagcaacaccatcggccgcacccccagccgccacaccagcagcaggaccagccccctgaccagccccaccaactgcagccatggaggcctgagccccagcatgctggactatgacacagagaacctgaacagcgaggagatctacagcagcctgcggggcgtgacagaggccatcgagaagttctccttccgcagccaggaggacctgaatgagcccatcaagagagatggcaagaaggaatgtgacatcgtgtccagagatggaggagctgccagccctgccacagagggccggggcggcagcgaggtggagggcggccgcacagccctggacaacaagaccagcctgctgaacacccagcccccccgggccttccctggcccccgggcccgggactacaacccctacccctacagtgatgccatcaacacctatgacaagacagccctgaaggaggccgtgtttgatgatgacatggagcagctgagagatgtgcccatcgaccacagcgacctggtggccgacctgctgaaggagctgagcaaccacaatgaaagagtggaggagaggaaaggagccctgctggagctgctgaagatcacccgggaggacagcctgggcgtgtgggaggagcacttcaagaccatcctgctgctgctgctggagaccctgggggacaaggaccacagcatccgggccctggccctgcgggtgctgcgggagatcctgaggaaccagcctgcccgcttcaagaactatgcagagctgaccatcatgaagaccctggaggcccacaaggacagccacaaggaggtggtgcgggctgctgaggaggccgccagcaccctggccagcagcatccaccctgagcagtgcatcaaggtgctgtgccccatcatccagacagctgactaccccatcaacctggccgccatcaagatgcagaccaaggtggtggagcgcatcgccaaggagagcctgctgcagctgctggtggacatcatccctggcctgctgcagggctatgacaacacagagagctctgtgaggaaggcctctgtgttctgcctggtggccatctacagcgtcatcggggaggacctgaagccccacctggcccagctgaccggcagcaagatgaagctgctgaacctgtacatcaagagggcccagaccaccaacagcaacagcagcagcagcagtgatgtgtccacccacagctag

SEQ ID NO: 149187 - DNA, 3738 bp, synthetic construct
  misc_feature 1..3738: note = Description of Artificial Sequence: Synthetic coding sequence
  source 1..3738: mol_type = other DNA
atgaccaccgggaaggacaagaactttgatgatgaggacagcgtggatggcaaccggcccagcagcgccagcagcaccagcagcaaggccccacccagcagcagaagaaatgtgggcatgggcaccacccggcggctgggcagcagcaccctgggcagcaagagcagcgctgccaaggagggcgctggagctgtggatgaggaggacttcatcaaggcctttgatgatgtgcctgtggtgcagatctacagcagccgggacctggaggagagcatcaacaagatccgggagatcctgagtgatgacaagcatgactgggagcagagggtgaatgccctgaagaagatccgcagcctgctgctggccggggctgctgaatatgacaacttcttccagcacctgcggctgctggatggagccttcaagctgagcgccaaggacctgcggagccaggtggtgcgggaggcctgcatcaccctgggccacctgagctctgtgctgggcaacaagtttgaccatggagctgaggccatcatgcccaccatcttcaacctgatccccaacagcgccaagatcatggccaccagcggcgtggtggccgtgcggctcatcatccgccacacccacatccccaggctcatccctgtgatcaccagcaactgcaccagcaagtctgtggccgtgagaagacgctgctttgagttcctggacctgctgctgcaggagtggcagacccacagcctggagcggcacatctctgtgctggccgagaccatcaagaagggcatccatgatgctgacagcgaggcccgcatcgaggccaggaagtgctactggggcttccacagccacttcagccgggaggccgagcacctgtaccacaccctggagagcagctaccagaaggccctgcagagccacctgaagaacagcgacagcatcgtgtccctgccccagagcgacaggagcagcagcagcagccaggagagcctgaaccggcccctgagcgccaagaggagccccaccggcagcaccaccagccgggccagcacagtgtccaccaagtctgtgtccaccaccggcagcctgcagaggagcagaagtgacattgatgtgaatgctgctgccagcgccaagagcaaggtgagcagcagcagcggcaccacccccttcagcagcgctgctgccctgcccccaggcagctatgccagcctggatggcaccaccaccaaggccgagggccgcatccgcacccggcggcagagcagcggcagcgccaccaacgtggccagcaccccagacaacagaggccgcagccgggccaaggtggtgtcccagagccagaggagccgcagcgccaacccagctggggccggcagccgcagcagcagccctgggaagctgctgggcagcggctatggaggcctgactggaggcagcagccggggcccccctgtgacccccagcagcgagaagaggagcaagatccccaggagccagggctgcagccgggagaccagccccaacagaattggcctggaccgcttcggcctgggccagcccggccgcatccctggctctgtgaatgccatgagggtgctgagcaccagcacagacctggaggccgctgtggctgatgccctgctgctgggggacagccgcagcaagaagcctgtgagaagaagatatgagccctacggcatgtacagtgatgatgatgccaacagtgatgccagctctgtgtgcagcgagaggagctatggcagcagaaatggaggcatcccccactacctgcggcagacagaagatgtggccgaggtgctgaaccactgtgccagcagcaactggagcgagaggaaggagggcctgctgggcctgcagaacctgctgaagagccagaggaccctgagccgggtggagctgaagaggctgtgtgagatcttcaccaggatgtttgctgacccccacagcaaggtgttctccatgttcctggagaccctggtggacttcatcatcatccacaaggatgacctgcaggactggctgtttgtgctgctgacccagctgctgaagaagatgggcgctgacctgctgggctctgtgcaggccaaggtgcagaaggccctggatgtgacccgggacagcttcccctttgaccagcagttcaacatcctgatgaggttcatcgtggaccagacccagacccccaacctgaaggtgaaggtggccatcctgaagtacatcgagagcctggcccggcagatggaccccacagactttgtgaacagcagcgagacccggctggccgtgagccgcatcatcacctggaccacagagcccaagagcagtgatgtgaggaaggccgcccagatcgtgctgatcagcctgtttgagctgaacaccccagagttcaccatgctgctgggcgccctgcccaagaccttccaggatggagccaccaagctgctgcacaaccacctgaagaacagcagcaacacctctgtgggcagccccagcaacaccatcggccgcacccccagccgccacaccagcagcaggaccagccccctgaccagccccaccaactgcagccatggaggcctgagccccagcatgctggactatgacacagagaacctgaacagcgaggagatctacagcagcctgcggggcgtgacagaggccatcgagaagttctccttccgcagccaggaggacctgaatgagcccatcaagagagatggcaagaaggaatgtgacatcgtgtccagagatggaggagctgccagccctgccacagagggccggggcggcagcgaggtggagggcggccgcacagccctggacaacaagaccagcctgctgaacacccagcccccccgggccttccctggcccccgggcccgggactacaacccctacccctacagtgatgccatcaacacctatgacaagacagccctgaaggaggccgtgtttgatgatgacatggagcagctgagagatgtgcccatcgaccacagcgacctggtggccgacctgctgaaggagctgagcaaccacaatgaaagagtggaggagaggaaaggagccctgctggagctgctgaagatcacccgggaggacagcctgggcgtgtgggaggagcacttcaagaccatcctgctgctgctgctggagaccctgggggacaaggaccacagcatccgggccctggccctgcgggtgctgcgggagatcctgaggaaccagcctgcccgcttcaagaactatgcagagctgaccatcatgaagaccctggaggcccacaaggacagccacaaggaggtggtgcgggctgctgaggaggccgccagcaccctggccagcagcatccaccctgagcagtgcatcaaggtgctgtgccccatcatccagacagctgactaccccatcaacctggccgccatcaagatgcagaccaaggtggtggagcgcatcgccaaggagagcctgctgcagctgctggtggacatcatccctggcctgctgcagggctatgacaacacagagagctctgtgaggaaggcctctgtgttctgcctggtggccatctacagcgtcatcggggaggacctgaagccccacctggcccagctgaccggcagcaagatgaagctgctgaacctgtacatcaagagggcccagaccaccaacagcaacagcagcagcagcagtgatgtgtccacccacagctag

SEQ ID NO: 149188 - DNA, 2988 bp, synthetic construct
  misc_feature 1..2988: note = Description of Artificial Sequence: Synthetic coding sequence
  source 1..2988: mol_type = other DNA
atgggcctgaggaaccacttccctggagaggccgagaccctgtacaacagcctggagcccagctaccagaagagcctgcagacctacctgaagagcagcggctctgtggccagcctgccccagagcgacaggagcagcagcagcagccaggagagcctgaaccggcccttcagcagcaagtggagcacagccaaccccagcacagtggccggccgggtgtctgctggcagcagcaaggccagcagcctgcccggcagcctgcagaggagcagaagtgacattgatgtgaatgctgctgctggggccaaggcccaccacgccgccggccagagcgtgcgcagcggccgcctgggcgctggggccctgaatgccggcagctatgccagcctggaggacaccagtgacaagctggatggaacagcctctgaagatggccgggtgcgggccaagctgagcgcccccctggccggcatgggaaatgccaaggctgacagccggggccgcagcaggaccaagatggtgtcccagagccagcccggcagccgcagcggcagccctggccgggtgctgaccaccacagccctgagcacagtgagcagcggcgtgcagagggtgctggtgaacagcgccagcgcccagaagaggagcaagatccccaggagccagggctgcagccgggaggccagccccagccggctgtctgtggcccggagcagccgcatcccccggcccagcgtgtcccagggctgcagccgggaggccagccgggagagcagccgggacaccagccctgtgcgctccttccagcccctgggccctggctacggcatcagccagagcagccggctgagcagctctgtgtctgccatgagggtgctgaacacaggcagtgatgtggaggaggccgtggctgatgccctgaagaagccagccaggagaagatatgagagctatggcatgcacagtgatgatgatgccaacagtgatgccagcagcgcctgcagcgagaggagctacagcagcagaaatggcagcatccccacctacatgaggcagacagaagatgtggccgaggtgctgaacagatgtgccagcagcaactggagcgagaggaaggagggcctgctgggcctgcagaacctgctgaagaaccagaggaccctgagccgggtggagctgaagaggctgtgtgagatcttcaccaggatgtttgctgacccccacggcaagagggtcttctccatgttcctggagaccctggtggacttcatccaggtgcacaaggatgacctgcaggactggctgtttgtgctgctgacccagctgctgaagaagatgggcgctgacctgctgggctctgtgcaggccaaggtgcagaaggccctggatgtgacccgggagagcttccccaatgacctgcagttcaacatcctgatgaggttcaccgtggaccagacccagacccccagcctgaaggtgaaggtggccatcctgaagtacatcgagaccctggccaagcagatggaccccggggacttcatcaacagcagcgagacccggctggccgtgtccagggtcatcacctggaccacagagcccaagagcagtgatgtgaggaaggccgcccagagcgtgctgatcagcctgtttgagctgaacaccccagagttcaccatgctgctgggcgccctgcccaagaccttccaggatggagccaccaagctgctgcacaaccacctgagaaatactggaaatggcacccagagctccatgggcagccccctgacccggcccacccccaggagccctgccaactggagcagccccctgaccagccccaccaacaccagccagaacaccctgagccccagcgcctttgattatgacacagagaacatgaacagcgaggacatctacagcagcctgcggggcgtgacagaggccatccagaacttctccttccgcagccaggaggacatgaatgagcccctgaagagggacagcaagaaggatgatggagacagcatgtgtggcggccctggcatgtctgaccccagggctggaggagatgccacagacagcagccagacagccctggacaacaaggccagcctgctgcacagcatgcccacccacagcagccccaggagccgggactacaacccctacaactacagcgacagcatcagccccttcaacaagagcgccctgaaggaggccatgtttgatgatgatgctgaccagttcccagatgacctgagcctggaccacagcgacctggtggccgagctgctgaaggagctgagcaaccacaatgaaagagtggaggagaggaagatcgccctgtatgagctgatgaagctgacccaggaggagagcttctctgtgtgggatgagcacttcaagaccatcctgctgctgctgctggagaccctgggggacaaggagcccaccatccgggccctggccctgaaggtgctgcgggagatcctgcggcaccagcctgcccgcttcaagaactatgcagagctgactgtgatgaagaccctggaggcccacaaggacccccacaaggaggtggtgcgctctgctgaggaggccgcctctgtgctggccaccagcatcagccctgagcagtgcatcaaggtgctgtgccccatcatccagacagctgactaccccatcaacctggccgccatcaagatgcagaccaaggtgattgagcgggtgtccaaggagaccctgaacctgctgctgcctgagatcatgcctggcctcatccagggctatgacaacagcgagagctctgtgaggaaggcctgtgtgttctgcctggtggccgtgcatgctgtgattggagatgagctgaagccccacctgagccagctgaccggcagcaagatgaagctgctgaacctgtacatcaagagggcccagacaggcagcggcggcgctgaccccaccacagatgtgtctggccagagctag

SEQ ID NO: 149189 - DNA, 1296 bp, synthetic construct
  misc_feature 1..1296: note = Description of Artificial Sequence: Synthetic coding sequence
  source 1..1296: mol_type = other DNA
atgaggaggctcatctgcaagaggatctgtgactacaagagctttgatgatgaggagagcgtggatggcaaccggcccagcagcgctgccagcgccttcaaggtgcctgcccccaagaccagcggcaacccagccaacagcgccaggaagccaggcagcgctgggggccccaaggtgggcggggccagcaaggagggcggggccggggctgtggatgaagatgacttcatcaaggccttcacagatgtgcccagcatccagatctacagcagccgggagctggaggagaccctgaacaagatccgggagatcctgagtgatgacaagcatgactgggaccagagggccaatgccctgaagaagatccgcagcctgctggtggccggggccgcccagtatgactgcttcttccagcacctgcggctgctggatggagccctgaagctgagcgccaaggacctgcggagccaggtggtgcgggaggcctgcatcaccgtggcccacctgagcacagtgctgggcaacaagtttgaccatggagctgaggccatcgtgcccaccctcttcaacctggtgcccaacagcgccaaggtgatggccaccagcggctgtgccgccatccgcttcatcatccgccacacccacgtgcccaggctcatccccctcatcaccagcaactgcaccagcaagtctgtgcctgtgagaagaagaagctttgagttcctggacctgctgctgcaggagtggcagacccacagcctggagagacatgctgctgtgctggtggagaccatcaagaagggcatccatgatgctgatgctgaggcccgggtggaggccaggaagacctacatgggcctgaggaaccacttccctggagaggccgagaccctgtacaacagcctggagcccagctaccagaagagcctgcagacctacctgaagagcagcggctctgtggccagcctgccccagagcgacaggagcagcagcagcagccaggagagcctgaaccggcccttcagcagcaagtggagcacagccaaccccagcacagtggccggccgggtgtctgctggcagcagcaaggccagcagcctgcccggcagcctgcagaggagcagaagtgacattgatgtgaatgctgctgctggggccaaggcccaccacgccgccggccagagcgtgcgcagcggccgcctgggcgctggggccctgaatgccggcagctatgccagcctggagtgtgaggccttctggaggagcggccgcacagccaagctgtacagcgtgtag

SEQ ID NO: 149190 - DNA, 4518 bp, synthetic construct
  misc_feature 1..4518: note = Description of Artificial Sequence: Synthetic coding sequence
  source 1..4518: mol_type = other DNA
atggagcccaggtccatggagtacttctgtgcccaggtgcagcagaaggatgtgggcggccgcctgcaggtgggccaggagctgctgctgtacctgggcgcccctggggccatcagtgacctggaggaggacctgggccgcctgggcaagacagtggatgccctgaccggctgggtgggcagcagcaactacagagtgtccctgatgggcctggagatcctgagcgcctttgtggaccggctgagcacccgcttcaagagctatgtggccatggtgattgtggccctgattgacaggatgggagatgccaaggacaaggtgagagatgaggcccagaccctcatcctgaagctgatggaccaggtggccccacccatgtacatctgggagcagctggccagcggcttcaagcacaagaacttccgcagccgggagggcgtgtgcctgtgcctgattgagaccctgaacatctttggagcccagcccctggtgatcagcaagctgatcccccacctgtgcatcctgtttggagacagcaacagccaggtgagagatgctgccatcctggccatcgtggagatctacagacatgtgggggagaaggtgaggatggacctgtacaagaggggcatccccccagcccggctggagatgatctttgccaagtttgatgaggtgcagagcagcggcggcatgatcctgtctgtgtgcaaggacaagagctttgatgatgaggagagcgtggatggcaaccggcccagcagcgctgccagcgccttcaaggtgcctgcccccaagaccagcggcaacccagccaacagcgccaggaagccaggcagcgctgggggccccaaggtgggcggggccagcaaggagggcggggccggggctgtggatgaagatgacttcatcaaggccttcacagatgtgcccagcatccagatctacagcagccgggagctggaggagaccctgaacaagatccgggagatcctgagtgatgacaagcatgactgggaccagagggccaatgccctgaagaagatccgcagcctgctggtggccggggccgcccagtatgactgcttcttccagcacctgcggctgctggatggagccctgaagctgagcgccaaggacctgcggagccaggtggtgcgggaggcctgcatcaccgtggcccacctgagcacagtgctgggcaacaagtttgaccacggggctgaggccatcgtgcccaccctcttcaacctggtgcccaacagcgccaaggtgatggccaccagcggctgtgccgccatccgcttcatcatccgccacacccacgtgcccaggctcatccccctcatcaccagcaactgcaccagcaagtctgtgcctgtgagaagaagaagctttgagttcctggacctgctgctgcaggagtggcagacccacagcctggagagacatgctgctgtgctggtggagaccatcaagaagggcatccatgatgctgatgctgaggcccgggtggaggccaggaagacctacatgggcctgaggaaccacttccctggagaggccgagaccctgtacaacagcctggagcccagctaccagaagagcctgcagacctacctgaagagcagcggctctgtggccagcctgccccagagcgacaggagcagcagcagcagccaggagagcctgaaccggcccttcagcagcaagtggagcacagccaaccccagcacagtggccggccgggtgtctgctggcagcagcaaggccagcagcctgcccggcagcctgcagaggagcagaagtgacattgatgtgaatgctgctgctggggccaaggcccaccacgccgccggccagagcgtgcgcagcggccgcctgggcgctggggccctgaatgccggcagctatgccagcctggaggacaccagtgacaagctggatggaacagcctctgaagatggccgggtgcgggccaagctgagcgcccccctggccggcatgggaaatgccaaggctgacagccggggccgcagcaggaccaagatggtgtcccagagccagcccggcagccgcagcggcagccctggccgggtgctgaccaccacagccctgagcacagtgtcctctggagtgcagagggtgctggtgaacagcgccagcgcccagaagaggagcaagatccccaggagccagggctgcagccgggaggccagccccagccggctgtctgtggcccggagcagccgcatcccccggcccagcgtgtcccagggctgcagccgggaggccagccgggagagcagccgggacaccagccctgtgcgctccttccagcccctgggccctggctacggcatcagccagagcagccggctgagcagctctgtgtctgccatgagggtgctgaacacaggcagtgatgtggaggaggccgtggctgatgccctgaagaagccagcccggcggcgctatgagagctatggcatgcacagtgatgatgatgccaacagtgatgccagcagcgcctgcagcgagaggagctacagcagcagaaatggcagcatccccacctacatgaggcagacagaagatgtggccgaggtgctgaacagatgtgccagcagcaactggagcgagaggaaggagggcctgctgggcctgcagaacctgctgaagaaccagaggaccctgagccgggtggagctgaagaggctgtgtgagatcttcaccaggatgtttgctgacccccacggcaaggtgttctccatgttcctggagaccctggtggacttcatccaggtgcacaaggatgacctgcaggactggctgtttgtgctgctgacccagctgctgaagaagatgggcgctgacctgctgggctctgtgcaggccaaggtgcagaaggccctggatgtgacccgggagagcttccccaatgacctgcagttcaacatcctgatgaggttcaccgtggaccagacccagacccccagcctgaaggtgaaggtggccatcctgaagtacatcgagaccctggccaagcagatggaccccggggacttcatcaacagcagcgagacccggctggccgtgtccagggtcatcacctggaccacagagcccaagagcagtgatgtgaggaaggccgcccagagcgtgctgatcagcctgtttgagctgaacaccccagagttcaccatgctgctgggcgccctgcccaagaccttccaggatggagccaccaagctgctgcacaaccacctgagaaatactggaaatggcacccagagctccatgggcagccccctgacccggcccacccccaggagccctgccaactggagcagccccctgaccagccccaccaacaccagccagaacaccctgagccccagcgcctttgattatgacacagagaacatgaacagcgaggacatctacagcagcctgcggggcgtgacagaggccatccagaacttctccttccgcagccaggaggacatgaatgagcccctgaagagggacagcaagaaggatgatggagacagcatgtgtggcggccctggcatgtctgaccccagggctggaggagatgccacagacagcagccagacagccctggacaacaaggccagcctgctgcacagcatgcccacccacagcagccccaggagccgggactacaacccctacaactacagcgacagcatcagccccttcaacaagagcgccctgaaggaggccatgtttgatgatgatgctgaccagttcccagatgacctgagcctggaccacagcgacctggtggccgagctgctgaaggagctgagcaaccacaatgaaagagtggaggagaggaagatcgccctgtatgagctgatgaagctgacccaggaggagagcttctctgtgtgggatgagcacttcaagaccatcctgctgctgctgctggagaccctgggggacaaggagcccaccatccgggccctggccctgaaggtgctgcgggagatcctgcggcaccagcctgcccgcttcaagaactatgcagagctgactgtgatgaagaccctggaggcccacaaggacccccacaaggaggtggtgcgctctgctgaggaggccgcctctgtgctggccaccagcatcagccctgagcagtgcatcaaggtgctgtgccccatcatccagacagctgactaccccatcaacctggccgccatcaagatgcagaccaaggtgattgagcgggtgtccaaggagaccctgaacctgctgctgcctgagatcatgcctggcctcatccagggctatgacaacagcgagagctctgtgaggaaggcctgtgtgttctgcctggtggccgtgcatgctgtgattggagatgagctgaagccccacctgagccagctgaccggcagcaagatgaagctgctgaacctgtacatcaagagggcccagacaggcagcggcggcgctgaccccaccacagatgtgtctggccagagctag

SEQ ID NO: 149191 - DNA, 4542 bp, synthetic construct
  misc_feature 1..4542: note = Description of Artificial Sequence: Synthetic coding sequence
  source 1..4542: mol_type = other DNA
atggagcccaggtccatggagtacttctgtgcccaggtgcagcagaaggatgtgggcggccgcctgcaggtgggccaggagctgctgctgtacctgggcgcccctggggccatcagtgacctggaggaggacctgggccgcctgggcaagacagtggatgccctgaccggctgggtgggcagcagcaactacagagtgtccctgatgggcctggagatcctgagcgcctttgtggaccggctgagcacccgcttcaagagctatgtggccatggtgattgtggccctgattgacaggatgggagatgccaaggacaaggtgagagatgaggcccagaccctcatcctgaagctgatggaccaggtggccccacccatgtacatctgggagcagctggccagcggcttcaagcacaagaacttccgcagccgggagggcgtgtgcctgtgcctgattgagaccctgaacatctttggagcccagcccctggtgatcagcaagctgatcccccacctgtgcatcctgtttggagacagcaacagccaggtgagagatgctgccatcctggccatcgtggagatctacagacatgtgggggagaaggtgaggatggacctgtacaagaggggcatccccccagcccggctggagatgatctttgccaagtttgatgaggtgcagagcagcggcggcatgatcctgtctgtgtgcaaggacaagagctttgatgatgaggagagcgtggatggcaaccggcccagcagcgctgccagcgccttcaaggtgcctgcccccaagaccagcggcaacccagccaacagcgccaggaagccaggcagcgctgggggccccaaggtgggcggggccagcaaggagggcggggccggggctgtggatgaagatgacttcatcaaggccttcacagatgtgcccagcatccagatctacagcagccgggagctggaggagaccctgaacaagatccgggagatcctgagtgatgacaagcatgactgggaccagagggccaatgccctgaagaagatccgcagcctgctggtggccggggccgcccagtatgactgcttcttccagcacctgcggctgctggatggagccctgaagctgagcgccaaggacctgcggagccaggtggtgcgggaggcctgcatcaccgtggcccacctgagcacagtgctgggcaacaagtttgaccacggggctgaggccatcgtgcccaccctcttcaacctggtgcccaacagcgccaaggtgatggccaccagcggctgtgccgccatccgcttcatcatccgccacacccacgtgcccaggctcatccccctcatcaccagcaactgcaccagcaagtctgtgcctgtgagaagaagaagctttgagttcctggacctgctgctgcaggagtggcagacccacagcctggagagacatgctgctgtgctggtggagaccatcaagaagggcatccatgatgctgatgctgaggcccgggtggaggccaggaagacctacatgggcctgaggaaccacttccctggagaggccgagaccctgtacaacagcctggagcccagctaccagaagagcctgcagacctacctgaagagcagcggctctgtggccagcctgccccagagcgacaggagcagcagcagcagccaggagagcctgaaccggcccttcagcagcaagtggagcacagccaaccccagcacagtggccggccgggtgtctgctggcagcagcaaggccagcagcctgcccggcagcctgcagaggagcagaagtgacattgatgtgaatgctgctgctggggccaaggcccaccacgccgccggccagagcgtgcgcagcggccgcctgggcgctggggccctgaatgccggcagctatgccagcctggaggacaccagtgacaagctggatggaacagcctctgaagatggccgggtgcgggccaagctgagcgcccccctggccggcatgggaaatgccaaggctgacagccggggccgcagcaggaccaagatggtgtcccagagccagcccggcagccgcagcggcagccctggccgggtgctgaccaccacagccctgagcacagtgtcctctggagtgcagagggtgctggtgaacagcgccagcgcccagaagaggagcaagatccccaggagccagggctgcagccgggaggccagccccagccggctgtctgtggcccggagcagccgcatcccccggcccagcgtgtcccagggctgcagccgggaggccagccgggagagcagccgggacaccagccctgtgcgctccttccagcccctgggccctggctacggcatcagccagagcagccggctgagcagctctgtgtctgccatgagggtgctgaacacaggcagtgatgtggaggaggccgtggctgatgccctgctgctgggggacatccgcaccaagaagaagccagcccggcggcgctatgagagctatggcatgcacagtgatgatgatgccaacagtgatgccagcagcgcctgcagcgagaggagctacagcagcagaaatggcagcatccccacctacatgaggcagacagaagatgtggccgaggtgctgaacagatgtgccagcagcaactggagcgagaggaaggagggcctgctgggcctgcagaacctgctgaagaaccagaggaccctgagccgggtggagctgaagaggctgtgtgagatcttcaccaggatgtttgctgacccccacggcaaggtgttctccatgttcctggagaccctggtggacttcatccaggtgcacaaggatgacctgcaggactggctgtttgtgctgctgacccagctgctgaagaagatgggcgctgacctgctgggctctgtgcaggccaaggtgcagaaggccctggatgtgacccgggagagcttccccaatgacctgcagttcaacatcctgatgaggttcaccgtggaccagacccagacccccagcctgaaggtgaaggtggccatcctgaagtacatcgagaccctggccaagcagatggaccccggggacttcatcaacagcagcgagacccggctggccgtgtccagggtcatcacctggaccacagagcccaagagcagtgatgtgaggaaggccgcccagagcgtgctgatcagcctgtttgagctgaacaccccagagttcaccatgctgctgggcgccctgcccaagaccttccaggatggagccaccaagctgctgcacaaccacctgagaaatactggaaatggcacccagagctccatgggcagccccctgacccggcccacccccaggagccctgccaactggagcagccccctgaccagccccaccaacaccagccagaacaccctgagccccagcgcctttgattatgacacagagaacatgaacagcgaggacatctacagcagcctgcggggcgtgacagaggccatccagaacttctccttccgcagccaggaggacatgaatgagcccctgaagagggacagcaagaaggatgatggagacagcatgtgtggcggccctggcatgtctgaccccagggctggaggagatgccacagacagcagccagacagccctggacaacaaggccagcctgctgcacagcatgcccacccacagcagccccaggagccgggactacaacccctacaactacagcgacagcatcagccccttcaacaagagcgccctgaaggaggccatgtttgatgatgatgctgaccagttcccagatgacctgagcctggaccacagcgacctggtggccgagctgctgaaggagctgagcaaccacaatgaaagagtggaggagaggaagatcgccctgtatgagctgatgaagctgacccaggaggagagcttctctgtgtgggatgagcacttcaagaccatcctgctgctgctgctggagaccctgggggacaaggagcccaccatccgggccctggccctgaaggtgctgcgggagatcctgcggcaccagcctgcccgcttcaagaactatgcagagctgactgtgatgaagaccctggaggcccacaaggacccccacaaggaggtggtgcgctctgctgaggaggccgcctctgtgctggccaccagcatcagccctgagcagtgcatcaaggtgctgtgccccatcatccagacagctgactaccccatcaacctggccgccatcaagatgcagaccaaggtgattgagcgggtgtccaaggagaccctgaacctgctgctgcctgagatcatgcctggcctcatccagggctatgacaacagcgagagctctgtgaggaaggcctgtgtgttctgcctggtggccgtgcatgctgtgattggagatgagctgaagccccacctgagccagctgaccggcagcaagatgaagctgctgaacctgtacatcaagagggcccagacaggcagcggcggcgctgaccccaccacagatgtgtctggccagagctag

SEQ ID NO: 149192 - DNA, 4545 bp, synthetic construct
  misc_feature 1..4545: note = Description of Artificial Sequence: Synthetic coding sequence
  source 1..4545: mol_type = other DNA
atggagcccaggtccatggagtacttctgtgcccaggtgcagcagaaggatgtgggcggccgcctgcaggtgggccaggagctgctgctgtacctgggcgcccctggggccatcagtgacctggaggaggacctgggccgcctgggcaagacagtggatgccctgaccggctgggtgggcagcagcaactacagagtgtccctgatgggcctggagatcctgagcgcctttgtggaccggctgagcacccgcttcaagagctatgtggccatggtgattgtggccctgattgacaggatgggagatgccaaggacaaggtgagagatgaggcccagaccctcatcctgaagctgatggaccaggtggccccacccatgtacatctgggagcagctggccagcggcttcaagcacaagaacttccgcagccgggagggcgtgtgcctgtgcctgattgagaccctgaacatctttggagcccagcccctggtgatcagcaagctgatcccccacctgtgcatcctgtttggagacagcaacagccaggtgagagatgctgccatcctggccatcgtggagatctacagacatgtgggggagaaggtgaggatggacctgtacaagaggggcatccccccagcccggctggagatgatctttgccaagtttgatgaggtgcagagcagcggcggcatgatcctgtctgtgtgcaaggacaagagctttgatgatgaggagagcgtggatggcaaccggcccagcagcgctgccagcgccttcaaggtgcctgcccccaagaccagcggcaacccagccaacagcgccaggaagccaggcagcgctgggggccccaaggtgggcgctggggccagcaaggagggcggggccggggctgtggatgaagatgacttcatcaaggccttcacagatgtgcccagcatccagatctacagcagccgggagctggaggagaccctgaacaagatccgggagatcctgagtgatgacaagcatgactgggaccagagggccaatgccctgaagaagatccgcagcctgctggtggccggggccgcccagtatgactgcttcttccagcacctgcggctgctggatggagccctgaagctgagcgccaaggacctgcggagccaggtggtgcgggaggcctgcatcaccgtggcccacctgagcacagtgctgggcaacaagtttgaccatggagctgaggccatcgtgcccaccctcttcaacctggtgcccaacagcgccaaggtgatggccaccagcggctgtgccgccatccgcttcatcatccgccacacccacgtgcccaggctcatccccctcatcaccagcaactgcaccagcaagtctgtgcctgtgagaagaagaagctttgagttcctggacctgctgctgcaggagtggcagacccacagcctggagagacatgctgctgtgctggtggagaccatcaagaagggcatccatgatgctgatgctgaggcccgggtggaggccaggaagacctacatgggcctgaggaaccacttccctggagaggccgagaccctgtacaacagcctggagcccagctaccagaagagcctgcagacctacctgaagagcagcggctctgtggccagcctgccccagagcgacaggagcagcagcagcagccaggagagcctgaaccggcccttcagcagcaagtggagcacagccaaccccagcacagtggccggccgggtgtctgctggcagcagcaaggccagcagcctgcccggcagcctgcagaggagcagaagtgacattgatgtgaatgctgctgctggggccaaggcccaccacgccgccggccagagcgtgcgcagcggccgcctgggcgctggggccctgaatgccggcagctatgccagcctggaggacaccagtgacaagctggatggaacagcctctgaagatggccgggtgcgggccaagctgagcgcccccctggccggcatgggaaatgccaaggctgacagccggggccgcagcaggaccaagatggtgtcccagagccagcccggcagccgcagcggcagccctggccgggtgctgaccaccacagccctgagcacagtgagcagcggcgtgcagagggtgctggtgaacagcgccagcgcccagaagaggagcaagatccccaggagccagggctgcagccgggaggccagccccagccggctgtctgtggcccggagcagccgcatcccccggcccagcgtgtcccagggctgcagccgggaggccagccgggagagcagccgggacaccagccctgtgcgctccttccagcccctgggccctggctacggcatcagccagagcagccggctgagcagctctgtgtctgccatgagggtgctgaacacaggcagtgatgtggaggaggccgtggctgatgccctgctgctgggggacatccgcaccaagaagaagccagccaggagaagatatgagagctatggcatgcacagtgatgatgatgccaacagtgatgccagcagcgcctgcagcgagaggagctacagcagcagaaatggcagcatccccacctacatgaggcagacagaagatgtggccgaggtgctgaacagatgtgccagcagcaactggagcgagaggaaggagggcctgctgggcctgcagaacctgctgaagaaccagaggaccctgagccgggtggagctgaagaggctgtgtgagatcttcaccaggatgtttgctgacccccacggcaaggtgttctccatgttcctggagaccctggtggacttcatccaggtgcacaaggatgacctgcaggactggctgtttgtgctgctgacccagctgctgaagaagatgggcgctgacctgctgggctctgtgcaggccaaggtgcagaaggccctggatgtgacccgggagagcttccccaatgacctgcagttcaacatcctgatgaggttcaccgtggaccagacccagacccccagcctgaaggtgaaggtggccatcctgaagtacatcgagaccctggccaagcagatggaccccggggacttcatcaacagcagcgagacccggctggccgtgtccagggtcatcacctggaccacagagcccaagagcagtgatgtgaggaaggccgcccagagcgtgctgatcagcctgtttgagctgaacaccccagagttcaccatgctgctgggcgccctgcccaagaccttccaggatggagccaccaagctgctgcacaaccacctgaggaacacaggaaatggcacccagagctccatgggcagccccctgacccggcccacccccaggagccctgccaactggagcagccccctgaccagccccaccaacaccagccagaacaccctgagccccagcgcctttgattatgacacagagaacatgaacagcgaggacatctacagcagcctgcggggcgtgacagaggccatccagaacttctccttccgcagccaggaggacatgaatgagcccctgaagagggacagcaagaaggatgatggagacagcatgtgtggcggccctggcatgtctgaccccagggctggaggagatgccacagacagcagccagacagccctggacaacaaggccagcctgctgcacagcatgcccacccacagcagccccaggagccgggactacaacccctacaactacagcgacagcatcagccccttcaacaagagcgccctgaaggaggccatgtttgatgatgatgctgaccagttcccagatgacctgagcctggaccacagcgacctggtggccgagctgctgaaggagctgagcaaccacaatgaaagagtggaggagaggaagatcgccctgtatgagctgatgaagctgacccaggaggagagcttctctgtgtgggatgagcacttcaagaccatcctgctgctgctgctggagaccctgggggacaaggagcccaccatccgggccctggccctgaaggtgctgcgggagatcctgcggcaccagcctgcccgcttcaagaactatgcagagctgactgtgatgaagaccctggaggcccacaaggacccccacaaggaggtggtgcgctctgctgaggaggccgcctctgtgctggccaccagcatcagccctgagcagtgcatcaaggtgctgtgccccatcatccagacagctgactaccccatcaacctggccgccatcaagatgcagaccaaggtgattgaaagagtgtccaaggagaccctgaacctgctgctgcctgagatcatgcctggcctcatccagggctatgacaacagcgagagctctgtgaggaaggcctgtgtgttctgcctggtggccgtgcatgctgtgattggagatgagctgaagccccacctgagccagctgaccggcagcaagatgaagctgctgaacctgtacatcaagagggcccagacaggcagcggcggcgctgaccccaccacagatgtgtctggccagagctag

SEQ ID NO: 149193 - DNA, 3882 bp, synthetic construct
  misc_feature 1..3882: note = Description of Artificial Sequence: Synthetic coding sequence
  source 1..3882: mol_type = other DNA
atggccatgggagatgacaagagctttgatgatgaggagagcgtggatggcaaccggcccagcagcgctgccagcgccttcaaggtgcctgcccccaagaccagcggcaacccagccaacagcgccaggaagccaggcagcgctgggggccccaaggtgggcggggccagcaaggagggcggggccggggctgtggatgaagatgacttcatcaaggccttcacagatgtgcccagcatccagatctacagcagccgggagctggaggagaccctgaacaagatccgggagatcctgagtgatgacaagcatgactgggaccagagggccaatgccctgaagaagatccgcagcctgctggtggccggggccgcccagtatgactgcttcttccagcacctgcggctgctggatggagccctgaagctgagcgccaaggacctgcggagccaggtggtgcgggaggcctgcatcaccgtggcccacctgagcacagtgctgggcaacaagtttgaccatggagctgaggccatcgtgcccaccctcttcaacctggtgcccaacagcgccaaggtgatggccaccagcggctgtgccgccatccgcttcatcatccgccacacccacgtgcccaggctcatccccctcatcaccagcaactgcaccagcaagtctgtgcctgtgagaagaagaagctttgagttcctggacctgctgctgcaggagtggcagacccacagcctggagagacatgctgctgtgctggtggagaccatcaagaagggcatccatgatgctgatgctgaggcccgggtggaggccaggaagacctacatgggcctgaggaaccacttccctggagaggccgagaccctgtacaacagcctggagcccagctaccagaagagcctgcagacctacctgaagagcagcggctctgtggccagcctgccccagagcgacaggagcagcagcagcagccaggagagcctgaaccggcccttcagcagcaagtggagcacagccaaccccagcacagtggccggccgggtgtctgctggcagcagcaaggccagcagcctgcccggcagcctgcagaggagcagaagtgacattgatgtgaatgctgctgctggggccaaggcccaccacgccgccggccagagcgtgcgcagcggccgcctgggcgctggggccctgaatgccggcagctatgccagcctggaggacaccagtgacaagctggatggaacagcctctgaagatggccgggtgcgggccaagctgagcgcccccctggccggcatgggaaatgccaaggctgacagccggggccgcagcaggaccaagatggtgtcccagagccagcccggcagccgcagcggcagccctggccgggtgctgaccaccacagccctgagcacagtgagcagcggcgtgcagagggtgctggtgaacagcgccagcgcccagaagaggagcaagatccccaggagccagggctgcagccgggaggccagccccagccggctgtctgtggcccggagcagccgcatcccccggcccagcgtgtcccagggctgcagccgggaggccagccgggagagcagccgggacaccagccctgtgcgctccttccagcccctggccagccgccaccacagccgcagcactggagccctgtatgcccctgaggtgtatggagccagcggccctggctacggcatcagccagagcagccggctgagcagctctgtgtctgccatgagggtgctgaacacaggcagtgatgtggaggaggccgtggctgatgccctgaagaagccagcccggcggcgctatgagagctatggcatgcacagtgatgatgatgccaacagtgatgccagcagcgcctgcagcgagaggagctacagcagcagaaatggcagcatccccacctacatgaggcagacagaagatgtggccgaggtgctgaacagatgtgccagcagcaactggagcgagaggaaggagggcctgctgggcctgcagaacctgctgaagaaccagaggaccctgagccgggtggagctgaagaggctgtgtgagatcttcaccaggatgtttgctgacccccacggcaaggtgttctccatgttcctggagaccctggtggacttcatccaggtgcacaaggatgacctgcaggactggctgtttgtgctgctgacccagctgctgaagaagatgggcgctgacctgctgggctctgtgcaggccaaggtgcagaaggccctggatgtgacccgggagagcttccccaatgacctgcagttcaacatcctgatgaggttcaccgtggaccagacccagacccccagcctgaaggtgaaggtggccatcctgaagtacatcgagaccctggccaagcagatggaccccggggacttcatcaacagcagcgagacccggctggccgtgtccagggtcatcacctggaccacagagcccaagagcagtgatgtgaggaaggccgcccagagcgtgctgatcagcctgtttgagctgaacaccccagagttcaccatgctgctgggcgccctgcccaagaccttccaggatggagccaccaagctgctgcacaaccacctgagaaatactggaaatggcacccagagctccatgggcagccccctgacccggcccacccccaggagccctgccaactggagcagccccctgaccagccccaccaacaccagccagaacaccctgagccccagcgcctttgattatgacacagagaacatgaacagcgaggacatctacagcagcctgcggggcgtgacagaggccatccagaacttctccttccgcagccaggaggacatgaatgagcccctgaagagggacagcaagaaggatgatggagacagcatgtgtggcggccctggcatgtctgaccccagggctggaggagatgccacagacagcagccagacagccctggacaacaaggccagcctgctgcacagcatgcccacccacagcagccccaggagccgggactacaacccctacaactacagcgacagcatcagccccttcaacaagagcgccctgaaggaggccatgtttgatgatgatgctgaccagttcccagatgacctgagcctggaccacagcgacctggtggccgagctgctgaaggagctgagcaaccacaatgaaagagtggaggagaggaagatcgccctgtatgagctgatgaagctgacccaggaggagagcttctctgtgtgggatgagcacttcaagaccatcctgctgctgctgctggagaccctgggggacaaggagcccaccatccgggccctggccctgaaggtgctgcgggagatcctgcggcaccagcctgcccgcttcaagaactatgcagagctgactgtgatgaagaccctggaggcccacaaggacccccacaaggaggtggtgcgctctgctgaggaggccgcctctgtgctggccaccagcatcagccctgagcagtgcatcaaggtgctgtgccccatcatccagacagctgactaccccatcaacctggccgccatcaagatgcagaccaaggtgattgagcgggtgtccaaggagaccctgaacctgctgctgcctgagatcatgcctggcctcatccagggctatgacaacagcgagagctctgtgaggaaggcctgtgtgttctgcctggtggccgtgcatgctgtgattggagatgagctgaagccccacctgagccagctgaccggcagcaagatgaagctgctgaacctgtacatcaagagggcccagacaggcagcggcggcgctgaccccaccacagatgtgtctggccagagctag

SEQ ID NO: 149194 - DNA, 3192 bp, synthetic construct
  misc_feature 1..3192: note = Description of Artificial Sequence: Synthetic coding sequence
  source 1..3192: mol_type = other DNA
atgaggaggctcatctgcaagaggatctgtgactacaagagctttgatgatgaggagagcgtggatggcaaccggcccagcagcgctgccagcgccttcaaggtgcctgcccccaagaccagcggcaacccagccaacagcgccaggaagccaggcagcgctgggggccccaaggtgggggagctgctgagcatcatgatctacagcagccgggagctggaggagaccctgaacaagatccgggagatcctgagtgatgacaagcatgactgggaccagagggccaatgccctgaagaagatccgcagcctgctggtggccggggccgcccagtatgactgcttcttccagcacctgcggctgctggatggagccctgaagctgagcgccaaggacctgcggagccaggtggtgcgggaggcctgcatcaccgtggcccacctgagcacagtgctgggcaacaagtttgaccacggggctgaggccatcgtgcccaccctcttcaacctggtgcccaacagcgccaaggtgatggccaccagcggctgtgccgccatccgcttcatcatccgccacacccacgtgcccaggctcatccccctcatcaccagcaactgcaccagcaagtctgtgcctgtgagaagaagaagctttgagttcctggacctgctgctgcaggagtggcagacccacagcctggagagacatgctgctgtgctggtggagaccatcaagaagggcatccatgatgctgatgctgaggcccgggtggaggccaggaagacctacatgggcctgaggaaccacttccctggagaggccgagaccctgtacaacagcctggagcccagctaccagaagagcctgcagacctacctgaagagcagcggctctgtggccagcctgccccagagcgacaggagcagcagcagcagccaggagagcctgaaccggcccttcagcagcaagtggagcacagccaaccccagcacagtggccggccgggtgtctgctggcagcagcaaggccagcagcctgcccggcagcctgcagaggagcagaagtgacattgatgtgaatgctgctgctggggccaaggcccaccacgccgccggccagagcgtgcgcagcggccgcctgggcgctggggccctgaatgccggcagctatgccagcctggaggacaccagtgacaagctggatgacctcttcagtgacaatggccgggtgcgggccaagctgagcgcccccctggccggcatgggaaatgccaaggctgacagccggggccgcagcaggaccaagatggtgtcccagagccagaggagcagcagcccagacaagaatgaaggcagccagagcgccaacaccatcggggccggcagccgcagcggcagccctggccgggtgctgaccaccacagccctgagcacagtgtcctctggagtgcagagggtgctggtgaacagcgccagcgcccagaagaggagcaagatccccaggagccagggctgcagccgggaggccagccccagccggctgtctgtggcccggagcagccgcatcccccggcccagcgtgtcccagggctgcagccgggaggccagccgggagagcagccgggacaccagccctgtgcgctccttccagcccctgggccctggctacggcatcagccagagcagccggctgagcagctctgtgtctgccatgagggtgctgaacacaggcagtgatgtggaggaggccgtggctgatgccctggtgctgtttgacttcaagaccaagaagaagccagcccggcggcgctatgagagctatggcatgcacagtgatgatgatgccaacagtgatgccagcagcgcctgcagcgagaggagctacagcagcagaaatggcagcatccccacctacatgaggcagacagaagatgtggccgaggtgctgaacagatgtgccagcagcaactggagcgagaggaaggagggcctgctgggcctgcagaacctgctgaagaaccagaggaccctgagccgggtggagctgaagaggctgtgtgagatcttcaccaggatgtttgctgacccccacggcaaggtgttctccatgttcctggagaccctggtggacttcatccaggtgcacaaggatgacctgcaggactggctgtttgtgctgctgacccagctgctgaagaagatgggcgctgacctgctgggctctgtgcaggccaaggtgcagaaggccctggatgtgacccgggagagcttccccaatgacctgcagttcaacatcctgatgaggttcaccgtggaccagacccagacccccagcctgaaggtgaaggtggccatcctgaagtacatcgagaccctggccaagcagatggaccccggggacttcatcaacagcagcgagacccggctggccgtgtccagggtcatcacctggaccacagagcccaagagcagtgatgtgaggaaggccgcccagagcgtgctgatcagcctgtttgagctgaacaccccagagttcaccatgctgctgggcgccctgcccaagaccttccaggatggagccaccaagctgctgcacaaccacctgagaaatactggaaatggcacccagagctccatgggcagccccctgacccggcccacccccaggagccctgccaactggagcagccccctgaccagccccaccaacaccagccagaacaccctgagccccagcgcctttgattatgacacagagaacatgaacagcgaggacatctacagcagcctgcggggcgtgacagaggccatccagaacttctccttccgcagccaggaggacatgaatgagcccctgaagagggacagcaagaaggatgatggagacagcatgtgtggcggccctggcatgtctgaccccagggctggaggagatgccacagacagcagccagacagccctggacaacaaggccagcctgctgcacagcatgcccacccacagcagccccaggagccgggactacaacccctacaactacagcgacagcatcagccccttcaacaagagcgccctgaaggaggccatgtttgatgatgatgctgaccagttcccagatgacctgagcctggaccacagcgacctggtggccgagctgctgaaggagctgagcaaccacaatgaaagagtgtag

SEQ ID NO: 149195 - DNA, 1680 bp, synthetic construct
  misc_feature 1..1680: note = Description of Artificial Sequence: Synthetic coding sequence
  source 1..1680: mol_type = other DNA
atgcccccacccagcccagacagtgaaaatggcttctacccaggcctgcccagctccatgaacccagccttcttccccagcttcagccctgtgagcccccacggctgcaccggcctgtctgtgcccaccagcggcggcggcggcggcggctttggaggccccttcagcgccacagctgtgcccccacctcctcctccagccatgaacatcccccagcagcagcccccacctcctgctgccccccagcagccccagagcagaagaagccctgtgagcccccagctgcagcagcagcaccaggccgctgctgctgccttcctgcagcagaggaacagctacaaccaccaccagcccctgctgaagcagagcccctggagcaaccaccagagcagcggctggggcaccggctccatgtcctggggcgccatgcacggccgggaccacagaagaactggaaacatgggcatccctggcaccatgaaccagatcagccccctgaagaagcccttctctggaaatgtgattgccccacccaagttcaccaggagcacccccagcctgacccccaagtcctggattgaggacaacgtgttcagaacagacaacaacagcaacaccctgctgcccctgcaggacaggagcaggatgtatgacagcctgaacatgcacagcctggagaacagcctgattgacatcatgagagctgagcatgaccccctgaagggccgcctgagctacccccaccctggaacagacaacctgctgatgctgaatggccgcagcagcctcttccccattgatgatggcctgctggatgatggccacagcgaccaggtgggcgtgctgaacagccccacctgctacagcgcccaccagaatggagagagaattgagcgcttcagcaggaaggtgtttgtgggcggcctgcccccagacattgatgaagatgagatcacagccagcttcagaagatttggccccctggtggtggactggccccacaaggccgagagcaagagctacttcccccccaagggctacgccttcctgctcttccaggaggagagctctgtgcaggccctgattgatgcctgcatcgaggaggatggcaagctgtacctgtgtgtgagcagccccaccatcaaggacaagcctgtgcagatccggccctggaacctgagtgacagcgactttgtgatggatggcagccagcccctggaccccaggaagaccatctttgtgggcggcgtgccccggcccctgcgggctgtggagctggccatgatcatggaccggctgtatggaggagtgtgctacgccggcatcgacacagatcctgagctgaagtaccccaagggggccggccgggtggccttcagcaaccagcagagctacatcgccgccatcagcgccaggtttgtgcagctgcagcacggggacatcgacaagagggtggaggtgaagccctacgtgctggatgaccagatgtgtgatgagtgccagggcgcccgctgtggcggcaagtttgcccccttcttctgtgccaacgtgacctgcctgcagtactactgtgagttctgctgggccaacatccacagcagagctggccgggagttccacaagcccctggtgaaggagggcgctgaccggccccggcagatccacttccgctggaactag

SEQ ID NO: 149196 - DNA, 1731 bp, synthetic construct
  misc_feature 1..1731: note = Description of Artificial Sequence: Synthetic coding sequence
  source 1..1731: mol_type = other DNA
atgcccccacccagcccagacagtgaaaatggcttctacccaggcctgcccagctccatgaacccagccttcttccccagcttcagccctgtgagcccccacggctgcaccggcctgtctgtgcccccacctccagccatgaacatcccccagcagcagcccccacctcctgctgccccccagcagccccagagccgccgcagccctgtgagcccccagctgcagcagcagcaccaggccgctgctgctgccttcctgcagcagagaaattcctacaaccaccaccagcccctgctgaagcagagcccctggagcaaccaccagagcagcggctggggcaccggctccatgtcctggggcgccatgcacggccgggaccacagaagaacaggcaacatgggcatccctggcaccatgaaccagatcagccccctgaagaagcccttctctggaaatgtcatcgccccacccaagttcaccaggagcacccccagcctgacccccaagtcctggattgaagataatgtgttcagaacagacaacaacagcaacaccctgctgcccctgcaggtgcgcagcagcctgcagctgcctgcctggggcagtgacagcctgcaggacagctggtgcacagctgctggcaccagcagaattgaccaggacaggagcaggatgtatgacagcctgaacatgcacagcctggagaacagcctgattgacatcatgagagctgagcatgaccccctgaagggccgcctgagctacccccaccctggaacagacaacctgctgatgctgaatgcccggagctatggaagaagaagaggccgcagcagcctcttccccattgatgatggcctgctggatgatggccacagcgaccaggtgggcgtgctgaacagccccacctgctacagcgcccaccagaatggagagcgcatcgagcgcttcagcaggaaggtgtttgtgggcggcctgcccccagacattgatgaagatgagatcacagccagcttccgccgcttcggccccctggtggtggactggccccacaaggccgagagcaagagctacttcccccccaagggctacgccttcctgctcttccaggaggagagctctgtgcaggccctgattgatgcctgcattgaagaagatggcaagctgtacctgtgtgtgagcagccccaccatcaaggacaagcctgtgcagatccggccctggaacctgagtgacagcgactttgtgatggatggcagccagcccctggaccccaggaagaccatctttgtgggcggcgtgccccggcccctgcgggctgtggagctggccatgatcatggaccggctgtatggaggagtgtgctacgccggcatcgacacagatcctgagctgaagtaccccaagggagctggccgggtggccttcagcaaccagcagagctacatcgccgccatcagcgccaggtttgtgcagctgcagcacggggacatcgacaagagggtggaggtgaagccctacgtgctggatgaccagatgtgtgatgagtgccagggcgcccgctgtggcggcaagtttgcccccttcttctgtgccaacgtgacctgcctgcagtactactgtgagttctgctgggccaacatccacagccgggccggccgggagttccacaagcccctggtgaaggagggcgctgaccggccccggcagatccacttccgctggaactag

SEQ ID NO: 149197 - DNA, 1704 bp, synthetic construct
  misc_feature 1..1704: note = Description of Artificial Sequence: Synthetic coding sequence
  source 1..1704: mol_type = other DNA
atgcccccacccagcccagacagtgaaaatggcttctacccaggcctgcccagctccatgaacccagccttcttccccagcttcagccctgtgagcccccacggctgcaccggcctgtctgtgcccaccagcggcggcggcggcggcggctttggaggccccttcagcgccacagctgtgcccccacctcctcctccagccatgaacatcccccagcagcagcccccacctcctgctgccccccagcagccccagagcagaagaagccctgtgagcccccagctgcagcagcagcaccaggccgctgctgctgccttcctgcagcagaggaacagctacaaccaccaccagcccctgctgaagcagagcccctggagcaaccaccagagcagcggctggggcaccggctccatgtcctggggcgccatgcacggccgggaccacagaagaactggaaacatgggcatccctggcaccatgaaccagatcagccccctgaagaagcccttctctggaaatgtgattgccccacccaagttcaccaggagcacccccagcctgacccccaagtcctggattgaggacaacgtgttcagaacagacaacaacagcaacaccctgctgcccctgcaggacaggagcaggatgtatgacagcctgaacatgcacagcctggagaacagcctgattgacatcatgagagctgagcatgaccccctgaagggccgcctgagctacccccaccctggaacagacaacctgctgatgctgaatgcccggagctatggaagaagaagaggccgcagcagcctcttccccattgatgatggcctgctggatgatggccacagcgaccaggtgggcgtgctgaacagccccacctgctacagcgcccaccagaatggagagagaattgagcgcttcagcaggaaggtgtttgtgggcggcctgcccccagacattgatgaagatgagatcacagccagcttcagaagatttggccccctggtggtggactggccccacaaggccgagagcaagagctacttcccccccaagggctacgccttcctgctcttccaggaggagagctctgtgcaggccctgattgatgcctgcatcgaggaggatggcaagctgtacctgtgtgtgagcagccccaccatcaaggacaagcctgtgcagatccggccctggaacctgagtgacagcgactttgtgatggatggcagccagcccctggaccccaggaagaccatctttgtgggcggcgtgccccggcccctgcgggctgtggagctggccatgatcatggaccggctgtatggaggagtgtgctacgccggcatcgacacagatcctgagctgaagtaccccaagggggccggccgggtggccttcagcaaccagcagagctacatcgccgccatcagcgccaggtttgtgcagctgcagcacggggacatcgacaagagggtggaggtgaagccctacgtgctggatgaccagatgtgtgatgagtgccagggcgcccgctgtggcggcaagtttgcccccttcttctgtgccaacgtgacctgcctgcagtactactgtgagttctgctgggccaacatccacagcagagctggccgggagttccacaagcccctggtgaaggagggcgctgaccggccccggcagatccacttccgctggaactag

SEQ ID NO: 149198 - DNA, 1689 bp, synthetic construct
  misc_feature 1..1689: note = Description of Artificial Sequence: Synthetic coding sequence
  source 1..1689: mol_type = other DNA
atgcccccacccagcccagacagtgaaaatggcttctacccaggcctgcccagctccatgaacccagccttcttccccagcttcagccctgtgagcccccacggctgcaccggcctgtctgtgcccaccagcggcggcggcggcggcggctttggaggccccttcagcgccacagctgtgcccccacctcctcctccagccatgaacatcccccagcagcagcccccacctcctgctgccccccagcagccccagagcagaagaagccctgtgagcccccagctgcagcagcagcaccaggccgctgctgctgccttcctgcagcagaggaacagctacaaccaccaccagcccctgctgaagcagagcccctggagcaaccaccagagcagcggctggggcaccggctccatgtcctggggcgccatgcacggccgggaccacagaagaactggaaacatgggcatccctggcaccatgaaccagatcagccccctgaagaagcccttctctggaaatgtgattgccccacccaagttcaccaggagcacccccagcctgacccccaagtcctggattgaggacaacgtgttcagaacagacaacaacagcaacaccctgctgcccctgcaggtgaggatggacaggagcaggatgtatgacagcctgaacatgcacagcctggagaacagcctgattgacatcatgagagctgagcatgaccccctgaagggccgcctgagctacccccaccctggaacagacaacctgctgatgctgaatggccgcagcagcctcttccccattgatgatggcctgctggatgatggccacagcgaccaggtgggcgtgctgaacagccccacctgctacagcgcccaccagaatggagagcgcatcgagcgcttcagcaggaaggtgtttgtgggcggcctgcccccagacattgatgaagatgagatcacagccagcttccgccgcttcggccccctggtggtggactggccccacaaggccgagagcaagagctacttcccccccaagggctacgccttcctgctcttccaggaggagagctctgtgcaggccctgattgatgcctgcattgaagaagatggcaagctgtacctgtgtgtgagcagccccaccatcaaggacaagcctgtgcagatccggccctggaacctgagtgacagcgactttgtgatggatggcagccagcccctggaccccaggaagaccatctttgtgggcggcgtgccccggcccctgcgggctgtggagctggccatgatcatggaccggctgtatggaggagtgtgctacgccggcatcgacacagatcctgagctgaagtaccccaagggagctggccgggtggccttcagcaaccagcagagctacatcgccgccatcagcgccaggtttgtgcagctgcagcacggggacatcgacaagagggtggaggtgaagccctacgtgctggatgaccagatgtgtgatgagtgccagggcgcccgctgtggcggcaagtttgcccccttcttctgtgccaacgtgacctgcctgcagtactactgtgagttctgctgggccaacatccacagccgggccggccgggagttccacaagcccctggtgaaggagggcgctgaccggccccggcagatccacttccgctggaactag

SEQ ID NO: 149199 - DNA, 3024 bp, synthetic construct
  misc_feature 1..3024: note = Description of Artificial Sequence: Synthetic coding sequence
  source 1..3024: mol_type = other DNA
atgagggactttggcttcggcgtgctgcagacagcccccctgcggagcagcagccctggccccctcttctgtggggaggcctacggcccctatgctgtgggctctgtgaaccccctgcccagcgccaccccatttggccccctgagccccccacccctgcctgtgacaggcttcctggaggccgccagccccttctctgtgcccctgggcggcggggccggcagccctgctgctgctgccagcagcagcagccccttcctggcccaccagcagaccatgcaggatgagctgctgctgggcctgacccagcagcctgcccggcccctgagcggggctgctgccacagagaagctgcctgaccaccaccctgggggcggcaccatcgccggcgtgacccacctgctgcccagccaggacttcaagcccagcctgcaccaccccagcagcagcagcgccagcagctgctgctgctgcaggaccagcagcccccaggacttcagcaagaggcagcagcagcagctgagcagccagaagaggaaggagttcagccccccccacctgccccaccccccagacagcaagcccccacctcctcctccacccctgcactgccccggccgcttcagccccccacctcctcctgctggccccctgctgcagcctgcccagctggcccagaggcagcagcagcagcccccccagcagttcagcctgctgcaccagcagcacctgagcccccaggactttgccccccggcagaggcctgctgacctgccccccctgccccagctgccccccagccccccagctgccccccggcggcggcacggcggggccggcagccccaggaagaccccagctgctggggagggcagcgctgctgagagccccaatgccggcctggccagcagcacccctgtgaacccagcccctggctccatggagagccccaaccaccccctgctgaacagccccagcaacctgctgcccggcggggccctgggcgctggggccttcagcagcctgcagagcccagacctgccccaccctgggggcggcggcggcggcggcggcggcggccccccaggcggcggcggcggcggcggcagcgccagccccccacccctgcccggcttcggcaccccctggagcgtgcagacagccagccccccaccccagccccagcagcccccacccacccagccccagcagcagcccccaccaccccagcagcccccccagccccagccccagcccccaggcagcagcgccaccaccccaggcggcggcagcggcggcagcctgagcgccatgcccccacccagcccagattctgaaaatggcttctacccaggcctgcccagctccatgaacccagccttcttccccagcttcagccctgtgagcccccacggctgcaccggcctgtctgtgcccaccagcggcggcggcggcggcggctttggaggccccttcagcgccacagctgtgcccccacctcctcctccagccatgaacatcccccagcagcagcccccacctcctgctgccccccagcagccccagagccgccgcagccctgtgagcccccagctgcagcagcagcaccaggccgctgctgctgccttcctgcagcagagaaattcctacaaccaccaccagcccctgctgaagcagagcccctggagcaaccaccagagcagcggctggggcaccggctccatgtcctggggcgccatgcacggccgggaccacagaagaacaggcaacatgggcatccctggcaccatgaaccagatcagccccctgaagaagcccttctctggaaatgtcatcgccccacccaagttcaccaggagcacccccagcctgacccccaagtcctggattgaagataatgtgttcagaacagacaacaacagcaacaccctgctgcccctgcaggtgaggatggacaggagcaggatgtatgacagcctgaacatgcacagcctggagaacagcctgattgacatcatgagagctgagcatgaccccctgaagggccgcctgagctacccccaccctggaacagacaacctgctgatgctgaatgcccggagctatggaagaagaagaggccgcagcagcctcttccccattgatgatggcctgctggatgatggccacagcgaccaggtgggcgtgctgaacagccccacctgctacagcgcccaccagaatggagagagaattgagcgcttcagcaggaaggtgtttgtgggcggcctgcccccagacattgatgaagatgagatcacagccagcttcagaagatttggccccctggtggtggactggccccacaaggccgagagcaagagctacttcccccccaagggctacgccttcctgctcttccaggaggagagctctgtgcaggccctgattgatgcctgcatcgaggaggatggcaagctgtacctgtgtgtgagcagccccaccatcaaggacaagcctgtgcagatccggccctggaacctgagtgacagcgactttgtgatggatggcagccagcccctggaccccaggaagaccatctttgtgggcggcgtgccccggcccctgcgggctgtggagctggccatgatcatggaccggctgtatggaggagtgtgctacgccggcatcgacacagatcctgagctgaagtaccccaagggggccggccgggtggccttcagcaaccagcagagctacatcgccgccatcagcgccaggtttgtgcagctgcagcacggggacatcgacaagagggtggaggtgaagccctacgtgctggatgaccagatgtgtgatgagtgccagggcgcccgctgtggcggcaagtttgcccccttcttctgtgccaacgtgacctgcctgcagtactactgtgagttctgctgggccaacatccacagcagagctggccgggagttccacaagcccctggtgaaggagggcgctgaccggccccggcagatccacttccgctggaactag

SEQ ID NO: 149200 - DNA, 1770 bp, synthetic construct
  misc_feature 1..1770: note = Description of Artificial Sequence: Synthetic coding sequence
  source 1..1770: mol_type = other DNA
atgcccccacccagcccagacagtgaaaatggcttctacccaggcctgcccagctccatgaacccagccttcttccccagcttcagccctgtgagcccccacggctgcaccggcctgtctgtgcccaccagcggcggcggcggcggcggctttggaggccccttcagcgccacagctgtgcccccacctcctcctccagccatgaacatcccccagcagcagcccccacctcctgctgccccccagcagccccagagcagaagaagccctgtgagcccccagctgcagcagcagcaccaggccgctgctgctgccttcctgcagcagaggaacagctacaaccaccaccagcccctgctgaagcagagcccctggagcaaccaccagagcagcggctggggcaccggctccatgtcctggggcgccatgcacggccgggaccacagaagaactggaaacatgggcatccctggcaccatgaaccagatcagccccctgaagaagcccttctctggaaatgtgattgccccacccaagttcaccaggagcacccccagcctgacccccaagtcctggattgaggacaacgtgttcagaacagacaacaacagcaacaccctgctgcccctgcaggtgcgcagcagcctgcagctgcctgcctggggcagtgacagcctgcaggacagctggtgcacagctgctggcaccagcagaattgaccaggacaggagcaggatgtatgacagcctgaacatgcacagcctggagaacagcctgattgacatcatgagagctgagcatgaccccctgaagggccgcctgagctacccccaccctggaacagacaacctgctgatgctgaatggccgcagcagcctcttccccattgatgatggcctgctggatgatggccacagcgaccaggtgggcgtgctgaacagccccacctgctacagcgcccaccagaatggagagagaattgagcgcttcagcaggaaggtgtttgtgggcggcctgcccccagacattgatgaagatgagatcacagccagcttcagaagatttggccccctggtggtggactggccccacaaggccgagagcaagagctacttcccccccaagggctacgccttcctgctcttccaggaggagagctctgtgcaggccctgattgatgcctgcatcgaggaggatggcaagctgtacctgtgtgtgagcagccccaccatcaaggacaagcctgtgcagatccggccctggaacctgagtgacagcgactttgtgatggatggcagccagcccctggaccccaggaagaccatctttgtgggcggcgtgccccggcccctgcgggctgtggagctggccatgatcatggaccggctgtatggaggagtgtgctacgccggcatcgacacagatcctgagctgaagtaccccaagggggccggccgggtggccttcagcaaccagcagagctacatcgccgccatcagcgccaggtttgtgcagctgcagcacggggacatcgacaagagggtggaggtgaagccctacgtgctggatgaccagatgtgtgatgagtgccagggcgcccgctgtggcggcaagtttgcccccttcttctgtgccaacgtgacctgcctgcagtactactgtgagttctgctgggccaacatccacagcagagctggccgggagttccacaagcccctggtgaaggagggcgctgaccggccccggcagatccacttccgctggaactag

SEQ ID NO: 149201 - DNA, 3105 bp, synthetic construct
  misc_feature 1..3105: note = Description of Artificial Sequence: Synthetic coding sequence
  source 1..3105: mol_type = other DNA
atgagggactttggcttcggcgtgctgcagacagcccccctgcggagcagcagccctggccccctcttctgtggggaggcctacggcccctatgctgtgggctctgtgaaccccctgcccagcgccaccccatttggccccctgagccccccacccctgcctgtgacaggcttcctggaggccgccagccccttctctgtgcccctgggcggcggggccggcagccctgctgctgctgccagcagcagcagccccttcctggcccaccagcagaccatgcaggatgagctgctgctgggcctgacccagcagcctgcccggcccctgagcggggctgctgccacagagaagctgcctgaccaccaccctgggggcggcaccatcgccggcgtgacccacctgctgcccagccaggacttcaagcccagcctgcaccaccccagcagcagcagcgccagcagctgctgctgctgcaggaccagcagcccccaggacttcagcaagaggcagcagcagcagctgagcagccagaagaggaaggagttcagccccccccacctgccccaccccccagacagcaagcccccacctcctcctccacccctgcactgccccggccgcttcagccccccacctcctcctgctggccccctgctgcagcctgcccagctggcccagaggcagcagcagcagcccccccagcagttcagcctgctgcaccagcagcacctgagcccccaggactttgccccccggcagaggcctgctgacctgccccccctgccccagctgccccccagccccccagctgccccccggcggcggcacggcggggccggcagccccaggaagaccccagctgctggggagggcagcgctgctgagagccccaatgccggcctggccagcagcacccctgtgaacccagcccctggctccatggagagccccaaccaccccctgctgaacagccccagcaacctgctgcccggcggggccctgggcgctggggccttcagcagcctgcagagcccagacctgccccaccctgggggcggcggcggcggcggcggcggcggccccccaggcggcggcggcggcggcggcagcgccagccccccacccctgcccggcttcggcaccccctggagcgtgcagacagccagccccccaccccagccccagcagcccccacccacccagccccagcagcagcccccaccaccccagcagcccccccagccccagccccagcccccaggcagcagcgccaccaccccaggcggcggcagcggcggcagcctgagcgccatgcccccacccagcccagattctgaaaatggcttctacccaggcctgcccagctccatgaacccagccttcttccccagcttcagccctgtgagcccccacggctgcaccggcctgtctgtgcccaccagcggcggcggcggcggcggctttggaggccccttcagcgccacagctgtgcccccacctcctcctccagccatgaacatcccccagcagcagcccccacctcctgctgccccccagcagccccagagccgccgcagccctgtgagcccccagctgcagcagcagcaccaggccgctgctgctgccttcctgcagcagagaaattcctacaaccaccaccagcccctgctgaagcagagcccctggagcaaccaccagagcagcggctggggcaccggctccatgtcctggggcgccatgcacggccgggaccacagaagaacaggcaacatgggcatccctggcaccatgaaccagatcagccccctgaagaagcccttctctggaaatgtcatcgccccacccaagttcaccaggagcacccccagcctgacccccaagtcctggattgaagataatgtgttcagaacagacaacaacagcaacaccctgctgcccctgcaggtgcgcagcagcctgcagctgcctgcctggggcagtgacagcctgcaggacagctggtgcacagctgctggcaccagcagaattgaccaggacaggagcaggatgtatgacagcctgaacatgcacagcctggagaacagcctgattgacatcatgagagctgagcatgaccccctgaagggccgcctgagctacccccaccctggaacagacaacctgctgatgctgaatgcccggagctatggaagaagaagaggccgcagcagcctcttccccattgatgatggcctgctggatgatggccacagcgaccaggtgggcgtgctgaacagccccacctgctacagcgcccaccagaatggagagcgcatcgagcgcttcagcaggaaggtgtttgtgggcggcctgcccccagacattgatgaagatgagatcacagccagcttccgccgcttcggccccctggtggtggactggccccacaaggccgagagcaagagctacttcccccccaagggctacgccttcctgctcttccaggaggagagctctgtgcaggccctgattgatgcctgcattgaagaagatggcaagctgtacctgtgtgtgagcagccccaccatcaaggacaagcctgtgcagatccggccctggaacctgagtgacagcgactttgtgatggatggcagccagcccctggaccccaggaagaccatctttgtgggcggcgtgccccggcccctgcgggctgtggagctggccatgatcatggaccggctgtatggaggagtgtgctacgccggcatcgacacagatcctgagctgaagtaccccaagggagctggccgggtggccttcagcaaccagcagagctacatcgccgccatcagcgccaggtttgtgcagctgcagcacggggacatcgacaagagggtggaggtgaagccctacgtgctggatgaccagatgtgtgatgagtgccagggcgcccgctgtggcggcaagtttgcccccttcttctgtgccaacgtgacctgcctgcagtactactgtgagttctgctgggccaacatccacagccgggccggccgggagttccacaagcccctggtgaaggagggcgctgaccggccccggcagatccacttccgctggaactag

SEQ ID NO: 149202 - DNA, 3081 bp, synthetic construct
  misc_feature 1..3081: note = Description of Artificial Sequence: Synthetic coding sequence
  source 1..3081: mol_type = other DNA
atgagggactttggcttcggcgtgctgcagacagcccccctgcggagcagcagccctggccccctcttctgtggggaggcctacggcccctatgctgtgggctctgtgaaccccctgcccagcgccaccccatttggccccctgagccccccacccctgcctgtgacaggcttcctggaggccgccagccccttctctgtgcccctgggcggcggggccggcagccctgctgctgctgccagcagcagcagccccttcctggcccaccagcagaccatgcaggatgagctgctgctgggcctgacccagcagcctgcccggcccctgagcggggctgctgccacagagaagctgcctgaccaccaccctgggggcggcaccatcgccggcgtgacccacctgctgcccagccaggacttcaagcccagcctgcaccaccccagcagcagcagcgccagcagctgctgctgctgcaggaccagcagcccccaggacttcagcaagaggcagcagcagcagctgagcagccagaagaggaaggagttcagccccccccacctgccccaccccccagacagcaagcccccacctcctcctccacccctgcactgccccggccgcttcagccccccacctcctcctgctggccccctgctgcagcctgcccagctggcccagaggcagcagcagcagcccccccagcagttcagcctgctgcaccagcagcacctgagcccccaggactttgccccccggcagaggcctgctgacctgccccccctgccccagctgccccccagccccccagctgccccccggcggcggcacggcggggccggcagccccaggaagaccccagctgctggggagggcagcgctgctgagagccccaatgccggcctggccagcagcacccctgtgaacccagcccctggctccatggagagccccaaccaccccctgctgaacagccccagcaacctgctgcccggcggggccctgggcgctggggccttcagcagcctgcagagcccagacctgccccaccctgggggcggcggcggcggcggcggcggcggccccccaggcggcggcggcggcggcggcagcgccagccccccacccctgcccggcttcggcaccccctggagcgtgcagacagccagccccccaccccagccccagcagcccccacccacccagccccagcagcagcccccaccaccccagcagcccccccagccccagccccagcccccaggcagcagcgccaccaccccaggcggcggcagcggcggcagcctgagcgccatgcccccacccagcccagattctgaaaatggcttctacccaggcctgcccagctccatgaacccagccttcttccccagcttcagccctgtgagcccccacggctgcaccggcctgtctgtgcccaccagcggcggcggcggcggcggctttggaggccccttcagcgccacagctgtgcccccacctcctcctccagccatgaacatcccccagcagcagcccccacctcctgctgccccccagcagccccagagccgccgcagccctgtgagcccccagctgcagcagcagcaccaggccgctgctgctgccttcctgcagcagagaaattcctacaaccaccaccagcccctgctgaagcagagcccctggagcaaccaccagagcagcggctggggcaccggctccatgtcctggggcgccatgcacggccgggaccacagaagaacaggcaacatgggcatccctggcaccatgaaccagatcagccccctgaagaagcccttctctggaaatgtcatcgccccacccaagttcaccaggagcacccccagcctgacccccaagtcctggattgaagataatgtgttcagaacagacaacaacagcaacaccctgctgcccctgcaggtgcgcagcagcctgcagctgcctgcctggggcagtgacagcctgcaggacagctggtgcacagctgctggcaccagcagaattgaccaggacaggagcaggatgtatgacagcctgaacatgcacagcctggagaacagcctgattgacatcatgagagctgagcatgaccccctgaagggccgcctgagctacccccaccctggaacagacaacctgctgatgctgaatggccgcagcagcctcttccccattgatgatggcctgctggatgatggccacagcgaccaggtgggcgtgctgaacagccccacctgctacagcgcccaccagaatggagagcgcatcgagcgcttcagcaggaaggtgtttgtgggcggcctgcccccagacattgatgaagatgagatcacagccagcttccgccgcttcggccccctggtggtggactggccccacaaggccgagagcaagagctacttcccccccaagggctacgccttcctgctcttccaggaggagagctctgtgcaggccctgattgatgcctgcattgaagaagatggcaagctgtacctgtgtgtgagcagccccaccatcaaggacaagcctgtgcagatccggccctggaacctgagtgacagcgactttgtgatggatggcagccagcccctggaccccaggaagaccatctttgtgggcggcgtgccccggcccctgcgggctgtggagctggccatgatcatggaccggctgtatggaggagtgtgctacgccggcatcgacacagatcctgagctgaagtaccccaagggagctggccgggtggccttcagcaaccagcagagctacatcgccgccatcagcgccaggtttgtgcagctgcagcacggggacatcgacaagagggtggaggtgaagccctacgtgctggatgaccagatgtgtgatgagtgccagggcgcccgctgtggcggcaagtttgcccccttcttctgtgccaacgtgacctgcctgcagtactactgtgagttctgctgggccaacatccacagccgggccggccgggagttccacaagcccctggtgaaggagggcgctgaccggccccggcagatccacttccgctggaactag

SEQ ID NO: 149203 - DNA, 2097 bp, synthetic construct
  misc_feature 1..2097: note = Description of Artificial Sequence: Synthetic coding sequence
  source 1..2097: mol_type = other DNA
atgcaggatgacctgctgatggacaagagcaagacccagccccagccccagcagcagcagaggcagcagcagcagccccagcctgagagctctgtgtctgaggcccccagcacccccctgagcagcgagacccccaagccagaagaaaattctgctgtgcctgccctgagccctgctgctgcccccccagcccccaacggccctgacaagatgcagatggagagccccctgctgcccggcctgtccttccaccagcccccccagcagcccccaccaccccaggagcctgctgcccctggggccagcctgagccccagctttggcagcacctggagcacaggcaccaccaatgctgtggaggacagcttcttccagggcatcacccctgtgaatggcaccatgctgttccagaacttcccccaccacgtgaaccctgtgtttggaggcaccttcagcccccagatcggcctggcccagacccagcaccaccagcagcccccacctccagccccagccccccagcctgcccagcctgcccagcccccccaggcccagcccccccagcagaggaggagccctgccagccccagccaggccccctatgcccagaggtctgctgctgctgcctacggccaccagcccatcatgaccagcaagcccagcagcagcagcgctgtggccgctgctgctgctgctgctgctgccagcagcgccagcagctcctggaacacccaccagagcgtgaatgctgcctggagcgcccccagcaacccctggggcggcctgcaggccggccgggaccccaggagagctgtgggcgtgggcgtgggcgtgggcgtgggcgtgcccagccccctgaaccccatcagccccctgaagaagcccttcagcagcaatgtgattgccccacccaagttccccagggctgcccccctgaccagcaagtcctggatggaggacaatgccttcagaacagacaatggaaacaacctgctgcccttccaggacaggagccggccctatgacaccttcaacctgcacagcctggagaacagcctgatggacatgatcagaacagaccacgagcccctgaagggcaagcactacccacccagcggcccccccatgagctttgctgacatcatgtggaggaaccactttgctggccgcatgggcatcaacttccaccaccctggaacagacaacatcatggccctgaacaatgccttcctggatgacagccatggagaccaggccctgagcagcggcctgagcagccccacccgctgccagaatggagagcgggtggagcgctacagcaggaaggtgtttgtgggcggcctgcccccagacattgatgaagatgagatcacagccagcttccgccgcttcggccccctggtggtggactggccccacaaggccgagagcaagagctacttcccccccaagggctacgccttcctgctcttccaggaggagagctctgtgcaggccctgattgatgcctgcctggaggaggatggcaagctgtacctgtgtgtgagcagccccaccatcaaggacaagcctgtgcagatccggccctggaacctgagtgacagcgactttgtgatggatggcagccagcccctggaccccaggaagaccatctttgtgggcggcgtgccccggcccctgcgggctgtggagctggccatgatcatggaccggctgtatggaggagtgtgctacgccggcatcgacacagatcctgagctgaagtaccccaagggagctggccgggtggccttcagcaaccagcagagctacatcgccgccatcagcgccaggtttgtgcagctgcagcacaatgacatcgacaagagggtggaggtgaagccctacgtgctggatgaccagatgtgtgatgagtgccagggcacccgctgtggcggcaagtttgcccccttcttctgtgccaacgtgacctgcctgcagtactactgtgagtactgctgggccagcatccacagccgggccggccgggagttccacaagcccctggtgaaggagggcggggaccggcccaggcatgtgcccttccgctggagctag

SEQ ID NO: 149204 - DNA, 2055 bp, synthetic construct
  misc_feature 1..2055: note = Description of Artificial Sequence: Synthetic coding sequence
  source 1..2055: mol_type = other DNA
atgcaggatgacctgctgatggacaagagcaagacccagccccagccccagcagcagcagaggcagcagcagcagccccagcctgagagctctgtgtctgaggcccccagcacccccctgagcagcgagacccccaagccagaagaaaattctgctgtgcctgccctgagccctgctgctgcccccccagcccccaacggccctgacaagatgcagatggagagccccctgctgcccggcctgtccttccaccagcccccccagcagcccccaccaccccaggagcctgctgcccctggggccagcctgagccccagctttggcagcacctggagcacaggcaccaccaatgctgtggaggacagcttcttccagggcatcacccctgtgaatggcaccatgctgttccagaacttcccccaccacgtgaaccctgtgtttggaggcaccttcagcccccagatcggcctggcccagacccagcaccaccagcagcccccacctccagccccagccccccagcctgcccagcctgcccagcccccccaggcccagcccccccagcagaggaggagccctgccagccccagccaggccccctatgcccagaggtctgctgctgctgcctacggccaccagcccatcatgaccagcaagcccagcagcagcagcgctgtggccgctgctgctgctgctgctgctgccagcagcgccagcagctcctggaacacccaccagagcgtgaatgctgcctggagcgcccccagcaacccctggggcggcctgcaggccggccgggaccccaggagagctgtgggcgtgggcgtgggcgtgggcgtgggcgtgcccagccccctgaaccccatcagccccctgaagaagcccttcagcagcaatgtgattgccccacccaagttccccagggctgcccccctgaccagcaagtcctggatggaggacaatgccttcagaacagacaatggaaacaacctgctgcccttccaggacaggagccggccctatgacaccttcaacctgcacagcctggagaacagcctgatggacatgatcagaacagaccacgagcccctgaagggccgcatgggcatcaacttccaccaccctggaacagacaacatcatggccctgaacagccgcagcagcctcttcccctttgaagatgccttcctggatgacagccatggagaccaggccctgagcagcggcctgagcagccccacccgctgccagaatggagagcgggtggagcgctacagcaggaaggtgtttgtgggcggcctgcccccagacattgatgaagatgagatcacagccagcttccgccgcttcggccccctggtggtggactggccccacaaggccgagagcaagagctacttcccccccaagggctacgccttcctgctcttccaggaggagagctctgtgcaggccctgattgatgcctgcctggaggaggatggcaagctgtacctgtgtgtgagcagccccaccatcaaggacaagcctgtgcagatccggccctggaacctgagtgacagcgactttgtgatggatggcagccagcccctggaccccaggaagaccatctttgtgggcggcgtgccccggcccctgcgggctgtggagctggccatgatcatggaccggctgtatggaggagtgtgctacgccggcatcgacacagatcctgagctgaagtaccccaagggagctggccgggtggccttcagcaaccagcagagctacatcgccgccatcagcgccaggtttgtgcagctgcagcacaatgacatcgacaagagggtggaggtgaagccctacgtgctggatgaccagatgtgtgatgagtgccagggcacccgctgtggcggcaagtttgcccccttcttctgtgccaacgtgacctgcctgcagtactactgtgagtactgctgggccagcatccacagccgggccggccgggagttccacaagcccctggtgaaggagggcggggaccggcccaggcatgtgcccttccgctggagctag

SEQ ID NO: 149205 - DNA, 2055 bp, synthetic construct; identical to SEQ ID NO: 149204
  misc_feature 1..2055: note = Description of Artificial Sequence: Synthetic coding sequence
  source 1..2055: mol_type = other DNA

SEQ ID NO: 149206 - DNA, 2190 bp, synthetic construct
  misc_feature 1..2190: note = Description of Artificial Sequence: Synthetic coding sequence
  source 1..2190: mol_type = other DNA
atgggagactatggcttcggcgtgctggtgcagagcaacacaggcaacaagagcgccttccctgtgcgcttccacccccacctgcagcccccccaccaccaccagaatgccacccccagccctgctgccttcatcaacaacaacacagctgccaacggcagcagcgctggcagcgcctggctgtttcctgccccagccacccacaacatccaggatgagatcctgggcagcgagaaggccaagagccagcagcaggagcagcaggaccccctggagaagcagcagctgagccccagccctggccaggaggccggcatcctgcctgagacagagaaggccaagtctgaggagaaccagggcgacaacagcagtgaaaatggaaatggcaaggagaagatcagaattgagagccctgtgctgactggatttgactaccaggaggccaccggcctgggcaccagcacccagcccctgaccagcagcgccagcagcctgaccggcttcagcaactggagcgctgccatcgcccccagcagcagcaccatcatcaatgaagatgccagcttcttccaccagggcggcgtgcctgctgccagcgccaacaacggggccctgctcttccagaacttcccccaccacgtgtccccaggctttggaggcagcttcagcccccagatcggccccctgagccagcaccacccccaccacccccacttccagcaccaccacagccagcaccagcagcagaggaggagccctgccagcccccaccccccacccttcacccacagaaatgctgccttcaaccagctgccccacctggccaacaacctgaacaagccacccagcccctggagcagctaccagagccccagccccacccccagcagctcctggagccctgggggcggcggctacggcggctggggcggcagccagggccgggaccaccggcggggcctgaatggaggcatcacccccctgaacagcatcagccccctgaagaagaactttgccagcaaccacatccagctgcagaagtatgcccggcccagcagcgcctttgcccccaagtcctggatggaggacagcctgaacagagctgacaacatcttccccttcccagaccggcccaggacctttgacatgcacagcctggagagcagcctgattgacatcatgagagcagaaaatgacaccatcaagggccgcctgaactacagctacccaggcagtgacagcagcctgctgatcaatgcccggacctatggaagaagaagaggccagagcagcctcttccccatggaggatggcttcctggatgatggccgcggggaccagcccctgcacagcggcctgggcagcccccactgcttcagccaccagaatggagagcgggtggagcgctacagcaggaaggtgtttgtgggcggcctgcccccagacattgatgaagatgagatcacagccagcttcagaagatttggccccctgattgtggactggccccacaaggccgagagcaagagctacttcccccccaagggctacgccttcctgctcttccaggatgagagctctgtgcaggccctgattgatgcctgcatcgaggaggatggcaagctgtacctgtgtgtgagcagccccaccatcaaggacaagcctgtgcagatccggccctggaacctgagtgacagcgactttgtgatggatggcagccagcccctggaccccaggaagaccatctttgtgggcggcgtgccccggcccctgcgggctgtggagctggccatgatcatggaccggctgtatggaggagtgtgctacgccggcatcgacacagatcctgagctgaagtaccccaagggggccggccgggtggccttcagcaaccagcagagctacatcgccgccatcagcgccaggtttgtgcagctgcagcacggggagattgacaagagggtggaggtgaagccctacgtgctggatgaccagctgtgtgatgagtgccagggcgcccgctgtggcggcaagtttgcccccttcttctgtgccaacgtgacctgcctgcagtactactgtgagtactgctgggccgccatccacagcagagctggccgggagttccacaagcccctggtgaaggagggcggggaccggcccaggcacatctccttccgctggaactag

SEQ ID NO: 149207 - DNA, 2139 bp, synthetic construct
  misc_feature 1..2139: note = Description of Artificial Sequence: Synthetic coding sequence
  source 1..2139: mol_type = other DNA
atgggagactatggcttcggcgtgctggtgcagagcaacacaggcaacaagagcgccttccctgtgcgcttccacccccacctgcagcccccccaccaccaccagaatgccacccccagccctgctgccttcatcaacaacaacacagctgccaacggcagcagcgctggcagcgcctggctgtttcctgccccagccacccacaacatccaggatgagatcctgggcagcgagaaggccaagagccagcagcaggagcagcaggaccccctggagaagcagcagctgagccccagccctggccaggaggccggcatcctgcctgagacagagaaggccaagtctgaggagaaccagggcgacaacagcagtgaaaatggaaatggcaaggagaagatcagaattgagagccctgtgctgactggatttgactaccaggaggccaccggcctgggcaccagcacccagcccctgaccagcagcgccagcagcctgaccggcttcagcaactggagcgctgccatcgcccccagcagcagcaccatcatcaatgaagatgccagcttcttccaccagggcggcgtgcctgctgccagcgccaacaacggggccctgctcttccagaacttcccccaccacgtgtccccaggctttggaggcagcttcagcccccagatcggccccctgagccagcaccacccccaccacccccacttccagcaccaccacagccagcaccagcagcagaggaggagccctgccagcccccaccccccacccttcacccacagaaatgctgccttcaaccagctgccccacctggccaacaacctgaacaagccacccagcccctggagcagctaccagagccccagccccacccccagcagctcctggagccctgggggcggcggctacggcggctggggcggcagccagggccgggaccaccggcggggcctgaatggaggcatcacccccctgaacagcatcagccccctgaagaagaactttgccagcaaccacatccagctgcagaagtatgcccggcccagcagcgcctttgcccccaagtcctggatggaggacagcctgaacagagctgacaacatcttccccttcccagaccggcccaggacctttgacatgcacagcctggagagcagcctgattgacatcatgagagcagaaaatgacaccatcaaggcccggacctacggcagaagaagaggccagagcagcctcttccccatggaggatggcttcctggatgatggccgcggggaccagcccctgcacagcggcctgggcagcccccactgcttcagccaccagaatggagagcgggtggagcgctacagcaggaaggtgtttgtgggcggcctgcccccagacattgatgaagatgagatcacagccagcttccgccgcttcggccccctcatcgtggactggccccacaaggccgagagcaagagctacttcccccccaagggctacgccttcctgctcttccaggatgagagctctgtgcaggccctgattgatgcctgcattgaagaagatggcaagctgtacctgtgtgtgagcagccccaccatcaaggacaagcctgtgcagatccggccctggaacctgagtgacagcgactttgtgatggatggcagccagcccctggaccccaggaagaccatctttgtgggcggcgtgccccggcccctgcgggctgtggagctggccatgatcatggaccggctgtatggaggagtgtgctacgccggcatcgacacagatcctgagctgaagtaccccaagggagctggccgggtggccttcagcaaccagcagagctacatcgccgccatcagcgccaggtttgtgcagctgcagcacggggagattgacaagagggtggaggtgaagccctacgtgctggatgaccagctgtgtgatgagtgccagggcgcccgctgtggcggcaagtttgcccccttcttctgtgccaacgtgacctgcctgcagtactactgtgagtactgctgggccgccatccacagccgggccggccgggagttccacaagcccctggtgaaggagggcggggaccggcccaggcacatctccttccgctggaactag

SEQ ID NO: 149208 - DNA, 2049 bp, synthetic construct
  misc_feature 1..2049: note = Description of Artificial Sequence: Synthetic coding sequence
  source 1..2049: mol_type = other DNA
atgagcaccccagctgtgccccaggacctgcagctgccccccagccagagggcccagagcgccttcaaggagcagaggcggcagaagctgaaggagcacctgctgcggaggaagaccctgtttgcctacaagcaggagaatgagatgctgagcagccgggaccagagggtggtgaccagcgaggaccaggtgcaggagggcaccaaggtgctgaagctgaagaccaagatggctgacaaggagaacatgaagaggcctgctgagagcaagaacaacacagtggtgggcaagcactgcatccccctgaagcccagcaatgagctgaccaacagcacagtggtgattgacacccacaagcccaaggacagcaaccagaccccccacctgctgctgacagaagatgacccccagagccagcacatgaccctgagccaggccttccacctgaagaacaacagcaagaagaagcagatgaccacagagaagcagaagcaggatgccaacatgcccaagaagcctgtgctgggcagctaccggggccagatcgtgcagagcaagatcaacagcttcaggaagcccctgcaggtgaaggatgagagcagcgctgccaccaagaagctgagcgccaccatccccaaggccaccaagccccagcctgtgaacaccagctctgtgacagtgaagagcaacagaagcagcaacatgacagccaccaccaagtttgtgtccaccaccagccagaacacccagctggtgcggccccccatccgcagccaccacagcaacacccgggacacagtgaagcagggcatcagcaggaccagcgccaacgtgaccatcaggaagggcccccatgagaaggagctgctgcagagcaagacagccctgagctctgtgaagaccagcagcagccagggcatcatccggaacaagaccctgagccgcagcatcgccagcgaggtgattgcccggcctgccagcctgagcaatgacaagctgatggagaagtctgagcctgtggaccagaggaggcacacagctgggaaggccatcgtggacagccgcagcgcccagcccaaggagaccagcgaggagaggaaggcccggctgtctgagtggaaggccggcaagggccgggtgctgaagaggcctcccaacagcgtggtgacccagcacgagcctgctggccagaatgagaagcctgtgggcagcttctggaccaccatggccgaggaggatgagcagaggctcttcacagagaaggtgaacaacaccttcagcgagtgcctgaacctgatcaatgaaggctgccccaaggaggacatcctggtgaccctgaatgacctgatcaagaacatcccagatgccaagaagctggtgaagtactggatctgcctggccctgattgagcccatcaccagccccatcgagaacatcatcgccatctatgagaaggccatcctggccggggcccagcccatcgaggagatgaggcacaccatcgtggacatcctgaccatgaagagccaggagaaggccaacctgggggagaacatggagaagagctgtgccagcaaggaggaggtgaaggaggtgtccattgaagatactggagtggatgtggaccctgagaagctggagatggagagcaagctgcacaggaacctgctcttccaggactgtgagaaggagcaggacaacaagaccaaggaccccacccatgatgtgaagacccccaacacagagaccaggaccagctgcctgatcaagtacaacgtgtccaccaccccctacctgcagagcgtgaagaagaaggtgcagtttgatggcaccaacagcgccttcaaggagctgaagttcctgacccctgtgagaagaagccggcggctgcaggagaagaccagcaagctgcctgacatgctgaaggaccactacccctgtgtgagcagcctggagcagctgacagagctgggccgggagacagatgcctttgtgtgccggcccaatgctgccctgtgccgggtgtactatgaagctgacaccacctag

SEQ ID NO: 149209 - DNA, 1485 bp, synthetic construct
  misc_feature 1..1485: note = Description of Artificial Sequence: Synthetic coding sequence
  source 1..1485: mol_type = other DNA
atgagcaccccagctgtgccccaggacctgcagctgccccccagccagagggcccagagcgccttcaaggagcagaggcggcagaagctgaaggagcacctgctgcggaggaagaccctgtttgcctacaagcaggagaatgagatgctgagcagccgggaccagagggtggtgaccagcgaggaccaggtgcaggagggcaccaaggtgctgaagctgaagaccaagatggctgacaaggagaacatgaagaggcctgctgagagcaagaacaacacagtggtgggcaagcactgcatccccctgaagcccagcaatgagctgaccaacagcacagtggtgattgacacccacaagcccaaggacagcaaccagaccccccacctgctgctgacagaagatgacccccagagccagcacatgaccctgagccaggccttccacctgaagaacaacagcaagaagaagcagatgaccacagagaagcagaagcaggatgccaacatgcccaagaagcctgtgctgggcagctaccggggccagatcgtgcagagcaagatcaacagcttcaggaagcccctgcaggtgaaggatgagagcagcgctgccaccaagaagctgagcgccaccatccccaaggccaccaagccccagcctgtgaacaccagctctgtgacagtgaagagcaacagaagcagcaacatgacagccaccaccaagtttgtgtccaccaccagccagaacacccagctggtgcggccccccatccgcagccaccacagcaacacccgggacacagtgaagcagggcatcagcaggaccagcgccaacgtgaccatcaggaagggcccccatgagaaggagctgctgcagagcaagacagccctgagctctgtgaagaccagcagcagccagggcatcatccggaacaagaccctgagccgcagcatcgccagcgaggtgattgcccggcctgccagcctgagcaatgacaagctgatggagaagtctgagcctgtggaccagaggaggcacacagctgggaaggccatcgtggacagccgcagcgcccagcccaaggagaccagcgaggagaggaaggcccggctgtctgagtggaaggccggcaagggccgggtgctgaagaggcctcccaacagcgtggtgacccagcacgagcctgctggccagaatgagaagcctgtgggcagcttctggaccaccatggccgaggaggatgagcagaggctcttcacagagaaggtgaacaacaccttcagcgagtgcctgaacctgatcaatgaaggctgccccaaggaggacatcctggtgaccctgaatgacctgatcaagaacatcccagatgccaagaagctggtgaagtactggatctgcctggccctgattgagcccatcaccagccccatcgagaacatcatcgccatctatgagaaggccatcctggccggggcccaggtgaggtag

SEQ ID NO: 149210 - DNA, 2052 bp, synthetic construct
  misc_feature 1..2052: note = Description of Artificial Sequence: Synthetic coding sequence
  source 1..2052: mol_type = other DNA
atgagcaccccagctgtgccccaggacctgcagctgccccccagccagagggcccagagcgccttcaaggagcagaggcggcagaagctgaaggagcacctgctgcggaggaagaccctgtttgcctacaagcaggagaatgagatgctgagcagcagccgggaccagagggtggtgaccagcgaggaccaggtgcaggagggcaccaaggtgctgaagctgaagaccaagatggctgacaaggagaacatgaagaggcctgctgagagcaagaacaacacagtggtgggcaagcactgcatccccctgaagcccagcaatgagctgaccaacagcacagtggtgattgacacccacaagcccaaggacagcaaccagaccccccacctgctgctgacagaagatgacccccagagccagcacatgaccctgagccaggccttccacctgaagaacaacagcaagaagaagcagatgaccacagagaagcagaagcaggatgccaacatgcccaagaagcctgtgctgggcagctaccggggccagatcgtgcagagcaagatcaacagcttcaggaagcccctgcaggtgaaggatgagagcagcgctgccaccaagaagctgagcgccaccatccccaaggccaccaagccccagcctgtgaacaccagctctgtgacagtgaagagcaacagaagcagcaacatgacagccaccaccaagtttgtgtccaccaccagccagaacacccagctggtgcggccccccatccgcagccaccacagcaacacccgggacacagtgaagcagggcatcagcaggaccagcgccaacgtgaccatcaggaagggcccccatgagaaggagctgctgcagagcaagacagccctgagctctgtgaagaccagcagcagccagggcatcatccggaacaagaccctgagccgcagcatcgccagcgaggtgattgcccggcctgccagcctgagcaatgacaagctgatggagaagtctgagcctgtggaccagaggaggcacacagctgggaaggccatcgtggacagccgcagcgcccagcccaaggagaccagcgaggagaggaaggcccggctgtctgagtggaaggccggcaagggccgggtgctgaagaggcctcccaacagcgtggtgacccagcacgagcccgccggccagaatgagaagcctgtgggcagcttctggaccaccatggccgaggaggatgagcagaggctcttcacagagaaggtgaacaacaccttctctgaatgtctgaacctgatcaatgaaggctgccccaaggaggacatcctggtgaccctgaatgacctgatcaagaacatcccagatgccaagaagctggtgaagtactggatctgcctggccctgattgagcccatcaccagccccatcgagaacatcatcgccatctatgagaaggccatcctggccggggcccagcccatcgaggagatgaggcacaccatcgtggacatcctgaccatgaagagccaggagaaggccaacctgggggagaacatggagaagagctgtgccagcaaggaggaggtgaaggaggtgtccattgaggacaccggggtggatgtggaccctgagaagctggagatggagagcaagctgcacaggaacctgctcttccaggactgtgagaaggagcaggacaacaagaccaaggaccccacccatgatgtgaagacccccaacacagagaccaggaccagctgcctgatcaagtacaacgtgtccaccaccccctacctgcagagcgtgaagaagaaggtgcagtttgatggcaccaacagcgccttcaaggagctgaagttcctgacccctgtgcggcgcagccggcggctgcaggagaagaccagcaagctgcctgacatgctgaaggaccactacccctgtgtgagcagcctggagcagctgacagagctgggccgggagacagatgcctttgtgtgccggcccaatgctgccctgtgccgggtgtactatgaggccgacaccacctag

SEQ ID NO: 149211 - DNA, 1488 bp, synthetic construct
  misc_feature 1..1488: note = Description of Artificial Sequence: Synthetic coding sequence
  source 1..1488: mol_type = other DNA
atgagcaccccagctgtgccccaggacctgcagctgccccccagccagagggcccagagcgccttcaaggagcagaggcggcagaagctgaaggagcacctgctgcggaggaagaccctgtttgcctacaagcaggagaatgagatgctgagcagcagccgggaccagagggtggtgaccagcgaggaccaggtgcaggagggcaccaaggtgctgaagctgaagaccaagatggctgacaaggagaacatgaagaggcctgctgagagcaagaacaacacagtggtgggcaagcactgcatccccctgaagcccagcaatgagctgaccaacagcacagtggtgattgacacccacaagcccaaggacagcaaccagaccccccacctgctgctgacagaagatgacccccagagccagcacatgaccctgagccaggccttccacctgaagaacaacagcaagaagaagcagatgaccacagagaagcagaagcaggatgccaacatgcccaagaagcctgtgctgggcagctaccggggccagatcgtgcagagcaagatcaacagcttcaggaagcccctgcaggtgaaggatgagagcagcgctgccaccaagaagctgagcgccaccatccccaaggccaccaagccccagcctgtgaacaccagctctgtgacagtgaagagcaacagaagcagcaacatgacagccaccaccaagtttgtgtccaccaccagccagaacacccagctggtgcggccccccatccgcagccaccacagcaacacccgggacacagtgaagcagggcatcagcaggaccagcgccaacgtgaccatcaggaagggcccccatgagaaggagctgctgcagagcaagacagccctgagctctgtgaagaccagcagcagccagggcatcatccggaacaagaccctgagccgcagcatcgccagcgaggtgattgcccggcctgccagcctgagcaatgacaagctgatggagaagtctgagcctgtggaccagaggaggcacacagctgggaaggccatcgtggacagccgcagcgcccagcccaaggagaccagcgaggagaggaaggcccggctgtctgagtggaaggccggcaagggccgggtgctgaagaggcctcccaacagcgtggtgacccagcacgagcccgccggccagaatgagaagcctgtgggcagcttctggaccaccatggccgaggaggatgagcagaggctcttcacagagaaggtgaacaacaccttctctgaatgtctgaacctgatcaatgaaggctgccccaaggaggacatcctggtgaccctgaatgacctgatcaagaacatcccagatgccaagaagctggtgaagtactggatctgcctggccctgattgagcccatcaccagccccatcgagaacatcatcgccatctatgagaaggccatcctggccggggcccagcacatctag

SEQ ID NO: 149212 - DNA, 5919 bp, synthetic construct
  misc_feature 1..5919: note = Description of Artificial Sequence: Synthetic coding sequence
  source 1..5919: mol_type = other DNA
atgggagatgattctgagtggctgaagctgcctgtggaccagaagtgtgagcacaagctgtggaaggcccggctgagcggctatgaggaggccctgaagatcttccagaagatcaaggatgagaagagccctgagtggagcaagttcctgggcctcatcaagaagtttgtgacagacagcaatgctgtggtgcagctgaagggcctggaggccgccctggtgtatgtggagaatgcccacgtggccggcaagaccaccggggaggtggtgtctggagtggtgtccaaggtgttcaaccagcccaaggccaaggccaaggagctgggcatcgagatctgcctgatgtacattgaaattgaaaaaggagaggccgtgcaggaggagctgctgaagggcctggacaacaagaaccccaagatcatcgtggcctgcatcgagaccctgaggaaggccctgtctgaatttggcagcaagatcatcctgctgaagcccatcatcaaggtgctgcccaagctgtttgagagccgggagaaggctgtgagagatgaggccaagctgattgctgtggagatctaccgctggatcagagatgccctgcggccccccctgcagaacatcaacagcgtgcagctgaaggagctggaggaggagtgggtgaagctgcccaccagcgccccccggcccacccgcttcctgcggagccagcaggagctggaggccaagctggagcagcagcagagcgctggaggagatgctgagggcggcggagatgatggagatgaggtgccccagattgatgcctatgagctgctggaggccgtggagatcctgagcaagctgcccaaggacttctatgacaagattgaggccaagaagtggcaggagaggaaggaggccctggagagcgtggaggtgctgatcaagaaccccaagctggaggccggggactatgctgacctggtgaaggccctgaagaaggtggtgggcaaggacaccaacgtgatgctggtggccctggccgccaagtgcctgaccggcctggccgtgggcctgaggaagaagtttggccagtatgccggccacgtggtgcccaccatcctggagaagttcaaggagaagaagccccaggtggtgcaggccctgcaggaggccattgatgccatcttcctgaccaccaccctgcagaacatcagtgaagatgtgctggccgtgatggacaacaagaaccccaccatcaagcagcagaccagcctcttcatcgcccgctccttccgccactgcacagccagcaccctgcccaagagcctgctgaagcccttctgtgccgccctgctgaagcacatcaatgattctgcccctgaggtgagagatgctgcctttgaggccctgggcacagccctgaaggtggtgggggagaaggctgtgaaccccttcctggctgatgtggacaagctgaagctggacaagatcaaggagtgcagcgagaaggtggagctgattcatggcaagaaggccggcctggccgctgacaagaaggagttcaagcccctgcccggccgcacagctgccagcggggctgctggggacaaggacaccaaggacatcagcgcccccaagccaggccccctgaagaaggccccagctgccaaggccggcggcccccccaagaagggcaagccagctgcccctggaggagctggcaacacaggcaccaagaacaagaagggcctggagaccaaggagatcgtggagcctgagctgagcattgaggtgtgtgaggagaaggccagcgctgtgctgccccccacctgcatccagctgctggacagcagcaactggaaggagcggctggcctgcatggaggagttccagaaggctgtggagctgatggacagaacagagatgccctgccaggccctggtgaggatgctggccaagaagccaggctggaaggagaccaacttccaggtgatgcagatgaagctgcacatcgtggccctgattgcccagaagggcaacttcagcaagaccagcgcccaggtggtgctggatggcctggtggacaagattggagatgtgaagtgtggcaacaatgccaaggaggccatgacagccatcgccgaggcctgcatgctgccctggacagctgagcaggtggtgtccatggccttcagccagaagaaccccaagaaccagagcgagaccctgaactggctgagcaatgccatcaaggagtttggcttcagcggcctgaatgtgaaggccttcatcagcaatgtgaagacagccctggccgccaccaacccagctgtgaggacagctgccatcaccctgctgggcgtgatgtacctgtatgtgggccccagcctgaggatgttctttgaagatgagaagccagccctgctgagccagattgatgctgagtttgagaagatgcagggccagagccccccagcccccacccggggcatcagcaagcacagcaccagcggcacagatgaaggagaagatggagatgagccagatgatggcagcaatgatgtggtggacctgctgcccaggacagagatcagtgacaagatcaccagcgagctggtgtccaagattggagacaagaactggaagatcaggaaggagggcctggatgaggtggccggcatcatcaatgatgccaagttcatccagcccaacatcggggagctgcccacagccctgaagggccgcctgaatgacagcaacaagatcctggtgcagcagaccctgaacatcctgcagcagctggccgtggccatgggccccaacatcaagcagcacgtgaagaacctgggcatccccatcatcaccgtgctgggggacagcaagaacaacgtgcgggccgccgccctggccaccgtgaatgcctgggccgagcagacaggcatgaaggagtggctggagggggaggacctgtctgaggagctgaagaaggagaaccccttcctgcggcaggagctgctgggctggctggccgagaagctgcccaccctgcggagcacccccacagacctgatcctgtgtgtgccccacctgtacagctgcctggaggacagaaatggagatgtgaggaagaaggcccaggatgccctgcccttcttcatgatgcacctgggctatgagaagatggccaaggccaccgggaagctgaagcccaccagcaaggaccaggtgctggccatgctggagaaggccaaggtgaacatgcctgccaagccagccccacccaccaaggccaccagcaagcccatgggcggcagcgccccagccaagttccagcctgccagcgccccagctgaggactgcatcagcagcagcacagagcccaagccagaccccaagaaggccaaggcccctggcctgagcagcaaggccaagagcgcccagggcaagaagatgcccagcaagaccagcctgaaggaggatgaggacaagagcggccccatcttcatcgtggtgcccaacgggaaggagcagaggatgaaggatgagaagggcctgaaggtgctgaagtggaacttcaccaccccaagagatgagtacatcgagcagctgaagacccagatgagcagctgtgtggccaagtggctgcaggatgagatgttccacagcgacttccagcaccacaacaaggccctggccgtgatggtggaccacctggagagcgagaaggagggcgtgattggctgcctggacctgatcctgaagtggctgaccctgcgcttctttgacaccaacacctctgtgctgatgaaggccctggagtacctgaagctgctcttcaccctgctgtctgaggaggagtaccacctgacagaaaatgaggccagcagcttcatcccctacctggtggtgaaggtgggggagcccaaggatgtgatcaggaaggatgtgcgggccatcctgaacaggatgtgcctggtgtacccagccagcaagatgttccccttcatcatggagggcaccaagagcaagaacagcaagcagagagcagaatgtctggaggagctgggctgcctggtggagagctatggcatgaatgtgtgccagcccacccctgggaaggccctgaaggagattgctgtgcacatcggggaccgggacaatgctgtgagaaatgctgccctgaacaccatcgtgacagtgtacaacgtgcatggagaccaggtgttcaagctgattggcaacctgtctgagaaggacatgtccatgctggaggagcgcatcaagaggtctgccaagaggcccagcgctgcccccatcaagcaggtggaggagaagccccagagggcccagaacatcagcagcaatgccaacatgctgaggaagggccctgctgaggacatgagcagcaagctgaaccaggcccgctccatgagcggccaccctgaggccgcccagatggtgagaagagagttccagctggacctggatgaaattgaaaatgacaatggaacagtgcgctgtgagatgcctgagctggtgcagcacaagctggatgacatctttgagcctgtgctgatccctgagcccaagatccgggctgtgagcccccactttgatgacatgcacagcaacacagccagcaccatcaacttcatcatcagccaggtggccagcggggacatcaacaccagcatccaggccctgacccagctgttccagatcgagagcctggcccgggaggccagcactggagtgctgaaggacctgatgcacggcctcatcaccctgatgctggacagcagaattgaggacctggaggagggccagcaggtgatccgctctgtgaacctgctggtggtgaaggtgctggagaagagtgaccagaccaacatcctgagcgccctgctggtgctgctgcaggacagcctgctggccacagccagcagccccaagttcagcgagctggtgatgaagtgcctgtggaggatggtgcggctgctgcctgacaccatcaacagcatcaacctggaccgcatcctgctggacatccacatcttcatgaaggtgttccccaaggagaagctgaagcagtgcaagtctgagttccccatccgcaccctgaagaccctgctgcacaccctgtgcaagctgaagggccccaagatcctggaccacctgaccatgattgacaacaagaatgaaagtgagctggaggcccacctgtgcaggatgatgaagcacagcatggaccagacaggcagcaagagtgacaaggagacagagaagggggccagcagaattgatgagaagagcagcaaggccaaggtgaatgacttcctggccgagatcttcaagaagattggcagcaaggagaacaccaaggagggcctggccgagctgtatgagtacaagaagaagtacagtgatgctgacatcgagcccttcctgaagaacagcagccagttcttccagagctatgtggagcggggcctgcgggtgattgagatggagcgggagggcaagggccgcatcagcaccagcacaggcatcagcccccagatggaggtgacctgtgtgcccacccccaccagcacagtgagcagcatcggcaacaccaacggggaggaggtgggccccagcgtgtacctggagcggctgaagatcctgcggcagagatgtggcctggacaacaccaagcaggatgacaggcctcccctgaccagcctgctgagcaagccagctgtgcccaccgtggccagcagcacagacatgctgcacagcaagctgagccagctgcgggagagccgggagcagcaccagcacagcgacctggacagcaaccagacccacagcagcggcaccgtgaccagcagcagcagcacagccaacattgatgacctgaagaagaggctggagcgcatcaagagcagcaggaagtag

SEQ ID NO: 149213 - DNA, 5919 bp, synthetic construct; identical to SEQ ID NO: 149212
  misc_feature 1..5919: note = Description of Artificial Sequence: Synthetic coding sequence
  source 1..5919: mol_type = other DNA

SEQ ID NO: 149214 - DNA, 906 bp, synthetic construct
  misc_feature 1..906: note = Description of Artificial Sequence: Synthetic coding sequence
  source 1..906: mol_type = other DNA
atgggagatgattctgagtggctgaagctgcctgtggaccagaagtgtgagcacaagctgtggaaggcccggctgagcggctatgaggaggccctgaagatcttccagaagatcaaggatgagaagagccctgagtggagcaagttcctgggcctcatcaagaagtttgtgacagacagcaatgctgtggtgcagctgaagggcctggaggccgccctggtgtatgtggagaatgcccacgtggccggcaagaccaccggggaggtggtgtctggagtggtgtccaaggtgttcaaccagcccaaggccaaggccaaggagctgggcatcgagatctgcctgatgtacattgaaattgaaaaaggagaggccgtgcaggaggagctgctgaagggcctggacaacaagaaccccaagatcatcgtggcctgcatcgagaccctgaggaaggccctgtctgaatttggcagcaagatcatcctgctgaagcccatcatcaaggtgctgcccaagctgtttgagagccgggagaaggctgtgagagatgaggccaagctgattgctgtggagatctaccgctggatcagagatgccctgcggccccccctgcagaacatcaacagcgtgcagctgaaggagctggaggaggagtgggtgaagctgcccaccagcgccccccggcccacccgcttcctgcggagccagcaggagctggaggccaagctggagcagcagcagagcgctggaggagatgctgagggcggcggagatgatggagatgaggtgccccagattgatgcctatgagctgctggaggccgtggagatcctgagcaagcccaagaccttcatgaccaagctgcggcagaagaatggcaagcgggagaagaggccctggagcctgtag

SEQ ID NO: 149215 - DNA, 6120 bp, synthetic construct
  misc_feature 1..6120: note = Description of Artificial Sequence: Synthetic coding sequence
  source 1..6120: mol_type = other DNA
atgggagatgattctgagtggctgaagctgcctgtggaccagaagtgtgagcacaagctgtggaaggcccggctgagcggctatgaggaggccctgaagatcttccagaagatcaaggatgagaagagccctgagtggagcaagttcctgggcctcatcaagaagtttgtgacagacagcaatgctgtggtgcagctgaagggcctggaggccgccctggtgtatgtggagaatgcccacgtggccggcaagaccaccggggaggtggtgtctggagtggtgtccaaggtgttcaaccagcccaaggccaaggccaaggagctgggcatcgagatctgcctgatgtacattgaaattgaaaaaggagaggccgtgcaggaggagctgctgaagggcctggacaacaagaaccccaagatcatcgtggcctgcatcgagaccctgaggaaggccctgtctgaatttggcagcaagatcatcctgctgaagcccatcatcaaggtgctgcccaagctgtttgagagccgggagaaggctgtgagagatgaggccaagctgattgctgtggagatctaccgctggatcagagatgccctgcggccccccctgcagaacatcaacagcgtgcagctgaaggagctggaggaggagtgggtgaagctgcccaccagcgccccccggcccacccgcttcctgcggagccagcaggagctggaggccaagctggagcagcagcagagcgctggaggagatgctgagggcggcggagatgatggagatgaggtgccccagattgatgcctatgagctgctggaggccgtggagatcctgagcaagctgcccaaggacttctatgacaagattgaggccaagaagtggcaggagaggaaggaggccctggagagcgtggaggtgctgatcaagaaccccaagctggaggccggggactatgctgacctggtgaaggccctgaagaaggtggtgggcaaggacaccaacgtgatgctggtggccctggccgccaagtgcctgaccggcctggccgtgggcctgaggaagaagtttggccagtatgccggccacgtggtgcccaccatcctggagaagttcaaggagaagaagccccaggtggtgcaggccctgcaggaggccattgatgccatcttcctgaccaccaccctgcagaacatcagtgaagatgtgctggccgtgatggacaacaagaaccccaccatcaagcagcagaccagcctcttcatcgcccgctccttccgccactgcacagccagcaccctgcccaagagcctgctgaagcccttctgtgccgccctgctgaagcacatcaatgattctgcccctgaggtgagagatgctgcctttgaggccctgggcacagccctgaaggtggtgggggagaaggctgtgaaccccttcctggctgatgtggacaagctgaagctggacaagatcaaggagtgcagcgagaaggtggagctgattcatggcaagaaggccggcctggccgctgacaagaaggagttcaagcccctgcccggccgcacagctgccagcggggctgctggggacaaggacaccaaggacatcagcgcccccaagccaggccccctgaagaaggccccagctgccaaggccggcggcccccccaagaagggcaagccagctgcccctggaggagctggcaacacaggcaccaagaacaagaagggcctggagaccaaggagatcgtggagcctgagctgagcattgaggtgtgtgaggagaaggccagcgctgtgctgccccccacctgcatccagctgctggacagcagcaactggaaggagcggctggcctgcatggaggagttccagaaggctgtggagctgatggacagaacagagatgccctgccaggccctggtgaggatgctggccaagaagccaggctggaaggagaccaacttccaggtgatgcagatgaagctgcacatcgtggccctgattgcccagaagggcaacttcagcaagaccagcgcccaggtggtgctggatggcctggtggacaagattggagatgtgaagtgtggcaacaatgccaaggaggccatgacagccatcgccgaggcctgcatgctgccctggacagctgagcaggtggtgtccatggccttcagccagaagaaccccaagaaccagagcgagaccctgaactggctgagcaatgccatcaaggagtttggcttcagcggcctgaatgtgaaggccttcatcagcaatgtgaagacagccctggccgccaccaacccagctgtgaggacagctgccatcaccctgctgggcgtgatgtacctgtatgtgggccccagcctgaggatgttctttgaagatgagaagccagccctgctgagccagattgatgctgagtttgagaagatgcagggccagagccccccagcccccacccggggcatcagcaagcacagcaccagcggcacagatgaaggagaagatggagatgagccagatgatggcagcaatgatgtggtggacctgctgcccaggacagagatcagtgacaagatcaccagcgagctggtgtccaagattggagacaagaactggaagatcaggaaggagggcctggatgaggtggccggcatcatcaatgatgccaagttcatccagcccaacatcggggagctgcccacagccctgaagggccgcctgaatgacagcaacaagatcctggtgcagcagaccctgaacatcctgcagcagctggccgtggccatgggccccaacatcaagcagcacgtgaagaacctgggcatccccatcatcaccgtgctgggggacagcaagaacaacgtgcgggccgccgccctggccaccgtgaatgcctgggccgagcagacaggcatgaaggagtggctggagggggaggacctgtctgaggagctgaagaaggagaaccccttcctgcggcaggagctgctgggctggctggccgagaagctgcccaccctgcggagcacccccacagacctgatcctgtgtgtgccccacctgtacagctgcctggaggacagaaatggagatgtgaggaagaaggcccaggatgccctgcccttcttcatgatgcacctgggctatgagaagatggccaaggccaccgggaagctgaagcccaccagcaaggaccaggtgctggccatgctggagaaggccaaggtgaacatgcctgccaagccagccccacccaccaaggccaccagcaagcccatgggcggcagcgccccagccaagttccagcctgccagcgccccagctgaggactgcatcagcagcagcacagagcccaagccagaccccaagaaggccaaggcccctggcctgagcagcaaggccaagagcgcccagggcaagaagatgcccagcaagaccagcctgaaggaggatgaggacaagagcggccccatcttcatcgtggtgcccaacgggaaggagcagaggatgaaggatgagaagggcctgaaggtgctgaagtggaacttcaccaccccaagagatgagtacatcgagcagctgaagacccagatgagcagctgtgtggccaagtggctgcaggatgagatgttccacagcgacttccagcaccacaacaaggccctggccgtgatggtggaccacctggagagcgagaaggagggcgtgattggctgcctggacctgatcctgaagtggctgaccctgcgcttctttgacaccaacacctctgtgctgatgaaggccctggagtacctgaagctgctcttcaccctgctgtctgaggaggagtaccacctgacagaaaatgaggccagcagcttcatcccctacctggtggtgaaggtgggggagcccaaggatgtgatcaggaaggatgtgcgggccatcctgaacaggatgtgcctggtgtacccagccagcaagatgttccccttcatcatggagggcaccaagagcaagaacagcaagcagagagcagaatgtctggaggagctgggctgcctggtggagagctatggcatgaatgtgtgccagcccacccctgggaaggccctgaaggagattgctgtgcacatcggggaccgggacaatgctgtgagaaatgctgccctgaacaccatcgtgacagtgtacaacgtgcatggagaccaggtgttcaagctgattggcaacctgtctgagaaggacatgtccatgctggaggagcgcatcaagaggtctgccaagaggcccagcgctgcccccatcaagcaggtggaggagaagccccagagggcccagaacatcagcagcaatgccaacatgctgaggaagggccctgctgaggacatgagcagcaagctgaaccaggcccgctccatgagcggccaccctgaggccgcccagatggtgagaagagagttccagctggacctggatgaaattgaaaatgacaatggaacagtgcgctgtgagatgcctgagctggtgcagcacaagctggatgacatctttgagcctgtgctgatccctgagcccaagatccgggctgtgagcccccactttgatgacatgcacagcaacacagccagcaccatcaacttcatcatcagccaggtggccagcggggacatcaacaccagcatccaggccctgacccagattgatgaggtgctgcggcaggaggacaaggccgaggccatgagcggccacatcgaccagttcctgattgccaccttcatgcagctgcggctcatctacaacacccacatggctgatgagaagctggagaaggatgagatcatcaagctgtacagctgcatcatcggcaacatgatcagcctcttccagatcgagagcctggcccgggaggccagcactggagtgctgaaggacctgatgcacggcctcatcaccctgatgctggacagcagaattgaggacctggaggagggccagcaggtgatccgctctgtgaacctgctggtggtgaaggtgctggagaagagtgaccagaccaacatcctgagcgccctgctggtgctgctgcaggacagcctgctggccacagccagcagccccaagttcagcgagctggtgatgaagtgcctgtggaggatggtgcggctgctgcctgacaccatcaacagcatcaacctggaccgcatcctgctggacatccacatcttcatgaaggtgttccccaaggagaagctgaagcagtgcaagtctgagttccccatccgcaccctgaagaccctgctgcacaccctgtgcaagctgaagggccccaagagctgcatgtgcctgccccagatcctggaccacctgaccatgattgacaacaagaatgaaagtgagctggaggcccacctgtgcaggatgatgaagcacagcatggaccagacaggcagcaagagtgacaaggagacagagaagggggccagcagaattgatgagaagagcagcaaggccaaggtgaatgacttcctggccgagatcttcaagaagattggcagcaaagaaaacaccaaggagggcctggccgagctgtatgagtacaagaagaagtacagtgatgctgacatcgagcccttcctgaagaacagcagccagttcttccagagctatgtggagcggggcctgcgggtcatcgagatggagcgggagggcaagggccgcatcagcaccagcacaggcatcagcccccagatggaggtgacctgtgtgcccacccccaccagcacagtgagcagcatcggcaacaccaatggagaggaggtgggccccagcgtgtacctggagcggctgaagatcctgcggcagagatgtggcctggacaacaccaagcaggatgaccggccccccctgaccagcctgctgagcaagccagctgtgcccaccgtggccagcagcacagacatgctgcacagcaagctgagccagctgcgggagagccgggagcagcaccagcacagcgacctggacagcaaccagacccacagcagcggcaccgtgaccagcagcagcagcacagccaacattgatgacctgaagaagaggctggagcgcatcaagagcagcaggaagtag

SEQ ID NO: 149216 - DNA, 456 bp, synthetic construct
  misc_feature 1..456: note = Description of Artificial Sequence: Synthetic coding sequence
  source 1..456: mol_type = other DNA
atgggagatgattctgagtggctgaagctgcctgtggaccagaagtgtgagcacaagctgtggaaggcccggctgagcggctatgaggaggccctgaagatcttccagaagatcaaggatgagaagagccctgagtggagcaagttcctgggcctcatcaagaagtttgtgacagacagcaatgctgtggtgcagctgaagggcctggaggccgccctggtgtatgtggagaatgcccacgtggccggcaagaccaccggggaggtggtgtctggagtggtgtccaaggtgttcaaccagcccaaggccaaggccaaggagctgggcatcgagatctgcctgatgtacattgaaattgaaaaaggagaggccgtgcaggaggagctgctgaagggcctggacaacaagaaccccaagatcatcgtggcctgcatcgagaccctgaggaaggcctag

SEQ ID NO: 149217 - DNA, 6099 bp, synthetic construct
  misc_feature 1..6099: note = Description of Artificial Sequence: Synthetic coding sequence
  source 1..6099: mol_type = other DNA
atgggagatgattctgagtggctgaagctgcctgtggaccagaagtgtgagcacaagctgtggaaggcccggctgagcggctatgaggaggccctgaagatcttccagaagatcaaggatgagaagagccctgagtggagcaagttcctgggcctcatcaagaagtttgtgacagacagcaatgctgtggtgcagctgaagggcctggaggccgccctggtgtatgtggagaatgcccacgtggccggcaagaccaccggggaggtggtgtctggagtggtgtccaaggtgttcaaccagcccaaggccaaggccaaggagctgggcatcgagatctgcctgatgtacattgaaattgaaaaaggagaggccgtgcaggaggagctgctgaagggcctggacaacaagaaccccaagatcatcgtggcctgcatcgagaccctgaggaaggccctgtctgaatttggcagcaagatcatcctgctgaagcccatcatcaaggtgctgcccaagctgtttgagagccgggagaaggctgtgagagatgaggccaagctgattgctgtggagatctaccgctggatcagagatgccctgcggccccccctgcagaacatcaacagcgtgcagctgaaggagctggaggaggagtgggtgaagctgcccaccagcgccccccggcccacccgcttcctgcggagccagcaggagctggaggccaagctggagcagcagcagagcgctggaggagatgctgagggcggcggagatgatggagatgaggtgccccagattgatgcctatgagctgctggaggccgtggagatcctgagcaagctgcccaaggacttctatgacaagattgaggccaagaagtggcaggagaggaaggaggccctggagagcgtggaggtgctgatcaagaaccccaagctggaggccggggactatgctgacctggtgaaggccctgaagaaggtggtgggcaaggacaccaacgtgatgctggtggccctggccgccaagtgcctgaccggcctggccgtgggcctgaggaagaagtttggccagtatgccggccacgtggtgcccaccatcctggagaagttcaaggagaagaagccccaggtggtgcaggccctgcaggaggccattgatgccatcttcctgaccaccaccctgcagaacatcagtgaagatgtgctggccgtgatggacaacaagaaccccaccatcaagcagcagaccagcctcttcatcgcccgctccttccgccactgcacagccagcaccctgcccaagagcctgctgaagcccttctgtgccgccctgctgaagcacatcaatgattctgcccctgaggtgagagatgctgcctttgaggccctgggcacagccctgaaggtggtgggggagaaggctgtgaaccccttcctggctgatgtggacaagctgaagctggacaagatcaaggagtgcagcgagaaggtggagctgattcatggcaagaaggccggcctggccgctgacaagaaggagttcaagcccctgcccggccgcacagctgccagcggggctgctggggacaaggacaccaaggacatcagcgcccccaagccaggccccctgaagaaggccccagctgccaaggccggcggcccccccaagaagggcaagccagctgcccctggaggagctggcaacacaggcaccaagaacaagaagggcctggagaccaaggagatcgtggagcctgagctgagcattgaggtgtgtgaggagaaggccagcgctgtgctgccccccacctgcatccagctgctggacagcagcaactggaaggagcggctggcctgcatggaggagttccagaaggctgtggagctgatggacagaacagagatgccctgccaggccctggtgaggatgctggccaagaagccaggctggaaggagaccaacttccaggtgatgcagatgaagctgcacatcgtggccctgattgcccagaagggcaacttcagcaagaccagcgcccaggtggtgctggatggcctggtggacaagattggagatgtgaagtgtggcaacaatgccaaggaggccatgacagccatcgccgaggcctgcatgctgccctggacagctgagcaggtggtgtccatggccttcagccagaagaaccccaagaaccagagcgagaccctgaactggctgagcaatgccatcaaggagtttggcttcagcggcctgaatgtgaaggccttcatcagcaatgtgaagacagccctggccgccaccaacccagctgtgaggacagctgccatcaccctgctgggcgtgatgtacctgtatgtgggccccagcctgaggatgttctttgaagatgagaagccagccctgctgagccagattgatgctgagtttgagaagatgcagggccagagccccccagcccccacccggggcatcagcaagcacagcaccagcggcacagatgaaggagaagatggagatgagccagatgatggcagcaatgatgtggtggacctgctgcccaggacagagatcagtgacaagatcaccagcgagctggtgtccaagattggagacaagaactggaagatcaggaaggagggcctggatgaggtggccggcatcatcaatgatgccaagttcatccagcccaacatcggggagctgcccacagccctgaagggccgcctgaatgacagcaacaagatcctggtgcagcagaccctgaacatcctgcagcagctggccgtggccatgggccccaacatcaagcagcacgtgaagaacctgggcatccccatcatcaccgtgctgggggacagcaagaacaacgtgcgggccgccgccctggccaccgtgaatgcctgggccgagcagacaggcatgaaggagtggctggagggggaggacctgtctgaggagctgaagaaggagaaccccttcctgcggcaggagctgctgggctggctggccgagaagctgcccaccctgcggagcacccccacagacctgatcctgtgtgtgccccacctgtacagctgcctggaggacagaaatggagatgtgaggaagaaggcccaggatgccctgcccttcttcatgatgcacctgggctatgagaagatggccaaggccaccgggaagctgaagcccaccagcaaggaccaggtgctggccatgctggagaaggccaaggtgaacatgcctgccaagccagccccacccaccaaggccaccagcaagcccatgggcggcagcgccccagccaagttccagcctgccagcgccccagctgaggactgcatcagcagcagcacagagcccaagccagaccccaagaaggccaaggcccctggcctgagcagcaaggccaagagcgcccagggcaagaagatgcccagcaagaccagcctgaaggaggatgaggacaagagcggccccatcttcatcgtggtgcccaacgggaaggagcagaggatgaaggatgagaagggcctgaaggtgctgaagtggaacttcaccaccccaagagatgagtacatcgagcagctgaagacccagatgagcagctgtgtggccaagtggctgcaggatgagatgttccacagcgacttccagcaccacaacaaggccctggccgtgatggtggaccacctggagagcgagaaggagggcgtgattggctgcctggacctgatcctgaagtggctgaccctgcgcttctttgacaccaacacctctgtgctgatgaaggccctggagtacctgaagctgctcttcaccctgctgtctgaggaggagtaccacctgacagaaaatgaggccagcagcttcatcccctacctggtggtgaaggtgggggagcccaaggatgtgatcaggaaggatgtgcgggccatcctgaacaggatgtgcctggtgtacccagccagcaagatgttccccttcatcatggagggcaccaagagcaagaacagcaagcagagagcagaatgtctggaggagctgggctgcctggtggagagctatggcatgaatgtgtgccagcccacccctgggaaggccctgaaggagattgctgtgcacatcggggaccgggacaatgctgtgagaaatgctgccctgaacaccatcgtgacagtgtacaacgtgcatggagaccaggtgttcaagctgattggcaacctgtctgagaaggacatgtccatgctggaggagcgcatcaagaggtctgccaagaggcccagcgctgcccccatcaagcaggtggaggagaagccccagagggcccagaacatcagcagcaatgccaacatgctgaggaagggccctgctgaggacatgagcagcaagctgaaccaggcccgctccatgagcggccaccctgaggccgcccagatggtgagaagagagttccagctggacctggatgaaattgaaaatgacaatggaacagtgcgctgtgagatgcctgagctggtgcagcacaagctggatgacatctttgagcctgtgctgatccctgagcccaagatccgggctgtgagcccccactttgatgacatgcacagcaacacagccagcaccatcaacttcatcatcagccaggtggccagcggggacatcaacaccagcatccaggccctgacccagattgatgaggtgctgcggcaggaggacaaggccgaggccatgagcggccacatcgaccagttcctgattgccaccttcatgcagctgcggctcatctacaacacccacatggctgatgagaagctggagaaggatgagatcatcaagctgtacagctgcatcatcggcaacatgatcagcctcttccagatcgagagcctggcccgggaggccagcactggagtgctgaaggacctgatgcacggcctcatcaccctgatgctggacagcagaattgaggacctggaggagggccagcaggtgatccgctctgtgaacctgctggtggtgaaggtgctggagaagagtgaccagaccaacatcctgagcgccctgctggtgctgctgcaggacagcctgctggccacagccagcagccccaagttcagcgagctggtgatgaagtgcctgtggaggatggtgcggctgctgcctgacaccatcaacagcatcaacctggaccgcatcctgctggacatccacatcttcatgaaggtgttccccaaggagaagctgaagcagtgcaagtctgagttccccatccgcaccctgaagaccctgctgcacaccctgtgcaagctgaagggccccaagatcctggaccacctgaccatgattgacaacaagaatgaaagtgagctggaggcccacctgtgcaggatgatgaagcacagcatggaccagacaggcagcaagagtgacaaggagacagagaagggggccagcagaattgatgagaagagcagcaaggccaaggtgaatgacttcctggccgagatcttcaagaagattggcagcaaggagaacaccaaggagggcctggccgagctgtatgagtacaagaagaagtacagtgatgctgacatcgagcccttcctgaagaacagcagccagttcttccagagctatgtggagcggggcctgcgggtgattgagatggagcgggagggcaagggccgcatcagcaccagcacaggcatcagcccccagatggaggtgacctgtgtgcccacccccaccagcacagtgagcagcatcggcaacaccaacggggaggaggtgggccccagcgtgtacctggagcggctgaagatcctgcggcagagatgtggcctggacaacaccaagcaggatgacaggcctcccctgaccagcctgctgagcaagccagctgtgcccaccgtggccagcagcacagacatgctgcacagcaagctgagccagctgcgggagagccgggagcagcaccagcacagcgacctggacagcaaccagacccacagcagcggcaccgtgaccagcagcagcagcacagccaacattgatgacctgaagaagaggctggagcgcatcaagagcagcaggaagtag

SEQ ID NO: 149218 - DNA, 1020 bp, synthetic construct
  misc_feature 1..1020: note = Description of Artificial Sequence: Synthetic coding sequence
  source 1..1020: mol_type = other DNA
atgaaggacagcctggtgctgctgggccgggtgcctgcccacccagacagccgctgctggttcctggcctggaacccagctggcaccctgctggccagctgtggcggggaccggcgcatccgcatctggggcacagaaggagacagctggatctgcaagtctgtgctgtctgagggccaccagaggacagtgaggaaggtggcctggagcccctgtggcaactacctggccagcgccagctttgatgccaccacctgcatctggaagaagaaccaggatgactttgaatgtgtgaccaccctggagggccatgaaaatgaggtgaagtctgtggcctgggcccccagcggcaacctgctggccacctgcagccgggacaagtctgtgtgggtgtgggaggtggatgaagaagatgaatatgaatgtgtgtctgtgctgaacagccacacccaggatgtgaagcacgtggtgtggcaccccagccaggagctgctggccagcgccagctatgatgacacagtgaagctgtaccgggaggaggaggatgactgggtgtgctgtgccaccctggagggccacgagagcacagtgtggagcctggcctttgaccccagcggccagaggctggccagctgcagtgatgacagaacagtgcgcatctggaggcagtacctgcctggaaatgagcagggcgtggcctgcagcggcagtgaccccagctggaagtgcatctgcaccctgagcggcttccacagcaggaccatctatgacatcgcctggtgccagctgaccggggccctggccacagcctgtggagatgatgccatccgggtcttccaggaggaccccaacagcgacccccagcagcccaccttcagcctgacagcccacctgcaccaggcccacagccaggatgtgaactgtgtggcctggaaccccaaggagcccggcctgctggccagctgcagtgatgatggagaggtggccttctggaagtaccagaggcctgagggcctgtag

SEQ ID NO: 149219 - DNA, 1380 bp, synthetic construct
  misc_feature 1..1380: note = Description of Artificial Sequence: Synthetic coding sequence
  source 1..1380: mol_type = other DNA
atggccgccagcggggctgtggagcccggccccccaggagctgctgtggcccccagccctgccccagcccctcctccagccccagaccacctgttccggcccatctctgcagaagatgaggagcagcagcccacagaaattgagagcctgtgcatgaactgctactgcaatggcatgacccggctgctgctgaccaagatccccttcttccgggagatcatcgtgtcctccttcagctgtgagcactgcggctggaacaacacagagatccagagcgctggccgcatccaggaccagggcgtgcgctacaccctgtctgtgcgggccctggaggacatgaaccgggaggtggtgaagacagacagcgctgccacccgcatccctgagctggactttgagatcccagccttcagccagaagggggccctgaccaccgtggagggcctcatcacccgggccatcagcggcctggagcaggaccagcctgcccggcgggccaacaaggatgccacagctgagagaattgatgagttcatcgtgaagctgaaggagctgaagcaggtggccagccccttcaccctcatcattgatgaccccagcggcaacagctttgtggagaacccccacgccccccagaaggatgatgccctggtgatcacccactacaacagaacccggcagcaggaggagatgctgggcctgcaggaggaggccccagctgagaagccagaggaggaggacctgagaaatgaggtgctgcagttcagcaccaactgcccagaatgtaatgccccagcccagaccaacatgaagctggtgcagatcccccacttcaaggaggtgatcatcatggccaccaactgtgagaactgtggccacaggaccaatgaggtgaagagcggcggcgctgtggagcccctgggcacccgcatcaccctgcacatcacagatgccagtgacatgacccgggacctgctgaagtctgagacctgcagcgtggagatccctgagctggagtttgagctgggcatggctgtgctgggcggcaagttcaccaccctggagggcctgctgaaggacatccgggagctggtgaccaagaaccccttcaccctgggggacagcagcaaccctggccagacagagcggctgcaggagttcagccagaagatggaccagatcatcgagggcaacatgaaggcccacttcatcatggatgatcctgctggcaacagctacctgcagaatgtgtatgccccagaagatgatcctgagatgaaggtggagcgctacaagaggacctttgaccagaatgaggagctgggcctgaatgacatgaagacagagggctatgaagctggcctggccccccagaggtag

SEQ ID NO: 149220 - DNA, 585 bp, synthetic construct
  misc_feature 1..585: note = Description of Artificial Sequence: Synthetic coding sequence
  source 1..585: mol_type = other DNA
atgtgggtgaagctgctgagcatcgtggccgagttctgcttcagccccttcctggtgacagatgaggagacagccagtgatgccctggagaggaacagcctgagcagccaggacccccagcagcccaccagcacagtgtctgtgacagaggacagcagcaccagcgagattgacaaggaggagaaggagcagaccacccaggaccctgacctgaccacagaggccaacccccagtacctgggcctggccaggaagaagagcggcatcctgctgctgaccctggtgtccttcctgatcttcatcctcttcatcatcgtgcagctgttcatcatgaagctgaggaaggcccacgtgatctggaagaaggaaaatgaggtgtctgagcacaccctggagagctaccgcagccgcagcaacaatgaggagaccagcagcgaggagaagaatggccagagcagccaccccatgcgctgcatgaactacatcaccaagctgtacagcgaggccaagaccaagaggaaagaaaatgtgcagcacagcaagctggaggagaagcacatccaggtgcctgagagcatcgtgtag

SEQ ID NO: 149221 - DNA, 525 bp, synthetic construct
  misc_feature 1..525: note = Description of Artificial Sequence: Synthetic coding sequence
  source 1..525: mol_type = other DNA
atggcctgcctgggcttccagaggcacaaggcccagctgaacctggccaccaggacctggccctgcaccctgctcttcttcctgctcttcatccctgtgttctgcaaggccatgcacgtggcccagcctgctgtggtgctggccagcagccggggcatcgccagctttgtgtgtgaatatgccagccctgggaaggccacagaggtgcgggtgacagtgctgcggcaggccgacagccaggtgacagaggtgtgtgccgccacctacatgatgggaaatgagctgaccttcctggatgacagcatctgcaccggcaccagcagcggcaaccaggtgaacctgaccatccagggcctgcgggccatggacaccggcctgtacatctgcaaggtggagctgatgtaccccccaccctactacctgggcattggaaatggcacccagatctacgtgattgccaaggagaagaagcccagctacaacagaggcctgtgtgaaaatgcccccaacagagccaggatgtag

SEQ ID NO: 149222 - DNA, 672 bp, synthetic construct
  misc_feature 1..672: note = Description of Artificial Sequence: Synthetic coding sequence
  source 1..672: mol_type = other DNA
atggcctgcctgggcttccagaggcacaaggcccagctgaacctggccaccaggacctggccctgcaccctgctcttcttcctgctcttcatccctgtgttctgcaaggccatgcacgtggcccagcctgctgtggtgctggccagcagccggggcatcgccagctttgtgtgtgaatatgccagccctgggaaggccacagaggtgcgggtgacagtgctgcggcaggccgacagccaggtgacagaggtgtgtgccgccacctacatgatgggaaatgagctgaccttcctggatgacagcatctgcaccggcaccagcagcggcaaccaggtgaacctgaccatccagggcctgcgggccatggacaccggcctgtacatctgcaaggtggagctgatgtaccccccaccctactacctgggcattggaaatggcacccagatctacgtgattgatcctgagccctgcccagacagcgacttcctgctgtggatcctggccgctgtgagcagcggcctcttcttctacagcttcctgctgacagctgtgtccctgagcaagatgctgaagaagaggagccccctgaccaccggggtgtatgtgaagatgccacccacagagccagaatgtgagaagcagttccagccctacttcatccccatcaactag

SEQ ID NO: 149223 - DNA, 414 bp, synthetic construct
  misc_feature 1..414: note = Description of Artificial Sequence: Synthetic coding sequence
  source 1..414: mol_type = other DNA
atgcacgtggcccagcctgctgtggtgctggccagcagccggggcatcgccagctttgtgtgtgaatatgccagccctgggaaggccacagaggtgcgggtgacagtgctgcggcaggccgacagccaggtgacagaggtgtgtgccgccacctacatgatgggaaatgagctgaccttcctggatgacagcatctgcaccggcaccagcagcggcaaccaggtgaacctgaccatccagggcctgcgggccatggacaccggcctgtacatctgcaaggtggagctgatgtaccccccaccctactacctgggcattggaaatggcacccagatctacgtgattgccaaggagaagaagcccagctacaacagaggcctgtgtgaaaatgcccccaacagagccaggatgtag

SEQ ID NO: 149224 - DNA, 171 bp, synthetic construct
  misc_feature 1..171: note = Description of Artificial Sequence: Synthetic coding sequence
  source 1..171: mol_type = other DNA
atggcctgcctgggcttccagaggcacaaggcccagctgaacctggccaccaggacctggccctgcaccctgctcttcttcctgctcttcatccctgtgttctgcaaggtgcccccaacagagccagaatgtgagaagcagttccagccctacttcatccccatcaactag

SEQ ID NO: 149225 - DNA, 660 bp, synthetic construct
  misc_feature 1..660: note = Description of Artificial Sequence: Synthetic coding sequence
  source 1..660: mol_type = other DNA
atggccagcgctggggacacccaggccggccccagagatgctgctgaccagaactttgactacatgttcaagctgctgctgattggcaacagctctgtgggcaagaccagcttcctgttccgctatgcagatgacagcttcaccccagcctttgtgtccacagtgggcatcgacttcaaggtgaagacagtgtacagacatgacaagaggatcaagctgcagatctgggacacagctggccaggagcgctaccgcaccatcaccacagcctactacagaggagccatgggcttcctgctgatgtatgacatcgccaaccaggagagctttgctgctgtgcaggactgggccacccagatcaagacctacagctgggacaatgcccaggtgatcctggtgggcaacaagtgtgacctggaggatgagcgggtggtgcctgcagaagatggaagaaggctggctgatgacctgggctttgagttctttgaggccagcgccaaggagaacatcaacgtgaagcaggtgtttgagcggctggtggatgtgatctgtgagaagatgaatgaaagcctggagcccagcagcagcagcggcagcaatggcaagggccctgctgtgggagatgccccagccccccagcccagcagctgcagctgctag

SEQ ID NO: 149226 - DNA, 1566 bp, synthetic construct
  misc_feature 1..1566: note = Description of Artificial Sequence: Synthetic coding sequence
  source 1..1566: mol_type = other DNA
atgctgccccggcggcccctggcctggccagcctggctgctgcggggggcccctggagctgctggctcctggggccggcctgtgggccccctggcccggcggggctgctgcagcgcccctggcaccccagaggtgcccctgacccgggagcgctaccctgtgcggcggctgcccttcagcacagtgtccaagcaggacctggccgcctttgaaagaattgtgcctggaggagtggtgacagatcctgaggccctgcaggccccaaatgtggactggctgcggaccctgcggggctgcagcaaggtgctgctgcggcccaggaccagcgaggaggtgagccacatcctgcggcactgccacgagaggaacctggccgtgaacccccagggcggcaacacaggcatggtgggcggctctgtgcctgtgtttgatgagatcatcctgagcacagccaggatgaacagagtgctgtccttccacagcgtgtctggcatcctggtgtgccaggccggctgtgtgctggaggagctgagccgctacgtggaggagcgggacttcatcatgcccctggacctgggcgccaagggcagctgccacatcggcggcaatgtggccaccaatgctgggggcctgcgcttcctgcgctatggcagcctgcacggcaccgtgctgggcctggaggtggtgctggctgatggcaccgtgctggactgcctgaccagcctgaggaaggacaacacaggctatgacctgaagcagctgttcatcggcagcgagggcaccctgggcatcatcaccaccgtgtccatcctgtgcccccccaagcccagggctgtgaatgtggccttcctgggctgccccggctttgctgaggtgctgcagaccttcagcacctgcaagggcatgctgggggagatcctgagcgcctttgagttcatggatgctgtgtgcatgcagctggtgggccgccacctgcacctggccagccctgtgcaggagagccccttctacgtgctgattgagaccagcggcagcaatgccggccatgatgctgagaagctgggccacttcctggagcacgccctgggcagcggcctggtgacagatggcaccatggccacagaccagaggaaggtgaagatgctgtgggccctgcgggagcgcatcacagaggccctgagcagagatggctacgtgtacaagtatgacctgagcctgcctgtggagcggctgtatgacatcgtgacagacctgcgggcccggctgggcccccacgccaagcacgtggtgggctacggccacctgggagatggcaacctgcacctgaatgtgacagctgaggccttcagccccagcctgctggccgccctggagccccacgtgtatgagtggacagctggccagcagggctctgtgtctgctgagcacggcgtgggcttcaggaagagagatgtgctgggctacagcaagcccccaggggccctgcagctgatgcagcagctgaaggccctgctggaccccaagggcatcctgaacccctacaagaccctgcccagccaggcctag

SEQ ID NO: 149227 - DNA, 960 bp, synthetic construct
  misc_feature 1..960: note = Description of Artificial Sequence: Synthetic coding sequence
  source 1..960: mol_type = other DNA
atgctgccccggcggcccctggcctggccagcctggctgctgcggggggcccctggagctgctggctcctggggccggcctgtgggccccctggcccggcggggctgctgcagcgcccctggcaccccagaggtgcccctgacccgggagcgctaccctgtgcggcggctgcccttcagcacagtgtccaagcaggacctggccgcctttgaaagaattgtgcctggaggagtggtgacagatcctgaggccctgcaggccccaaatgtggactggctgcggaccctgcggggctgcagcaaggtgctgctgcggcccaggaccagcgaggaggtgagccacatcctgcggcactgccacgagaggaacctggccgtgaacccccagggcggcaacacaggcatggtgggcggctctgtgcctgtgtttgatgagatcatcctgagcacagccaggatgaacagagtgctgtccttccacagcgtgtctggcatcctggtgtgccaggccggctgtgtgctggaggagctgagccgctacgtggaggagcgggacttcatcatgcccctggacctgggcgccaagggcagctgccacatcggcggcaatgtggccaccaatgctgggggcctgcgcttcctgcgctatggcagcctgcacggcaccgtgctgggcctggaggtggtgctggctgatggcaccgtgctggactgcctgaccagcctgaggaaggacaacacaggctatgacctgaagcagctgttcatcggcagcgagggcaccctgggcatcatcaccaccgtgtccatcctgtgcccccccaagcccagggctgtgaatgtggccttcctggtgacctgtgtgcccccagcctgtggccctggcagccccaggcctgcccggctgccccacccagccctgcggaccccaggagtgtgcccccagcccctgcggctgtag

SEQ ID NO: 149228 - DNA, 1164 bp, synthetic construct
  misc_feature 1..1164: note = Description of Artificial Sequence: Synthetic coding sequence
  source 1..1164: mol_type = other DNA
atggtgggcggctctgtgcctgtgtttgatgagatcatcctgagcacagccaggatgaacagagtgctgtccttccacagcgtgtctggcatcctggtgtgccaggccggctgtgtgctggaggagctgagccgctacgtggaggagcgggacttcatcatgcccctggacctgggcgccaagggcagctgccacatcggcggcaatgtggccaccaatgctgggggcctgcgcttcctgcgctatggcagcctgcacggcaccgtgctgggcctggaggtggtgctggctgatggcaccgtgctggactgcctgaccagcctgaggaaggacaacacaggctatgacctgaagcagctgttcatcggcagcgagggcaccctgggcatcatcaccaccgtgtccatcctgtgcccccccaagcccagggctgtgaatgtggccttcctgggctgccccggctttgctgaggtgctgcagaccttcagcacctgcaagggcatgctgggggagatcctgagcgcctttgagttcatggatgctgtgtgcatgcagctggtgggccgccacctgcacctggccagccctgtgcaggagagccccttctacgtgctgattgagaccagcggcagcaatgccggccatgatgctgagaagctgggccacttcctggagcacgccctgggcagcggcctggtgacagatggcaccatggccacagaccagaggaaggtgaagatgctgtgggccctgcgggagcgcatcacagaggccctgagcagagatggctacgtgtacaagtatgacctgagcctgcctgtggagcggctgtatgacatcgtgacagacctgcgggcccggctgggcccccacgccaagcacgtggtgggctacggccacctgggagatggcaacctgcacctgaatgtgacagctgaggccttcagccccagcctgctggccgccctggagccccacgtgtatgagtggacagctggccagcagggctctgtgtctgctgagcacggcgtgggcttcaggaagagagatgtgctgggctacagcaagcccccaggggccctgcagctgatgcagcagctgaaggccctgctggaccccaagggcatcctgaacccctacaagaccctgcccagccaggcctag

SEQ ID NO: 149229 - DNA, 978 bp, synthetic construct
  misc_feature 1..978: note = Description of Artificial Sequence: Synthetic coding sequence
  source 1..978: mol_type = other DNA
atgctgccccggcggcccctggcctggccagcctggctgctgcggggggcccctggagctgctggctcctggggccggcctgtgggccccctggcccggcggggctgctgcagcgcccctggcaccccagaggtgcccctgacccgggagcgctaccctgtgcggcggctgcccttcagcacagtgtccaagcaggacctggccgcctttgaaagaattgtgcctggaggagtggtgacagatcctgaggccctgcaggccccaaatgtggactggctgcggaccctgcggggctgcagcaaggtgctgctgcggcccaggaccagcgaggaggtgagccacatcctgcggcactgccacgagaggaacctggccgtgaacccccagggcggcaacacaggcatggtgggcggctctgtgcctgtgtttgatgagatcatcctgagcacagccaggatgaacagagtgctgtccttccacagcgtgtctggcatcctggtgtgccaggccggctgtgtgctggaggagctgagccgctacgtggaggagcgggacttcatcatgcccctggacctgggcgccaagggcagctgccacatcggcggcaatgtggccaccaatgctgggggcctgcgcttcctgcgctatggcagcctgcacggcaccgtgctgggcctggaggtggtgctggctgatggcaccgtgctggactgcctgaccagcctgaggaaggacaacacaggctatgacctgaagcagctgttcatcggcagcgagggcaccctgggcatcatcaccaccgtgtccatcctgtgcccccccaagcccagggctgtgaatgtggccttcctggtgacctgtgtgcccccagcctgtggccctggcagccccaggcctgcccggctgccccacccagccctgcggaccccaggcctgcggcaggagagcctggccagcagctgccacgcccacgtgtag

SEQ ID NO: 149230 - DNA, 426 bp, synthetic construct
  misc_feature 1..426: note = Description of Artificial Sequence: Synthetic coding sequence
  source 1..426: mol_type = other DNA
atgctgtgggccctgcgggagcgcatcacagaggccctgagcagagatggctacgtgtacaagtatgacctgagcctgcctgtggagcggctgtatgacatcgtgacagacctgcgggcccggctgggcccccacgccaagcacgtggtgggctacggccacctgggagatggcaacctgcacctgaatgtgacagctgaggccttcagccccagcctgctggccgccctggagccccacgtgtatgagtggacagctggccagcagggctctgtgtctgctgagcacggcgtgggcttcaggaagagagatgtgctgggctacagcaagcccccaggggccctgcagctgatgcagcagctgaaggccctgctggaccccaagggcatcctgaacccctacaagaccctgcccagccaggcctag

SEQ ID NO: 149231 - DNA, 609 bp, synthetic construct
  misc_feature 1..609: note = Description of Artificial Sequence: Synthetic coding sequence
  source 1..609: mol_type = other DNA
atgtccttcccccccctgtggcccaccaggcatgtgcctgccagccaccccacctgccccctgctgcccggcccctgctgctgcccccactgcctgtgtgacagcgccccacccagcctgccctgccccaccctggtgcagggcgccagccggcccatcctgatcctgcgggccttccctggcccctgccacagcgtgccctgccacgacctgaagctgcaggtgggcgccagccccttccgccacggctgccccccatctgtgcgctgccccagccggctgattgctggggtgcccggctgcagcgtgctgtcctggagcctgggccacagcctgtctggaattgacagccgggtgggcgccaccccaggcctgggccacagcctgtcctgggtgcgggcccctcctggcctgggccacagcctgtctggagtgggcgccaccccaggcctgggccacctgctgagcggcgtgggcgccagccctggagaggacacagagcacgccgccgccctgaccccctgtggggtgccccctgtgcccggctgccgcagccacagccagcccctgagccacctggtgagcagcagccgctgctgcggcccctag

SEQ ID NO: 149232 - DNA, 849 bp, synthetic construct
  misc_feature 1..849: note = Description of Artificial Sequence: Synthetic coding sequence
  source 1..849: mol_type = other DNA
atggccctgagctgcagctcctggtgccgcagcccccagtggaagtttgaggccagcaagagccacgccaaccaccggcccatctgcctgagcccccgcatctggccaggcagcgccagcgccaccagcacagtgtgcagcagcagcgagagcttcctgccccggggccccccagctgtgtccctgctgctgcacggccccccaacagtgtccttccccccaccctggcccacccaccacgtgctgcccagccctgtggcccaccccccctgcccctgcctgcccccagacatgcccctggagctgcccggcccctgctgctgcccccactgcctgtgtgacagcgccccacccagcctgccctgccccaccctggtgcagggcgccagccggcccatcctgatcctgcgggccttccctggcccctgccacagcgtgccctgccacgacctgaagctgcaggtgggcgccagccccttccgccacggctgccccccatctgtgcgctgccccagccggctgattgctggggtgcccggctgcagcgtgctgtcctggagcctgggccacagcctgtctggaattgacagccgggtgggcgccaccccaggcctgggccacagcctgtcctgggtgcgggcccctcctggcctgggccacagcctgtctggagtgggcgccaccccaggcctgggccacctgctgagcggcgtgggcgccagccctggagaggacacagagcacgccgccgccctgaccccctgtggggtgccccctgtgcccggctgccgcagccacagccagcccctgagccacctggtgagcagcagccgctgctgcggcccctag

SEQ ID NO: 149233 - DNA, 1245 bp, synthetic construct
  misc_feature 1..1245: note = Description of Artificial Sequence: Synthetic coding sequence
  source 1..1245: mol_type = other DNA
atgggcggcctgagcgcccggcccacagctggccgcacagatcctgctggcacctgctggggccaggaccccggcagcaagatggccaccgtcatccctggccccctgagcctgggggaggacttctaccgggaggccatcgagcactgccgcagctacaatgcccggctgtgtgccgagaggagcctgcggctgcccttcctggacagccagacaggagtggcccagaacaactgctacatctggatggagaagacccaccggggccctggcctggcccctggccagatctacacctacccagcccgctgctggaggaagaagaggcggctgaacatcctggaggacccccggctgcggccctgtgagtacaagattgactgtgaggcccccctgaagaaggagggcggcctgcctgagggccctgtgctggaggccctgctgtgtgccgagaccggggagaagaagattgagctgaaggaggaggagaccatcatggactgccagaagcagcagctgctggagttcccccatgacctggaggtggaggacctggaggatgacatccccaggaggaagaacagagccaagggcaaggcctatggaattggaggcctgaggaagaggcaggacacagccagcctggaggaccgggacaagccctacgtgtgtgacatctgtgggaagcgctacaagaacagacctggcctgagctaccactacacccacacccacctggccgaggaggagggggaggagaatgctgagagacatgccctgcccttccacaggaagaacaaccacaagcagttctacaaggagctggcctgggtgcctgaggcccagaggaagcacacagccaagaaggccccagatggcaccgtcatccccaacggctactgtgacttctgcctgggcggcagcaagaagacaggctgcccagaagatctcatcagctgtgccgactgtggccgcagcggccaccccagctgcctgcagttcaccgtgaacatgacagctgctgtgaggacctaccgctggcagtgcatcgagtgcaagagctgcagcctgtgtggcaccagtgaaaatgatgaccagctgctcttctgtgatgactgtgaccggggctaccacatgtactgcctgagcccccccatggccgagcccccagagggctcctggagctgccacctgtgcctgcggcacctgaaggagaaggccagcgcctacatcaccctgacctag

SEQ ID NO: 149234 - DNA, 1074 bp, synthetic construct
  misc_feature 1..1074: note = Description of Artificial Sequence: Synthetic coding sequence
  source 1..1074: mol_type = other DNA
atggccaccgtcatccacaaccccctgaaggccctgggggaccagttctacaaggaggccatcgagcactgccgcagctacaacagccggctgtgtgccgagaggtctgtgcggctgcccttcctggacagccagacaggagtggcccagaacaactgctacatctggatggagaagaggcaccggggccctggcctggcccctggccagctgtacacctacccagcccgctgctggaggaagaagaggcggctgcaccccccagaggaccccaagctgcggctgctggagatcaagccagaggtggagctgcccctgaagaaggatggcttcaccagcgagagcaccaccctggaggccctgctgcggggggagggcgtggagaagaaggtggatgcccgggaggaggagagcatccaggagatccagagggtgctggagaatgatgaaaatgtggaggagggcaatgaggaggaggacctggaggaggacatccccaagaggaagaacagaacccggggccgggcccggggcagcgctgggggcagaagaagacatgatgctgccagccaggaggaccatgacaagccctacgtgtgtgacatctgtgggaagcgctacaagaacagacctggcctgagctaccactacgcccacacccacctggccagcgaggagggagatgaggcccaggaccaggagaccaggagcccccccaaccacagaaatgaaaaccaccggccccagaagggcccagatggcaccgtcatccccaacaactactgtgacttctgcctgggcggcagcaacatgaacaagaagagcggccggcctgaggagctggtgtcctgtgccgactgtggccgcagcgcccacctgggcggggagggcaggaaggagaaggaggccgctgctgctgcccggaccacagaggacctgtttggcagcaccagcgagagtgacaccagcaccttccacggctttgatgaagatgacctggaggagcccaggagctgccggggccgccgcagcggccggggcagccccacagctgacaagaagggcagctgctag

SEQ ID NO: 149235 - DNA, 999 bp, synthetic construct
  misc_feature 1..999: note = Description of Artificial Sequence: Synthetic coding sequence
  source 1..999: mol_type = other DNA
atggagaagacccaccggggccctggcctggcccctggccagatctacacctacccagcccgctgctggaggaagaagaggcggctgaacatcctggaggacccccggctgcggccctgtgagtacaagattgactgtgaggcccccctgaagaaggagggcggcctgcctgagggccctgtgctggaggccctgctgtgtgccgagaccggggagaagaagattgagctgaaggaggaggagaccatcatggactgccagaagcagcagctgctggagttcccccatgacctggaggtggaggacctggaggatgacatccccaggaggaagaacagagccaagggcaaggcctatggaattggaggcctgaggaagaggcaggacacagccagcctggaggaccgggacaagccctacgtgtgtgacatctgtgggaagcgctacaagaacagacctggcctgagctaccactacacccacacccacctggccgaggaggagggggaggagaatgctgagagacatgccctgcccttccacaggaagaacaaccacaagcagttctacaaggagctggcctgggtgcctgaggcccagaggaagcacacagccaagaaggccccagatggcaccgtcatccccaacggctactgtgacttctgcctgggcggcagcaagaagacaggctgcccagaagatctcatcagctgtgccgactgtggccgcagcggccaccccagctgcctgcagttcaccgtgaacatgacagctgctgtgaggacctaccgctggcagtgcatcgagtgcaagagctgcagcctgtgtggcaccagtgaaaatgatgaccagctgctcttctgtgatgactgtgaccggggctaccacatgtactgcctgagcccccccatggccgagcccccagagggctcctggagctgccacctgtgcctgcggcacctgaaggagaaggccagcgcctacatcaccctgacctag

SEQ ID NO: 149236 - DNA, 1143 bp, synthetic construct
  misc_feature 1..1143: note = Description of Artificial Sequence: Synthetic coding sequence
  source 1..1143: mol_type = other DNA
atgggcggcctgagcgcccggcccacagctggccgcacagatcctgctggcacctgctggggccaggaccccggcagcaagatggccaccgtcatccctggccccctgagcctgggggaggacttctaccgggaggccatcgagcactgccgcagctacaatgcccggctgtgtgccgagaggagcctgcggctgcccttcctggacagccagacaggagtggcccagaacaactgctacatctggatggagaagacccaccggggccctggcctggcccctggccagatctacacctacccagcccgctgctggaggaagaagaggcggctgaacatcctggaggacccccggctgcggccctgtgagtacaagattgactgtgaggcccccctgaagaaggagggcggcctgcctgagggccctgtgctggaggccctgctgtgtgccgagaccggggagaagaagattgagctgaaggaggaggagaccatcatggactgccagaagcagcagctgctggagttcccccatgacctggaggtggaggacctggaggatgacatccccaggaggaagaacagagccaagggcaaggcctatggaattggaggcctgaggaagaggcaggacacagccagcctggaggaccgggacaagccctacgtgtgtgacaagttctacaaggagctggcctgggtgcctgaggcccagaggaagcacacagccaagaaggccccagatggcaccgtcatccccaacggctactgtgacttctgcctgggcggcagcaagaagacaggctgcccagaagatctcatcagctgtgccgactgtggccgcagcggccaccccagctgcctgcagttcaccgtgaacatgacagctgctgtgaggacctaccgctggcagtgcatcgagtgcaagagctgcagcctgtgtggcaccagtgaaaatgatggagcctcctgggccggcctgaccccccaggaccagctgctcttctgtgatgactgtgaccggggctaccacatgtactgcctgagcccccccatggccgagcccccagagggctcctggagctgccacctgtgcctgcggcacctgaaggagaaggccagcgcctacatcaccctgacctag

SEQ ID NO: 149237 - DNA, 612 bp, synthetic construct
  misc_feature 1..612: note = Description of Artificial Sequence: Synthetic coding sequence
  source 1..612: mol_type = other DNA
atggccacagccatccagaaccccctgaagagcctgggggaggacttctaccgggaggccatcgagcactgccgcagctacaatgcccggctgtgtgccgagaggagcctgcggctgcccttcctggacagccagacaggagtggcccagaacaactgctacatctggatggagaagacccaccggggccctggcctggcccctggccagatctacacctacccagcccgctgctggaggaagaagaggcggctgaacatcctggaggacccccggctgcggccctgtgagtacaagattgactgtgaggcccccctgaagaaggagggcggcctgcctgagggccctgtgctggaggccctgctgtgtgccgagaccggggagaagaagattgagctgaaggaggaggagaccatcatggactgccagaagcagcagctgctggagttcccccatgacctggaggtggaggacctggaggatgacatccccaggaggaagaacagagccaagggcaaggcctatggaattggaggcctgaggaagaggcaggacacagccagcctggaggaccgggacaagccctacgtgtgtgacagcgagagcttctag

SEQ ID NO: 149238 - DNA, 1245 bp, synthetic construct; identical to SEQ ID NO: 149233
  misc_feature 1..1245: note = Description of Artificial Sequence: Synthetic coding sequence
  source 1..1245: mol_type = other DNA

SEQ ID NO: 149239 - DNA, 1167 bp, synthetic construct
  misc_feature 1..1167: note = Description of Artificial Sequence: Synthetic coding sequence
  source 1..1167: mol_type = other DNA
atggccacagccatccagaaccccctgaagagcctgggggaggacttctaccgggaggccatcgagcactgccgcagctacaatgcccggctgtgtgccgagaggagcctgcggctgcccttcctggacagccagacaggagtggcccagaacaactgctacatctggatggagaagacccaccggggccctggcctggcccctggccagatctacacctacccagcccgctgctggaggaagaagaggcggctgaacatcctggaggacccccggctgcggccctgtgagtacaagattgactgtgaggcccccctgaagaaggagggcggcctgcctgagggccctgtgctggaggccctgctgtgtgccgagaccggggagaagaagattgagctgaaggaggaggagaccatcatggactgccagaagcagcagctgctggagttcccccatgacctggaggtggaggacctggaggatgacatccccaggaggaagaacagagccaagggcaaggcctatggaattggaggcctgaggaagaggcaggacacagccagcctggaggaccgggacaagccctacgtgtgtgacatctgtgggaagcgctacaagaacagacctggcctgagctaccactacacccacacccacctggccgaggaggagggggaggagaatgctgagagacatgccctgcccttccacaggaagaacaaccacaagcagttctacaaggagctggcctgggtgcctgaggcccagaggaagcacacagccaagaaggccccagatggcaccgtcatccccaacggctactgtgacttctgcctgggcggcagcaagaagacaggctgcccagaagatctcatcagctgtgccgactgtggccgcagcggccaccccagctgcctgcagttcaccgtgaacatgacagctgctgtgaggacctaccgctggcagtgcatcgagtgcaagagctgcagcctgtgtggcaccagtgaaaatgatgaccagctgctcttctgtgatgactgtgaccggggctaccacatgtactgcctgagcccccccatggccgagcccccagagggctcctggagctgccacctgtgcctgcggcacctgaaggagaaggccagcgcctacatcaccctgacctag

SEQ ID NO: 149240 - DNA, 1176 bp, synthetic construct
  misc_feature 1..1176: note = Description of Artificial Sequence: Synthetic coding sequence
  source 1..1176: mol_type = other DNA
atggctgctgtggtggagaatgtggtgaagctgctgggggagcagtactacaaggatgccatggagcagtgccacaactacaatgcccggctgtgtgccgagaggtctgtgcggctgcccttcctggacagccagacaggagtggcccagagcaactgctacatctggatggagaagaggcaccggggccctggcctggccagcggccagctgtacagctacccagcccggcgctggaggaagaagagaagagcccaccccccagaggacccccggctgtccttccccagcatcaagccagacacagaccagaccctgaagaaggagggcctcatcagccaggacggcagcagcctggaggccctgctgaggacagaccccctggagaagagaggagccccagacccccgggtggatgatgacagcctgggggagttccctgtgaccaacagccgggccaggaagaggatcctggagccagatgacttcctggatgacctggatgatgaggactatgaggaggacacccccaagagaagaggcaagggcaagagcaagggcaagggcgtgggcagcgccaggaagaagctggatgccagcatcctggaggaccgggacaagccctatgcctgtgacatctgtgggaagcgctacaagaaccggcccggcctgagctaccactacgcccacagccacctggccgaggaggagggggaggacaaggaggacagccagccccccacccctgtgtcccagaggtctgaggagcagaagagcaagaagggcccagatggcctggccctgcccaacaactactgtgacttctgcctgggggacagcaagatcaacaagaagacaggccagcctgaggagctggtgtcctgcagcgactgtggccgcagcggccaccccagctgcctgcagttcacccctgtgatgatggctgctgtgaagacctaccgctggcagtgcatcgagtgcaagtgctgcaacatctgtggcaccagtgaaaatgatgaccagctgctcttctgtgatgactgtgaccggggctaccacatgtactgcctgacccccagcatgtctgagcccccagagggctcctggagctgccacctgtgcctggacctgctgaaggagaaggccagcatctaccagaaccagaacagcagctag

SEQ ID NO: 149241 - DNA, 1134 bp, synthetic construct
  misc_feature 1..1134: note = Description of Artificial Sequence: Synthetic coding sequence
  source 1..1134: mol_type = other DNA
agcagcatcatccagaaccggctgaagaagctgggggaccagttctacaaggaggccatcgagcactgccgcagctacaacagccggctgtgtgccgagaggtctgtgcggctgcccttcctggacagccagacaggagtggcccagaacaactgctacatctggatggagaagaggcaccggggccctggcctggcccctggccagctgtacacctacccagcccgctgctggaggaagaagaggcggctgcaccccccagaggaccccaagctgcggctgctggagatcaagccagaggtggagctgcccctgaagaaggatggcttcaccagcgagagcaccaccctggaggccctgctgcggggggagggcgtggagaagaaggtggatgcccgggaggaggagagcatccaggagatccagagggtgctggagaatgatgaaaatgtggaggagggcaatgaggaggaggacctggaggaggacatccccaagaggaagaacagaacccggggccgggcccggggcagcgctgggggcagaagaagacatgatgctgccagccaggaggaccatgacaagccctacgtgtgtgacatctgtgggaagcgctacaagaaccggcccggcctgagctaccactacgcccacacccacctggccagcgaggagggagatgaggcccaggaccaggagaccaggagcccccccaaccacagaaatgaaaaccaccggccccagaagggcccagatggcaccgtcatccccaacaactactgtgacttctgcctgggcggcagcaacatgaacaagaagagcggccggcctgaggagctggtgtcctgtgccgactgtggccgcagcggccaccccacctgcctgcagttcaccctgaacatgacagaggccgtgaagacctacaagtggcagtgcatcgagtgcaagagctgcatcctgtgtggcaccagtgaaaatgatgaccagctgctcttctgtgatgactgtgaccggggctaccacatgtactgcctgaacccccctgtggccgagcccccagagggctcctggagctgccacctgtgctgggagctgctgaaggagaaggccagcgccttcggctgccaggcctag

SEQ ID NO: 149242 - DNA, 1074 bp, synthetic construct; identical to SEQ ID NO: 149234
  misc_feature 1..1074: note = Description of Artificial Sequence: Synthetic coding sequence
  source 1..1074: mol_type = other DNA

SEQ ID NO: 149243 - DNA, 1137 bp, synthetic construct
  misc_feature 1..1137: note = Description of Artificial Sequence: Synthetic coding sequence
  source 1..1137: mol_type = other DNA
atggccaccgtcatccacaaccccctgaaggccctgggggaccagttctacaaggaggccatcgagcactgccgcagctacaacagccggctgtgtgccgagaggtctgtgcggctgcccttcctggacagccagacaggagtggcccagaacaactgctacatctggatggagaagaggcaccggggccctggcctggcccctggccagctgtacacctacccagcccgctgctggaggaagaagaggcggctgcaccccccagaggaccccaagctgcggctgctggagatcaagccagaggtggagctgcccctgaagaaggatggcttcaccagcgagagcaccaccctggaggccctgctgcggggggagggcgtggagaagaaggtggatgcccgggaggaggagagcatccaggagatccagagggtgctggagaatgatgaaaatgtggaggagggcaatgaggaggaggacctggaggaggacatccccaagaggaagaacagaacccggggccgggcccggggcagcgctgggggcagaagaagacatgatgctgccagccaggaggaccatgacaagccctacgtgtgtgacatctgtgggaagcgctacaagaacagacctggcctgagctaccactacgcccacacccacctggccagcgaggagggagatgaggcccaggaccaggagaccaggagcccccccaaccacagaaatgaaaaccaccggccccagaagggcccagatggcaccgtcatccccaacaactactgtgacttctgcctgggcggcagcaacatgaacaagaagagcggccggcctgaggagctggtgtcctgtgccgactgtggccgcagcggccaccccacctgcctgcagttcaccctgaacatgacagaagctgtgaagacctacaagtggcagtgcatcgagtgcaagagctgcatcctgtgtggcaccagtgaaaatgatgaccagctgctcttctgtgatgactgtgaccggggctaccacatgtactgcctgaacccccctgtggccgagcccccagagggctcctggagctgccacctgtgctgggagctgctgaaggagaaggccagcgccttcggctgccaggcctag

SEQ ID NO: 149244 - DNA, 4110 bp, synthetic construct
  misc_feature 1..4110: note = Description of Artificial Sequence: Synthetic coding sequence
  source 1..4110: mol_type = other DNA
atgagcccctgtggcaggaagatgggagagggccggcagcagaggcgggcccctgtgggcaagctgctgctgctgcccggccggcgggacacccctcatggccgcagcggcagcagcggggcccggacccagaggagcctgctgtggctgctggtgcacgtgtggctgtgggccgccagcggcagcagcgcccagctgttcaacctgaccctgtctgtggatgagggcctgcccccagacaccctggtgggggacatccgggccggcctgcctgctgcccagcagcaggagggcagcggcttcttcctgtctgaagattctgatgacagccccctgctggatgacttccacgtgcacccagacaccggcatcatcagaacagcccggcggctggaccgggagcggcgggaccactacagctttgtggccgccaccctgctgggcgctgtggtgcaggtggagatccgggtgaatgatgtgaatgaccacagcccccgcttccccctggacagcctgcagctggatgtgtctgagctgagccccccaggcacagccttccggctgcctgtggcccatgaccctgatgctggcctcttcagcacccagggctacaccctggtgcagcccagcgacctgcccaaggaccctgctggccccttcttccagctgcgctaccgcaccccaggccccctgcccagccccctgctgcccggcagcagcagccccctggagcccctggacctggtgctgctgcggcggctggaccgggaggaggccgccgcccaccggctgcagatcgaggcctgggatggcggccggcccaggagaacaggcctgctgtctgtggagctgcgggtgctggatgaaaatgacaacccccctgtgtttgagcaggatgagtacagagctgctgtgagagaagatgcccagcctggagctgaggtgtgccgggtgcgggccacagaccgggacctgggccccaacggctttgtgcgctacagcgtgcgggcccggcaggtgcctggagctggcagcggcggcggggccctgggagatgctgcctactttgctgtggaggagctgagcggcgtggtgcgggtgtggaggcccctggaccgggaggcccaggcctggcaccagctggtggtggaggccagagatggaggagctgagcctgaggtggccaccgtgcgggtgtccattgctgtgctggatgtgaatgacaacagacctgccatccacgtgctcttcctgacagaaggaggagtggcccgggtgtctgagggcgcccggcctggggactatgtggcccgggtgtctgtgtctgatgctgatggagactgggagaaggaggatgaggccactggagagctgggcgtgggcctgggagatggcagcatcagcctgagcctggagggcggggagggggactttgccctgctgcccggcggccccccaggagtcttcttcctgtgtgtggagggccccctggaccgggagagccgggacctgtatgagctgctgctggtggccacagatgctggcagcccccccctgagcacagaggagaccctgctgctgcgggtggccgacctgaatgaccagcccccactcttcagccagcagcactacaaggcctctgtgtctgaggccgccgcccctggcaccgtggtgatgtgggtgtctgccagtgatgctgatgaagctggcagtgaccacgcctggctgcgctacacagtggtgcagctgagcgccccctgcaacctgggcagcctgcagagcaagatggtgcacacagcagaatgtggccccagctttgccatcgacagcgagagcggggccatcagcaccatccgcaccctggaccgggaggtgcaggaggccgtggagctgaaggtggtggcccaggacctgggggagccccccctgagcgccacctgcctggtgtccatcaccgtggatgatgtgaatgacaatgagcccatcttctggaggcaggtgtacaatgccaccatcgccgagcacgcccctgtgggccactgcttcctgcaggtgacagccagtgatgctgacagcggcctgtatggcttcatcgagtacagcctgtatgatggcttcctgtcctatgaggccccccaggccttcagaattgacccccatgatggccagatctgtgtgtcccaggacatcgaccgggagcgggaccctgccacctatgacctgctggtggaggccaaggatggcggcggcctgagcgcccaggcctttgtgcgggtggacctggaggatgtgaatgacaaccaccctgtgttcaaccccagcacctacgtgaccagcatcagtgatgagacccagcccggcacagagatcatcaacgtgctggccacagaccaggacagcggcatctatggaacagtggcctatgagctgatccctggaaatgtgagcagcctcttcaccatcgacagcaccaccggcatcatctacctgaccctgcccctgagccacctggagagcaccaccctgagcctgatggtgtctgcccaggacggcggcggcctgacagctgtgatcaatgctgatgtgaccatccacatcttccagaccaccctggccccagctgagtttgagcggcccaagtacaccttcctggtgtatgaagatgtgcctgaggacagccccatcggcaccgtgaaggcccgggagcccctgaacagcagcgagcccatcttctaccgcatcagcagcggggacctgggcggcaagttcagcatccacccccggctgggcaccatccgcaccaggaagcccctggaccacgagacccagcctgtggtggtgctgactgtgcaggcccagctgggcagcgccccagcctgcagcagcacagaggtgaacatcaccgtgatggatgtgaatgacaaccacccagccttcctgcggaccagtgatgagatccgcatcagccagaccaccccacctggaacagccctgtacctggcccgggcagaggaccgggacagcggcagaaatggcctcatccgctacagcatcgccagcccccagcccggggtgtttgccatcgaccgggccctgggcgtgctcttcctgaatggcagcctgggcgctggggagcagcgggagctgaccctgaccctgcgggcagaggaccagggcgtgcacccccaggccgccctgctggtgctgactgtggtgattgagaagcgggagcacagccccagctggacctttgagcacctggtgtaccaggtggaggtgtctgagagcctgagccccatgacccagatgctgcagacccaggcccaccccctgggcccccagagagctgccagccccctgcgctacagcctggagcccagcgtggacagcgccatgtttggcatccggccctacacaggctggatctacctgcggcggcagtttgattatgagagcacccagacctacaacttccgggtgtttgcctggatcccagaagatggcttcctgcagaatgtgtccaccaccgtcatcgtgcgggtgtgggatgaaaatgacaacagccccaccttcctgcatgatgtgctcttcctgaaggtggaggagagccctgtgccccagggcgtcatcggcaagatcacagccatcgacatggacagcggcaagaatggccagctgctgtacttcctgctgagtgatggcaagttcttcaagatgaaccccaacacaggagagctgatcaactgggtggccctggaccgggagcaccggggccaccacgagatgacagtgctggtgacagaccggggcagccccccaagaaatgccaccatggctgtgtatgtgtctgtgacagacatcaatgacaaccggcccttcttcccccagtgcctgcccgggaaggagctgcacgtgaaggtgctggagggccagcctgtgaacatgctggtgaccaccgtgtttgccaaggaccctgatgagggcaacaatgctgaggtgacctacagcgtgtcctctgcccggcccatgcccctgaagggcaagacagccttcggcaagcagagctgcaagaagcagaccaacaagcagaccaacaagatcctgacctag

SEQ ID NO: 149245 - DNA, 8751 bp, synthetic construct
  misc_feature 1..8751: note = Description of Artificial Sequence: Synthetic coding sequence
  source 1..8751: mol_type = other DNA
atgaggctggatgagatcaccaagtcagaaaatgaagatggagagaagaagatgttcacccagcagtttgagagcacagatgcctgtgtgtatgaggtgtatgtgaagatcaacagcatcgtgaagagccagagccagtgtggcctgaagaggggcagccctgagacagagctgtggggcgccatcgtgttccgcagccaggaggagaatgccaagcctgtgaaggagacagaggtgacagccagtgatgctgacagcggcctgtatggcttcatcgagtacagcctgtatgatggcttcctgtcctatgaggccccccaggccttcagaattgacccccatgatggccagatctgtgtgtcccaggacatcgaccgggagcgggaccctgccacctatgacctgctggtggaggccaaggatggagatgagcagaggatgacccacctggccctggtgaagggcggcctgagcgcccaggcctttgtgcgggtggacctggaggatgtgaatgacaaccaccctgtgttcaaccccagcacctacgtgaccagcatcagtgatgagacccagcccggcacagagatcatcaacgtgctggccacagaccaggacagcggcatctatggaacagtggcctatgagctgatccctggaaatgtgagcagcctcttcaccatcgacagcaccaccggcctgtacagccctgaggtggagatcctgtctgctgtgaacttctctgctgacaaggaggtgatgaacagcctggagatgttcctgcccctgctgcggcacttcaagaaggtggagagagatgaggaggccgctgagaagaagtttgaggccagccggggctggttcatgaggttcaagggcagaagacacctgcactacctgaaggtgcaggatgaagctgccagcgcagatggagaggccgccgcccgctacgtggccaacctggccaagatcctgggggagggcatcatctacctgaccctgcccctgagccacctggagagcaccaccctgagcctgatggtgtctgcccaggacggcggcggcctgacagctgtgatcaatgctgatgtgaccatccacatcttccagaccaccctggccccagctgagtttgagcggcccaagtacaccttcctggtgtatgaagatgtgcctgaggacagccccatcggcaccgtgaaggcccgggagcccctgaacagcagcgagcccatcttctaccgcatcagcagcggggacctgggcggcaagttcagcatccacccccggctgggcaccatccgcaccaggaagcccctggaccacgagacccagcctgtggtggtgctgactgtgcaggcccagctgggcagcgccccagcctgcagcagcacagaggtgaacatcaccgtgatggatgtgaatgacaaccacccagccttcctgcggaccagtgatgagatccgcatcagccagaccaccccacctggaacagccctgtacctggcccgggcagaagatcgggacagcggcagaaatggcctcatccgctacagcatcgccagcccccagcccggggtgtttgccatcgaccgggccctgggcgtgctcttcctgaatggcagcctgggcgctggggagcagcgggagctgaccctgaccctgcgggcagaggaccagggcgtgcacccccaggccgccctgctggtgctgactgtggtgattgagaagcgggagcacagccccagctggacctttgagcacctggtgtaccaggtggaggtgtctgagagcctgagccccatgacccagatgctgcagacccaggcccaccccctgggcccccagagagctgccagccccctgcgctacagcctggagcccagcgtggacagcgccatgtttggcatccggccctacacaggctggatctacctgcggcggcagtttgattatgagagcacccagacctacaacttccgggtgtttgcctggatcccagaagatggcttcctgcagaatgtgtccaccaccgtgattgtgcgggtgtgggatgaaaatgacaacagccccaccttcctgcatgatgtgctcttcctgaaggtggaggagagccctgtgccccagggcgtgattggcaagatcacagccatcgacatggattctgggaagaatggccagctgctgtacttcctgctgagtgatggcaagttcttcaagatgaaccccaacacaggccctgctggcaccatctacgtgatcacctgggcagatggagctgctgccttctctggaacagactttgccttcagcagtgatgagctgcaggcctttgtgctgaagagcctcttctgtgagctgggggagggggagctgatcaactgggtggccctggaccgggagcaccggggccaccacgagatgacagtgctggtgacagaccggggcagccccccaagaaatgccaccatggctgtgtatgtgtctgtgacagacatcaatgacaaccggcccttcttcccccagtgcctgcccgggaaggagctgcacgtgaaggtgctggagggccagcctgtgaacatgctggtgaccaccgtgtttgccaaggaccctgatgagggcaacaatgctgaggtgacctacagcgtgtcctctgaggacagcagtgaccacttcaagattgatgccaacaatggagagatccgcaccaccaccatcctgtcctatgactaccggcccagctacaggatgtctgtgattgccacagaccagggcgtgccccccctgcagggccaggccgtggtgaacatccaggtgatccccctgagcaagggccgggccatcatgagccagaacatccgccacctgatcatccctgagaacctgaagcccaccaagatcatgagcctcatcaagagcagtgaccacctgcagcagcactacaacgggaagctgcacttcagcatcgtggctgatgacaaggatggccactttgaaattgacagcagcactggagacctcttcctgagcaaggagctggactatgagaccaccagccactacctgttccgggtcatcaccacagaccacagcaagaacctgagcctgagcagcaccgtcttcctgagcattgatgtggaggaccagaatgaccacagccccagcttccaggatgagctgattgtcatctctgtggaggagaatgtgcccatcggcaccctggtgtatgtgttcaatgccaaggatgatgatggcagcttcctgaacagccgcatccagtactacatcgagagccacaaccctggcaccaaccccttcctgatccaccccagctttggcaccctggtgacagtgtcccggctggaccgggagagcatccccaccgtcatcctgactgtgacagccagtgaccaggccgtgaatgtgacagaccggcggctgcggagcctgacagcccagatcgtcatcctggatgtgaatgaccacaaccccaccttcatctccttccccaatgcccacgtgaaggaggatgtgacagtgggcagcctggtgcaccacatcacagcccatgaccctgatgagggcagaaatggcaaggtgacctacagcatcctgtctggaaatgaaaacatgaccttcatgctggatgagagcagcggcctgctgaccaccacctgccccctggactatgagatgaagacccagcacatcctgactgtgctggccctggatgatggcaccccagccctgagcagcagccagaccctgactgtgacagtgctggatgtgaatgatgaggcccctgtgttcaagcagcacctgtatgaggcctctgtgaaggagaaccagaaccctggagaatttgtgaccagggtggaggccctggaccgggacagcggcgtgaacagcaagctgcagtttgagatcatgcctggggccagctttgagctgtttgagatcaacagcgacacaggagaggtggtgaccaccaccatcctggaccgggagatccaggaggtgttcaccctgcgggtgctggtgagagatggcggcttccccagcctgagcagcaccaccaccatcctgtgcaccgtggaggatgaaaatgaccacgcccctgagttcatcgtgagcagctatgacatcgaggtgctggagaaccaggagcctgaggtggtgtacacagtgctggccagtgacatggatgctggcaacaacagagctgtggagtaccacatcattgatggcaacacagatgagtgcttcaccatcaatgagatgtctggagagctgagcaccacccgggccctggaccgggagcagatcagcaacttcaccctggtgatcctgtgcagcgacctgggggacccccccaggagcagcgtcatccacctgcaggtgcgggtgctggatgccaatgaccacagccccagcttccccaccctgtactaccagagctctgtgagagaagatgctgaggtgggcaccgtggtgctggtgctgtctgctgtggacaaggatgagggcctgaatggccagacagagtacttcctgacagatgaggccagcggggccttcaccatcgaccccatgagcggcaccctgaagaccagcaacaccctggaccgggaggcccggagccagcacaccttctctgctgtggcccgggactgcagcatccagggcagccgcagcaccaccgtcatcatcaaggtgtatgtgacagatgtgaatgacaatgaccctgtgctggagcagaacccctttgatgtgttcctgagccctgagagccccaccaaccagaccaccgtcatcgtgcgggcagatgacctggacctgggccccaatggaacagtggtgttctcctttgctgagacccagagcatgttcagcattgacaagtacacaggagagatccagttccagcagaaccccagcagcgagtacttccccatctggctgcagctgaaggtgacagaccagggcatcccagcccggaccaccaccggcctgctggtgatccacatggagggggaggatgtgaagatctccttcagccaccacctgtacaagggcctggtgacagagaactgtgaggccggcaccagcatcgtgacagtgaaggcctttgccccagacagcatccaggacagcatgaagtacagcatcttctctggaaatgaagatggagtgctgagcctgtgcagcaagagcggccagctgactgtgaaggagcccaagttcctggactttgaggtgagaaatgaggtgcagctgattgtgctggccgagagcagcggccaccgggcctactgcaaggtggccgtgctgatccaggatgaaaatgacaacagcccctgctttgagcagagcatctaccaggcctctgtgtctgagagccagctgtacaatgcccacgtgatccaggtgtttgccacagacctggacagcggcctgaatggcctcatcgagtacagcatcctgagcggcaaccaggaggaggccttccagattgatgccctgtctggagtcatcaccaccaaggccatcctggactatgagctgaccagcagctacagcctgattgtgcaggccacagacaagggcatgccccggctgagcaacaccaccgtcatcaaggtgcaggtgacagacatcaatgacaatgccccagccttcctgcccagcgaggccgtggagatcacagaggacagcctgcccggggtgattgtgacccacgtgtctgtgcatgatgtggacctgaacagcgccttcatcttctcctttgccaaggagagcaaccctggcaccaagtttgccatcgaccagaacacaggagtggtggtgctggtgaagaccctggactttgaggagatgacagaatatgagctgctgatccagatcagtgacagcgtgcactacacagagggcgccctggtggtgcgggtgctggatgtgaatgacaacccccctgtgttcagccaggacttctaccaggtgacagtgcctgagagcatccctgtgggctacagcgtgctgaccctgagcgccacagacctggagagcaatgaaaacatctcctaccgcatcctgagcagcagcaaggagttcagcattgaccccaagaatggcaccatcttcaccatcagccctgtgctgctgctggacaccatcagcaccacccagttcctggtggaggccagtgatggcggcaacccagacctgcgggccctgaccctggtggagatcggcatcgaggacatgaacaactatgcccctgagttcaccgtgaagagctacaacctgagcctgtctgaagatgccctggtgggcagcaccctggtgaccttcagcaacatcgaccatgactggacccgggagaacacctacgtggagtacagcatcatcagcggcaacagccagaacaacttccacgtggagaccaagttcttccacagcgagtacccctacaagcaggtgggctacctggtgctgctgcacagcctggaccgggaggccagcgccagccatgagctggtgatcctggccagtgacagcggctgcccccccctgagcagcacagctgtgatcagcatccaggtgctggatgtgaatgacaacccccccaacttcagcagcctgagctaccacacccacgtgaaggagagcacccccctgggcagccacatcaccgtggtgtctgccaatgaccgggacaccggcagccatgctgagatcatctacaacatcatctctggaaatgagaagggccacttctacctggaggagaacacaggagtgctgtacctgatcaagcccctggactatgagaagatgaccaagttcaccctgactgtgcaggccagtgatgctgagaagaagcacttctcctttgctgtggtgtttgtgtctgtgctggatgacaatgaccacgccccccagttcatgttcagcagcttcagctgcatcgtgcctgagaacctgcccatcagcagcaccatctgcagcatcaatgccctggactttgatgctggcccctacggggagctgacctacagcatcgtgagcccctgcttcctgacccacggcatgtcctatgaccatgacctcttcctgattgaccccctgaccggggacatccacgccaagcagatcctggactatgaaaatggaaacaagtactgcctgactgtgcaggccaaggacaagggagatgccacagccagcctggtggtgtgggtggacatcgagggcattgatgaatttgagcccatcttcacccaggaccagtacttcttcaccctgcctgagaagaacaaggaccggcagctgattggccgggtggaggccagtgatgctgatgctggcattgatggagtcatcctgtacagcctgggcaccagcagccccttcttctctgtgaacaagaccaatggaaacatctacctgatccgggccctgcccctcatcaagagccagctgaacaaggaggacaccctggagatgaagatcatcgcccacagccccaagagtgacagcaagtttgccagctgcaccgtgtttgtgaatgtgtccttcagcagcgagggcacccccctggccgtgtttgccagcagcttcagcatcagcctggtggtgtccttcctggtgttcctgatcctgatctgcatcctgattgtgatgatcctgcggcacaagcagaaggacaccatcaacaactatgaggagaagaagaccagcagcctggatgctgacctgcgggtgaccagagatgcctctgtgctgaaggccttccagaagacagatgactgcagcaatgaggtggtgcctgtggatgccaccccagagtggctgagcctcatcagcatcatggagaaggacatcgtgaacctgtaccgccacagcaacagcagcggccactgcagcgtggagggggagacagctgaggacaaggagatccagaggatcaatgagcacccctacaggaagtgcagcgacagcgccctgagtgaccacgagagccgggtgcctgacagcggcatcccccgggacagcgaccagctgagctgcctgtctggagaaacagatgtgatggtgacagctgagacagctgaggccagccagacctttggagagggggaccagggcgagggctgcagcaccacctgtgcccagaacaacgtgctgccccagacagtgcagaagcgggaggccaaggagagcatcctggctgatgtgaggaaggagagcgtcttcatcagcggggaccaggaggtgcgctgtgccgccctgagcacccagaccaccagtgaccatgatggcaaggacaactaccactggaactacctgctgtcctgggagcccaagttccagcccctggccagcgtcttcaatgacatcgccaagctgaaggatgagcacctgcacatgcctggcatccccaaggagaagaagagctttgtgttccccccacccctcatcacagctgtggcccagcccggcatcaaggctgtgccccccaggatgcctgctgtgaacctgggccaggtgccccccaagcaccccaggagccccatcccctaccacctgggcagcctgcctgagggcatgacccccaacttcagccccagcctgagcctgctgaccatgcagcccccagccctgagccccctgctgcgggagggggagctgctgggcacccacatcagcggcacctgccacgagctgaaggcagaagatgaggtgcagatctag

SEQ ID NO: 149246 - DNA, 2130 bp, synthetic construct
  misc_feature 1..2130: note = Description of Artificial Sequence: Synthetic coding sequence
  source 1..2130: mol_type = other DNA
atgagcccctgtggcaggaagatgggagagggccggcagcagaggcgggcccctgtgggcaagctgctgctgctgcccggccggcgggacacccctcatggccgcagcggcagcagcggggcccggacccagaggagcctgctgtggctgctggtgcacgtgtggctgtgggccgccagcggcagcagcgcccagctgttcaacctgaccctgtctgtggatgagggcctgcccccagacaccctggtgggggacatccgggccggcctgcctgctgcccagcagcaggagggcagcggcttcttcctgtctgaagattctgatgacagccccctgctggatgacttccacgtgcacccagacaccggcatcatcagaacagcccggcggctggaccgggagcggcgggaccactacagctttgtggccgccaccctgctgggcgctgtggtgcaggtggagatccgggtgaatgatgtgaatgaccacagcccccgcttccccctggacagcctgcagctggatgtgtctgagctgagccccccaggcacagccttccggctgcctgtggcccatgaccctgatgctggcctcttcagcacccagggctacaccctggtgcagcccagcgacctgcccaaggaccctgctggccccttcttccagctgcgctaccgcaccccaggccccctgcccagccccctgctgcccggcagcagcagccccctggagcccctggacctggtgctgctgcggcggctggaccgggaggaggccgccgcccaccggctgcagatcgaggcctgggatggcggccggcccaggagaacaggcctgctgtctgtggagctgcgggtgctggatgaaaatgacaacccccctgtgtttgagcaggatgagtacagagctgctgtgagagaagatgcccagcctggagctgaggtgtgccgggtgcgggccacagaccgggacctgggccccaacggctttgtgcgctacagcgtgcgggcccggcaggtgcctggagctggcagcggcggcggggccctgggagatgctgcctactttgctgtggaggagctgagcggcgtggtgcgggtgtggaggcccctggaccgggaggcccaggcctggcaccagctggtggtggaggccagagatggaggagctgagcctgaggtggccaccgtgcgggtgtccattgctgtgctggatgtgaatgacaacagacctgccatccacgtgctcttcctgacagaaggaggagtggcccgggtgtctgagggcgcccggcctggggactatgtggcccgggtgtctgtgtctgatgctgatggagactgggagaaggaggatgaggccactggagagctgggcgtgggcctgggagatggcagcatcagcctgagcctggagggcggggagggggactttgccctgctgcccggcggccccccaggagtcttcttcctgtgtgtggagggccccctggaccgggagagccgggacctgtatgagctgctgctggtggccacagatgctggcagcccccccctgagcacagaggagaccctgctgctgcgggtggccgacctgaatgaccagcccccactcttcagccagcagcactacaaggcctctgtgtctgaggccgccgcccctggcaccgtggtgatgtgggtgtctgccagtgatgctgatgaagctggcagtgaccacgcctggctgcgctacacagtggtgcagctgagcgccccctgcaacctgggcagcctgcagagcaagatggtgcacacagcagaatgtggccccagctttgccatcgacagcgagagcggggccatcagcaccatccgcaccctggaccgggaggtgcaggaggccgtggagctgaaggtggtggcccaggacctgggggagccccccctgagcgccacctgcctggtgtccatcaccgtggatgatgtgaatgacaatgagcccatcttctggaggcaggtgtacaatgccaccatcgccgagcacgcccctgtgggccactgcttcctgcagctgatcagcgcccaggtggcctttgtgaagatcaagcagaagcagaaggagatccaggagaagcagaacctggcctag

SEQ ID NO: 149247 - DNA, 2109 bp, synthetic construct
  misc_feature 1..2109: note = Description of Artificial Sequence: Synthetic coding sequence
  source 1..2109: mol_type = other DNA
atgggagagggccggcagcagaggcgggcccctgtgggcaagctgctgctgctgcctggaagaagagacaccccccacggccgcagcggcagcagcggggcccggacccagaggagcctgctgtggctgctggtgcacgtgtggctgtgggccgccagcggcagcagcgcccagctgttcaacctgaccctgtctgtggatgagggcctgcccccagacaccctggtgggggacatccgggccggcctgcctgctgcccagcagcaggagggcagcggcttcttcctgtctgaggacagtgatgacagccccctgctggatgacttccacgtgcacccagacaccggcatcatcagaacagcccggcggctggaccgggagcggcgggaccactacagctttgtggccgccaccctgctgggcgctgtggtgcaggtggagatccgggtgaatgatgtgaatgaccacagcccccgcttccccctggacagcctgcagctggatgtgtctgagctgagccccccaggcacagccttccggctgcctgtggcccatgaccctgatgctggcctcttcagcacccagggctacaccctggtgcagcccagcgacctgcccaaggaccctgctggccccttcttccagctgcgctaccgcaccccaggccccctgcccagccccctgctgcccggcagcagcagccccctggagcccctggacctggtgctgctgcggcggctggaccgggaggaggccgccgcccaccggctgcagatcgaggcctgggatggcggccggcccaggagaacaggcctgctgtctgtggagctgcgggtgctggatgaaaatgacaacccccctgtgtttgagcaggatgagtacagagctgctgtgcgggaggatgcccagcccggggctgaggtgtgccgggtgcgggccacagaccgggacctgggccccaatggatttgtgcgctacagcgtgcgggcccggcaggtgcctggggccggcagcggcggcggggccctgggagatgctgcctactttgctgtggaggagctgtctggagtggtgcgggtgtggaggcccctggaccgggaggcccaggcctggcaccagctggtggtggaggccagagatggcggcgctgagcctgaggtggccaccgtgcgggtgtccattgctgtgctggatgtgaatgacaacagacctgccatccacgtgctcttcctgacagagggcggcgtggcccgggtgtctgagggcgcccggcctggggactatgtggcccgggtgtctgtgtctgatgctgatggagactgggagaaggaggatgaggccaccggggagctgggcgtgggcctgggagatggcagcatcagcctgagcctggagggcggggagggggactttgccctgctgcccggcggccccccaggagtcttcttcctgtgtgtggagggccccctggaccgggagagccgggacctgtatgagctgctgctggtggccacagatgctggcagcccccccctgagcacagaggagaccctgctgctgcgggtggccgacctgaatgaccagcccccactcttcagccagcagcactacaaggcctctgtgtctgaggccgccgcccctggcaccgtggtgatgtgggtgtctgccagtgatgctgatgaggccggcagtgaccacgcctggctgcgctacacagtggtgcagctgagcgccccctgcaacctgggcagcctgcagagcaagatggtgcacacagcagaatgtggccccagctttgccattgattctgagagcggggccatcagcaccatccgcaccctggaccgggaggtgcaggaggccgtggagctgaaggtggtggcccaggacctgggggagccccccctgagcgccacctgcctggtgtccatcaccgtggatgatgtgaatgacaatgagcccatcttctggaggcaggtgtacaatgccaccatcgccgagcacgcccctgtgggccactgcttcctgcagctgatcagcgcccaggtggcctttgtgaagatcaagcagaagcagaaggagatccaggagaagcagaacctggcctag

SEQ ID NO: 149248 - DNA, 4101 bp, synthetic construct
  misc_feature 1..4101: note = Description of Artificial Sequence: Synthetic coding sequence
  source 1..4101: mol_type = other DNA
atgagcccctgtggcaggaagatgggagagggccggcagcagaggcgggcccctgtgggcaagctgctgctgctgcccggccggcgggacacccctcatggccgcagcggcagcagcggggcccggacccagaggagcctgctgtggctgctggtgcacgtgtggctgtgggccgccagcggcagcagcgcccagctgttcaacctgaccctgtctgtggatgagggcctgcccccagacaccctggtgggggacatccgggccggcctgcctgctgcccagcagcaggagggcagcggcttcttcctgtctgaagattctgatgacagccccctgctggatgacttccacgtgcacccagacaccggcatcatcagaacagcccggcggctggaccgggagcggcgggaccactacagctttgtggccgccaccctgctgggcgctgtggtgcaggtggagatccgggtgaatgatgtgaatgaccacagcccccgcttccccctggacagcctgcagctggatgtgtctgagctgagccccccaggcacagccttccggctgcctgtggcccatgaccctgatgctggcctcttcagcacccagggctacaccctggtgcagcccagcgacctgcccaaggaccctgctggccccttcttccagctgcgctaccgcaccccaggccccctgcccagccccctgctgcccggcagcagcagccccctggagcccctggacctggtgctgctgcggcggctggaccgggaggaggccgccgcccaccggctgcagatcgaggcctgggatggcggccggcccaggagaacaggcctgctgtctgtggagctgcgggtgctggatgaaaatgacaacccccctgtgtttgagcaggatgagtacagagctgctgtgagagaagatgcccagcctggagctgaggtgtgccgggtgcgggccacagaccgggacctgggccccaacggctttgtgcgctacagcgtgcgggcccggcaggtgcctggagctggcagcggcggcggggccctgggagatgctgcctactttgctgtggaggagctgagcggcgtggtgcgggtgtggaggcccctggaccgggaggcccaggcctggcaccagctggtggtggaggccagagatggaggagctgagcctgaggtggccaccgtgcgggtgtccattgctgtgctggatgtgaatgacaacagacctgccatccacgtgctcttcctgacagaaggaggagtggcccgggtgtctgagggcgcccggcctggggactatgtggcccgggtgtctgtgtctgatgctgatggagactgggagaaggaggatgaggccactggagagctgggcgtgggcctgggagatggcagcatcagcctgagcctggagggcggggagggggactttgccctgctgcccggcggccccccaggagtcttcttcctgtgtgtggagggccccctggaccgggagagccgggacctgtatgagctgctgctggtggccacagatgctggcagcccccccctgagcacagaggagaccctgctgctgcgggtggccgacctgaatgaccagcccccactcttcagccagcagcactacaaggcctctgtgtctgaggccgccgcccctggcaccgtggtgatgtgggtgtctgccagtgatgctgatgaagctggcagtgaccacgcctggctgcgctacacagtggtgcagctgagcgccccctgcaacctgggcagcctgcagagcaagatggtgcacacagcagaatgtggccccagctttgccatcgacagcgagagcggggccatcagcaccatccgcaccctggaccgggaggtgcaggaggccgtggagctgaaggtggtggcccaggacctgggggagccccccctgagcgccacctgcctggtgtccatcaccgtggatgatgtgaatgacaatgagcccatcttctggaggcaggtgtacaatgccaccatcgccgagcacgcccctgtgggccactgcttcctgcaggtgacagccagtgatgctgacagcggcctgtatggcttcatcgagtacagcctgtatgatggcttcctgtcctatgaggccccccaggccttcagaattgacccccatgatggccagatctgtgtgtcccaggacatcgaccgggagcgggaccctgccacctatgacctgctggtggaggccaaggatggcggcggcctgagcgcccaggcctttgtgcgggtggacctggaggatgtgaatgacaaccaccctgtgttcaaccccagcacctacgtgaccagcatcagtgatgagacccagcccggcacagagatcatcaacgtgctggccacagaccaggacagcggcatctatggaacagtggcctatgagctgatccctggaaatgtgagcagcctcttcaccatcgacagcaccaccggcatcatctacctgaccctgcccctgagccacctggagagcaccaccctgagcctgatggtgtctgcccaggacggcggcggcctgacagctgtgatcaatgctgatgtgaccatccacatcttccagaccaccctggccccagctgagtttgagcggcccaagtacaccttcctggtgtatgaagatgtgcctgaggacagccccatcggcaccgtgaaggcccgggagcccctgaacagcagcgagcccatcttctaccgcatcagcagcggggacctgggcggcaagttcagcatccacccccggctgggcaccatccgcaccaggaagcccctggaccacgagacccagcctgtggtggtgctgactgtgcaggcccagctgggcagcgccccagcctgcagcagcacagaggtgaacatcaccgtgatggatgtgaatgacaaccacccagccttcctgcggaccagtgatgagatccgcatcagccagaccaccccacctggaacagccctgtacctggcccgggcagaggaccgggacagcggcagaaatggcctcatccgctacagcatcgccagcccccagcccggggtgtttgccatcgaccgggccctgggcgtgctcttcctgaatggcagcctgggcgctggggagcagcgggagctgaccctgaccctgcgggcagaggaccagggcgtgcacccccaggccgccctgctggtgctgactgtggtgattgagaagcgggagcacagccccagctggacctttgagcacctggtgtaccaggtggaggtgtctgagagcctgagccccatgacccagatgctgcagacccaggcccaccccctgggcccccagagagctgccagccccctgcgctacagcctggagcccagcgtggacagcgccatgtttggcatccggccctacacaggctggatctacctgcggcggcagtttgattatgagagcacccagacctacaacttccgggtgtttgcctggatcccagaagatggcttcctgcagaatgtgtccaccaccgtcatcgtgcgggtgtgggatgaaaatgacaacagccccaccttcctgcatgatgtgctcttcctgaaggtggaggagagccctgtgccccagggcgtcatcggcaagatcacagccatcgacatggacagcggcaagaatggccagctgctgtacttcctgctgagtgatggcaagttcttcaagatgaaccccaacacaggagagctgatcaactgggtggccctggaccgggagcaccggggccaccacgagatgacagtgctggtgacagaccggggcagccccccaagaaatgccaccatggctgtgtatgtgtctgtgacagacatcaatgacaaccggcccttcttcccccagtgcctgcccgggaaggagctgcacgtgaaggtgctggagggccagcctgtgaacatgctggtgaccaccgtgtttgccaaggaccctgatgagggcaacaatgctgaggtgacctacagcgtgtcctctgcccggcccatgcccctgaagggcaagacagccttcggcaagcagagctgcaagaagcagaccaacaagcagaccaagagctag

SEQ ID NO: 149249 - DNA, 462 bp, synthetic construct
  misc_feature 1..462: note = Description of Artificial Sequence: Synthetic coding sequence
  source 1..462: mol_type = other DNA
atgctggagaagctgatgggcgctgacagcctgcagctgttccgcagccgctacaccctgggcaagatctacttcatcggcttccagaggagcatcctgctgagcaagtctgagaacagcctgaacagcatcgccaaggagacagaggagggccgggagaccgtgaccaggaaggagggctggaagagaagacatgaagatggctacctggagatggcccagaggcacctgcagaggagcctgtgcccctgggtgtcctacctgccccagccctatgcagagctggaggaggtgagcagccacgtgggcaaggtgttcatggccagaaattatgagttcctggcctatgaggccagcaaggaccggcggcagcccctggagaggatgtggacctgcaactacaaccagcagaaggaccagagctgcaaccacaaggagatcaccagcaccaaggccgagtag

SEQ ID NO: 149250 - DNA, 249 bp, synthetic construct
  misc_feature 1..249: note = Description of Artificial Sequence: Synthetic coding sequence
  source 1..249: mol_type = other DNA
atggcccagaggcacctgcagaggagcctgtgcccctgggtgtcctacctgccccagccctatgcagagctggaggaggtgagcagccacgtgggcaaggtgttcatggccaggaactatgagttcctggcctatgaggccagcaaggaccggcggcagcccctggagaggatgtggacctgcaactacaaccagcagaaggaccagagctgcaaccacaaggagatcaccagcaccaaggccgagtag

SEQ ID NO: 149251 - DNA, 378 bp, synthetic construct
  misc_feature 1..378: note = Description of Artificial Sequence: Synthetic coding sequence
  source 1..378: mol_type = other DNA
atgaggacagccatctggaagtggcaccggggcatctacagagaccactacgtgctgggcagcctgaccttcctgagccccatgcagagagctggcaccagcaaccagtggaacatgggcaaggtgatgaccctggacagcggagatgaggtgaccttccacaagacctggcccacagaaacaggcagcccctaccgcctggaggaggtgagcagccacgtgggcaaggtgttcatggccagaaattatgagttcctggcctatgaggccagcaaggaccggcggcagcccctggagaggatgtggacctgcaactacaaccagcagaaggaccagagctgcaaccacaaggagatcaccagcaccaaggccgagtag

SEQ ID NO: 149252 - DNA, 1725 bp, synthetic construct
  misc_feature 1..1725: note = Description of Artificial Sequence: Synthetic coding sequence
  source 1..1725: mol_type = other DNA
atggagctgaaggccgaggaggaggaggtgggcggcgtgcagcctgtgtccatccaggcctttgccagcagcagcaccctgcacggcctggcccacatcttctcctatgaaaggctgagcctgaagagggccctgtgggccctgtgcttcctgggcagcctggccgtgctgctgtgtgtgtgcacagagcgggtgcagtactacttccactaccaccacgtgaccaagctggatgaggtggccgccagccagctgaccttccctgctgtgaccctgtgcaacctgaatgagttccgcttcagccaggtgtccaagaatgacctgtaccacgccggggagctgctggccctgctgaacaacagatatgagatcccagacacccagatggctgatgagaagcagctggagatcctgcaggacaaggccaacttccgctccttcaagcccaagcccttcaacatgagggagttctatgacagagctggccatgacatccgggacatgctgctgagctgccacttccggggggaggtgtgcagcgctgaggacttcaaggtggtgttcaccaggtatggcaagtgctacaccttcaacagcggcagagatggccggccccggctgaagaccatgaagggcggcactggaaatggcctggagatcatgctggacatccagcaggatgagtacctgcctgtgtggggcgagacagatgagaccagctttgaagctggcatcaaggtgcagatccacagccaggatgagccccccttcatcgaccagctgggctttggagtggcccctggcttccagacctttgtggcctgccaggagcagaggctcatctacctgcccccaccctggggcacctgcaaggctgtgaccatggacagcgacctggacttctttgacagctacagcatcacagcctgcagaattgactgtgagacccgctacctggtggagaactgcaactgcaggatggtgcacatgcctggagatgccccctactgcaccccagagcagtacaaggaatgtgccgaccctgccctggacttcctggtggagaaggaccaggagtactgtgtgtgtgagatgccctgcaacctgaccaggtatggcaaggagctgtccatggtgaagatccccagcaaggccagcgccaagtacctggccaagaagttcaacaagtctgagcagtacatcggggagaacatcctggtgctggacatcttctttgaggtgctgaactatgagaccatcgagcagaagaaggcctatgaaattgctggcctgctgggggagctgctgatgacccctgtgcccttcagctgccacggccatggagtggccccctaccaccccaaggccggctgcagcctgctgagccatgagggccccccaccccagaggcccttccccaagccctgctgcctgggggacattggaggccagatgggcctcttcatcggggccagcatcctgactgtgctggagctgtttgattatgcctatgaggtgatcaagcacaagctgtgcagaagaggcaagtgccagaaggaggccaagaggagcagcgctgacaagggcgtggccctgagcctggatgatgtgaagaggcacaacccctgtgagagcctgcggggccaccctgctggcatgacctacgccgccaacatcctgccccaccacccagcccggggcacctttgaggacttcacctgctag

SEQ ID NO: 149253 - DNA, 594 bp, synthetic construct
  misc_feature 1..594: note = Description of Artificial Sequence: Synthetic coding sequence
  source 1..594: mol_type = other DNA
atgagggtggtggtgattggagctggggtgattggcctgagcacagccctgtgcatccacgagcgctaccacagcgtgctgcagcccctggacatcaaggtgtatgctgaccgcttcacccccctgaccaccacagatgtggccgccggcctgtggcagccctacctgagtgaccccaacaacccccaggaggccgactggagccagcagacctttgactacctgctgagccacgtgcacagccccaatgctgagaacctgggcctcttcctgatcagcggctacaacctcttccacgaggccatcccagaccccagctggaaggacacagtgctgggcttcaggaagctgaccccccgggagctggacatgtttcctgactatggctacggctggttccacaccagcctcatcctggagggcaagaactacctgcagtggctgacagagcggctgacagagcggggcgtgaagttcttccagaggaaggtggagagctttgaggaggtggcccgggagggcgcagatgtgattgtgaactgcaccggggtgtgggccggggccctgcagagggaccccctgctgcagccctag

SEQ ID NO: 149254 - DNA, 2400 bp, synthetic construct
  misc_feature 1..2400: note = Description of Artificial Sequence: Synthetic coding sequence
  source 1..2400: mol_type = other DNA
atgaagcccagccctgctggaacagccaaggagctggagcccccagccccagcccggggggagcagaggacagctgagcctgagggccgctggagggagaagggggaggccgacacagagcggcagaggacccgggagcggcaggaggccaccctggccggcctggccgagctggagtacctgcggcagaggcaggagctgctggtgcggggggccctgcggggggccggcggggccggggccgccgccccccgggccggggagctgctgggggaggccgcccagaggagccggctggaggagaagttcctggaggagaacatcctgctgctgaggaagcagctgaactgcctgcggaggagagatgctggcctgctgaaccagctgcaggagctggacaagcagatcagtgacctgcggctggatgtggagaagaccagcgaggagcacctggagacagacagccggcccagcagcggcttctatgagctgagtgatggagccagcggcagcctgagcaacagcagcaacagcgtcttcagcgagtgcctgagcagctgccacagcagcacctgcttctgcagccccctggaggccaccctgagcctgagtgatggctgccccaagtctgcagatgtgaaccccaagtaccagtgtgacctggtgtccaagaatggaaatgatgtgtaccgctaccccagccccctgcatgctgtggccgtgcagagccccatgttcctgctgtgcctgactggaaaccccctgcgggaggaggaccggctgggcaaccacgccagtgacatctgtggcggcagcgagctggatgctgtgaagacagacagcagcctgcccagccccagcagcctgtggagcgccagccaccccagcagcagcaagaagatggatggctacatcctgagcctggtgcagaagaagacccaccctgtgaggaccaacaagcccaggacctctgtgaatgctgaccccaccaagggcctgctgagaaatggatctgtgtgtgtgcgggcccctgggggcgtgtcccagggcaacagcgtgaacctgaagaacagcaagcaggcctgcctgcccagcggcggcatccccagcctgaacaacggcaccttcagcccccccaagcagtggagcaaggagagcaaggccgagcaggccgagagcaagagggtgcccctgcctgagggctgccccagcggggccgccagtgacctgcagagcaagcacctgcccaagacagccaagccagccagccaggagcacgcccgctgcagcgccatcggcaccggggagagccccaaggagagcgcccagctgagcggggccagccccaaggagagccccagccggggccctgccccaccccaggagaacaaggtggtgcagcccctgaagaagatgagccagaagaacagcctgcagggcgtgcccccagccaccccacccctgctgagcacagccttccctgtggaggagaggcctgccctggacttcaagtctgagggcagcagccagagcctggaggaggcccacctggtgaaggcccagttcatccctggccagcagcccagcgtgcggctgcaccggggccacaggaacatgggcgtggtgaagaacagcagcctgaagcaccggggccctgccctgcagggcctggagaatggcctgcccaccgtgcgggagaagacccgggccggcagcaagaagtgccgcttcccagatgacctggacaccaacaagaagctgaagaaggccagcagcaaaggaaggaagagcggcggcggccctgaggccggcgtgcccggccggcctgctgggggcggccaccgggccggcagccgggcccacggccacggccgggaggccgtggtggccaagcccaagcacaagaggacagactaccgccgctggaagagcagcgctgagatctcctatgaggaggccctgcggcgggcccggcggggcagaagagaaaatgtgggcctgtacccagcccctgtgcccctgccctatgccagcccctatgcctacgtggccagtgacagcgagtacagcgcagaatgtgagagcctcttccacagcacagtggtggacaccagtgaagatgagcagagcaactacaccaccaactgctttggagacagcgagagctctgtgtctgagggggagtttgtgggggagagcaccaccaccagtgacagcgaggagagcggcggcctcatctggagccagtttgtgcagaccctgcccatccagacagtgacagccccagacctgcacaaccacccagccaagacctttgtgaagatcaaggccagccacaacctgaagaagaagatcctgcgcttccgcagcggcagcctgaagctgatgaccaccgtgtag

SEQ ID NO: 149255 - DNA, 2511 bp, synthetic construct
  misc_feature 1..2511: note = Description of Artificial Sequence: Synthetic coding sequence
  source 1..2511: mol_type = other DNA
atgaagcccagccctgctggaacagccaaggagctggagcccccagccccagcccggggggagcagaggacagctgagcctgagggccgctggagggagaagggggaggccgacacagagcggcagaggacccgggagcggcaggaggccaccctggccggcctggccgagctggagtacctgcggcagaggcaggagctgctggtgcggggggccctgcggggggccggcggggccggggccgccgccccccgggccggggagctgctgggggaggccgcccagaggagccggctggaggagaagttcctggaggagaacatcctgctgctgaggaagcagctgaactgcctgcggaggagagatgctggcctgctgaaccagctgcaggagctggacaagcagatcagtgacctgcggctggatgtggagaagaccagcgaggagcacctggagacagacagccggcccagcagcggcttctatgagctgagtgatggagccagcggcagcctgagcaacagcagcaacagcgtcttcagcgagtgcctgagcagctgccacagcagcacctgcttctgcagccccctggaggccaccctgagcctgagtgatggctgccccaagtctgctgacctgattggcctgctggagtacaaggagggccactgtgaggaccaggccagcggggctgtgtgccgcagcctgagcaccccccagttcaacagcctggatgtgattgctgatgtgaaccccaagtaccagtgtgacctggtgtccaagaatggaaatgatgtgtaccgctaccccagccccctgcatgctgtggccgtgcagagccccatgttcctgctgtgcctgaccggcaaccccctgcgggaggaggaccggctgggcaaccacgccagtgacatctgtggcggcagcgagctggatgctgtgaagacagacagcagcctgcccagccccagcagcctgtggagcgccagccaccccagcagcagcaagaagatggatggctacatcctgagcctggtgcagaagaagacccaccctgtgaggaccaacaagcccaggacctctgtgaatgctgaccccaccaagggcctgctgagaaatggatctgtgtgtgtgcgggcccctggaggagtgtcccagggcaacagcgtgaacctgaagaacagcaagcaggcctgcctgcccagcggcggcatccccagcctgaacaacggcaccttcagcccccccaagcagtggagcaaggagagcaaggccgagcaggccgagagcaagagggtgcccctgcctgagggctgccccagcggggccgccagtgacctgcagagcaagcacctgcccaagacagccaagccagccagccaggagcacgcccgctgcagcgccatcggcactggagagagccccaaggagagcgcccagctgagcggggccagccccaaggagagccccagccggggccctgccccaccccaggagaacaaggtggtgcagcccctgaagaagatgagccagaagaacagcctgcagggcgtgcccccagccaccccacccctgctgagcacagccttccctgtggaggagaggcctgccctggacttcaagtctgagggcagcagccagagcctggaggaggcccacctggtgaaggcccagttcatccctggccagcagcccagcgtgcggctgcaccggggccacaggaacatgggcgtggtgaagaacagcagcctgaagcaccggggccctgccctgcagggcctggagaatggcctgcccaccgtgcgggagaagaccagggctggcagcaagaagtgccgcttcccagatgacctggacaccaacaagaagctgaagaaggccagcagcaagggcaggaagagcggcggcggccctgaggccggcgtgcccggccggcctgctgggggcggccacagagctggcagccgggcccacggccacggccgggaggccgtggtggccaagcccaagcacaagaggacagactaccgccgctggaagagcagcgctgagatctcctatgaggaggccctgcggcgggcccggcggggccggcgggagaatgtgggcctgtacccagcccctgtgcccctgccctatgccagcccctatgcctacgtggccagtgacagcgagtacagcgcagaatgtgagagcctcttccacagcacagtggtggacaccagtgaagatgagcagagcaactacaccaccaactgcttcggggacagcgagagctctgtgtctgagggggagtttgtgggggagagcaccaccaccagtgacagcgaggagagcggcggcctcatctggagccagtttgtgcagaccctgcccatccagacagtgacagccccagacctgcacaaccacccagccaagacctttgtgaagatcaaggccagccacaacctgaagaagaagatcctgcgcttccgcagcggcagcctgaagctgatgaccaccgtgtag

SEQ ID NO: 149256 - DNA, 2325 bp, synthetic construct
  misc_feature 1..2325: note = Description of Artificial Sequence: Synthetic coding sequence
  source 1..2325: mol_type = other DNA
atgtggacccctgggggccccccaggcagcgctggctgggacagaagaaggctgggcgcccggctgcgggccgcctttgctggcctgcaggagctgcagggcctgcgggccacccagcaggagcgggtgcggggggccctggccctgcagcccccaccagccccagctgccccctgtggcccccacggcctgcacggccctgagcagcagctggaggccgccctggccgccctgcaggagcagctgagccggctgcggcagcaggacatcggcctgaagacccacctggaccagctggacctgcagatcagcaagctgcagctggatgtgggcacagccagcggggaggccctggacagcgacagccggcccagcagcggcttctatgagatgtctgatggcggcagctgcagcctgagcaccagctgtgcctctgtgtgcagcgaccacatcagccccagcctgggcagcctgctgcctgtggcccaggcccacaaggcccggcccagcatgggagactggaggcccaggtctgtggatgagaccaccgtgcctgcctggaggccccaggccacagaggagggcgcccggcccccaggctctgtggaggatgctggccagccctggggcaccttctggcccaggcctgtgtccactggagacctggaccgggccctgcctgctgacaccggcctgcagaaggccagcgcagatgctgagctgctgggcctgctgtgccagggcgtggacatccccctgcacgtgcctgaccccaagtaccggcaggacctggtgtcccagggcggccgggaggtgtacccctaccccagccccctgcatgctgtggccctgcagagccccctgtttgtgctgaccaaggagaccccccagagaggaggccccagcttcccccgggagagcccccggggccctgctggcctgaacaccatccagacaggccctgtgctggaggccggccctgcccgggcccgggcctacatcgaccggctgctgcacctgtggggccgggagaccccagccaagggcagcgagggggagcagggccccctgcggcatgctgccagccccagcccccagaggcagggcggctggagcacagatggcggcggccgcctgctggtgtttgcccctggaagagaagatgagggcggccctgcccagagcagaggagctggccggggcggcccccagcagcagggctacatgcccctggagggcccccagcagagcggcagcctgcctgaggagggcagcaagcccagcaacagctgtgtgctgcgggagaccatggtgcaggccagccccagcagcaaggcccagcagaccccatctgcccaggactatggccggggcaacatcatcagccccagcaggatgctggacaagagccccagccctgccagcggccactttgcccaccccagctttgctgccagcctgaagatgggcccccccaagagcaaggccgagaagatcaagaggagccccatggacaaggtgctgcgctttgcccggcagcccctgctgctgctggacaggcctgagggcgcccacgccgccccccagcccagcctggagtgggaccctgcccactggcccaccggccggggcggcctgcagaggaggcctgccctggcctgggaggcccctggccgcagctgcagcgagagcaccctgtaccccatgcctgtgctggtgcccctggccgtggccccccaggagagccacaggaccagcgcccaggccctcttcccctttgaggccagcctgctgacctctgtggcccggaggaagcaccggcgctggcagagcacagtggagatcagcgcccgggcccggctggccagctgcccagagagcaacctgggcccccccaggcctgtggccaggagagctgggggccccctggcccggggccggcccagcctggtgcggcaggatgcctacaccaggagtgacagcgagcccagcaagcacagcgcagaatgtgacccccgcttccccagcgtcatccctgagaccagcgagggggagagcagtgaccacaccaccaacagatttggagaccgggagagcagcagcagtgatgaggagggcggggcccagagccgggactgtgacctggccctgggctacgtggccgccggccatgctgagctggcctggacccaggaggcccctgtgagcagcggccccctgctgagccctgtgcccaagctgtgccgcatcaaggccagcaaggccctgaagaagaagatccgccgcttccagcccacagccctgaaggtgatgaccatggtgtag

SEQ ID NO: 149257 - DNA, 843 bp, synthetic construct
  misc_feature 1..843: note = Description of Artificial Sequence: Synthetic coding sequence
  source 1..843: mol_type = other DNA
atgtggacccctgggggccccccaggcagcgctggctgggacagaagaaggctgggcgcccggctgcgggccgcctttgctggcctgcaggagctgcagggcctgcgggccacccagcaggagcgggtgcggggggccctggccctgcagcccccaccagccccagctgccccctgtggcccccacggcctgcacggccctgagcagcagctggaggccgccctggccgccctgcaggagcagctgagccggctgcggcagcaggacatcggcctgaagacccacctggaccagctggacctgcagatcagcaagctgcagctggatgtgggcacagccagcggggaggccctggacagcgacagccggcccagcagcggcttctatgagatgtctgatggcggcagctgcagcctgagcaccagctgtgcctctgtgtgcagcgaccacatcagccccagcctgggcagcctgctgcctgtggcccaggcccacaaggcccggcccagcatgggagactggaggcccaggtctgtggatgagaccaccgtgcctgcctggaggccccaggccacagaggagggcgcccggcccccaggctctgtggaggatgctggccagccctggggcaccttctggcccaggcctgtgtccacagagctgtgcaatgcccctggagagctggacatgcacgcccctcctgctggctgcaccagcagcagcctgactggagtgggcagcggcctgcggggcaaatgtggcctgtgtggctgccagctgcccttctgcagcgtgaacaccagcagcaagaccaagagcagcggcatcagccggcagcagtag

SEQ ID NO: 149258 - DNA, 1890 bp, synthetic construct
  misc_feature 1..1890: note = Description of Artificial Sequence: Synthetic coding sequence
  source 1..1890: mol_type = other DNA
atgatccgggccttctccttccctgtgtccccagagcggggccgcctgcggggctggctggagggcagcctggccggcctgtgtgagctgcactggctgcgggagcggcaggagtacagagtgcagcaggccctgcggctggcccagcccggcatgggcggcgctgaggccgaggatgaagaagatgctgatgaagatgaagatgctgctgctgccaggagagctgctgctgccctggaggagcagctggaggccctgcccggcctggtgtgggacctgggccagcagctgggggacctgagcctggagagcggcggcctggagcaggagagcggccgcagcagcggcttctatgaggaccccagcagcactggaggccctgacagcccccccagcaccttctgtggggacagcggcttcagcggcagcagcagctatggccgcctgggccccagcgagccccggggcatctatgccagcgagcggcccaagagcctgggagatgccagccccagcgcccctgaggtggtgggcgcccgggctgctgtgcccaggagcttcagcgccccctaccccacagctgggggcagcgctggccctgaggcctgcagcagcgctgagcggcgggcccgggccggccccttcctgacccccagccccctgcatgctgtggccatgaggagcccccggccctgtggccggcccccaacagacagcccagatgctgggggcgccggccggcccctggatggctacatcagcgccctgctgcggaggagaagaagaagaggagctggccagcccaggaccagccctgggggcgcagatggcggcccccggcggcagaacagcgtgcggcagaggcccccagatgccagccccagccctggcagcgcccggcctgcccgggagcccagcctggagcgggtgggcggccaccccaccagccctgctgccctgagccgggcctgggccagctcctgggagagcgaggccgcccctgagcctgctgcccctcctgctgcccccagccccccagacagccctgctgagggccgcctggtgaaggcccagtacatccctggggcccaggccgccacccggggcctgcccggccgggccgcccggaggaagcccccacccctgacccggggccgctctgtggagcagagccccccccgggagcggcccagggctgctggccggcggggccgcatggccgaggccagcggccggcggggcagcccccgggccaggaaggccagccgcagccagagcgagaccagcctgctgggccgggccagcgctgtgcccagcggcccccccaagtaccccacagctgagcgggaggagccccggcccccccggccccggcggggccctgcccccaccctggccgcccaggccgccggcagctgccgccgctggaggagcacagctgagattgatgctgctgatggccggcgggtgcggccccgggccccagctgcccgggtgcccggccctggccccagccccagcgccccccagaggcggctgctgtatggctgtgccggcagtgacagtgaatgttctgctggccgcctgggccccctgggccggcggggccctgctgggggcgtgggcggcggctatggagagagcgagagcagcgccagcgagggggagagccctgccttcagcagcgccagcagtgacagtgatggcagcggcggcctggtgtggccccagcagctggtggccgccacagctgccagcggcggcggggccggggccggggccccagctggccctgccaaggtgtttgtgaagatcaaggccagccacgccctgaagaagaagatcctgcgcttccgcagcggcagcctgaaggtgatgaccaccgtgtag

SEQ ID NO: 149259 - DNA, 2025 bp, synthetic construct
  misc_feature 1..2025: note = Description of Artificial Sequence: Synthetic coding sequence
  source 1..2025: mol_type = other DNA
atgaacagcggggccatgaggatccacagcaagggccacttccagggcggcatccaggtgaagaatgagaagaaccggcccagcctgaagagcctgaagacagacaacagacctgagaagagcaagtgcaagcccctgtggggcaaggtgttctacctggacctgcccagcgtgaccatcagcgagaagctgcagaaggacatcaaggacctgggcggccgggtggaggagttcctgagcaaggacatctcctacctgatcagcaacaagaaggaggccaagtttgcccagaccctgggccgcatcagccctgtgcccagccctgagagcgcctacacagctgagaccaccagcccccaccccagccatgatggcagcagcttcaagagcccagacacagtgtgcctgagccggggcaagctgctggtggagaaggccatcaaggaccatgacttcatccccagcaacagcatcctgagcaatgccctgtcctggggcgtgaagatcctgcacattgatgacatccgctactacatcgagcagaagaagaaggagctgtacctgctgaagaagagcagcacctctgtgagagatggcggcaagagggtgggcagcggggcccagaagaccaggacaggccgcctgaagaagccctttgtgaaggtggaggacatgagccagctgtaccggcccttctacctgcagctgaccaacatgcccttcatcaactacagcatccagaagccctgcagcccctttgatgtggacaagcccagctccatgcagaagcagacccaggtgaagctgcgcatccagacagatggagacaagtatggaggcaccagcatccagctgcagctgaaggagaagaagaagaagggctactgtgagtgctgcctgcagaagtatgaggacctggagacccacctgctgtctgagcagcacaggaactttgcccagagcaaccagtaccaggtggtggatgacatcgtgtccaagctggtgtttgattttgtggagtatgagaaggacacccccaagaagaagaggatcaagtacagcgtgggcagcctgagccctgtgtctgcctctgtgctgaagaagacagagcagaaggagaaggtggagctgcagcacatcagccagaaggactgccaggaggatgacaccaccgtgaaggagcagaacttcctgtacaaggagacccaggagacagagaagaagctgctcttcatcagcgagcccatcccccaccccagcaatgagctgcggggcctgaatgagaagatgagcaacaagtgcagcatgctgagcacagcagaagatgacatccggcagaacttcacccagctgcccctgcacaagaacaagcaggagtgcatcctggacatcagcgagcacaccctgtctgaaaatgacctggaggagctgcgggtggaccactacaagtgcaacatccaggcctctgtgcacgtgtctgacttcagcacagacaacagcggcagccagcccaagcagaagagtgacacagtgctcttccctgccaaggacctgaaggagaaggacctgcacagcatcttcacccatgattctggcctcatcaccatcaacagcagccaggagcacctgactgtgcaggccaaggcccccttccacaccccacctgaggagcccaatgaatgtgacttcaagaacatggacagcctgcccagcggcaagatccacaggaaggtgaagatcatcctgggcaggaacaggaaggagaacctggagcccaatgctgagtttgacaagaggacagagttcatcacccaggaggagaaccgcatctgcagcagccctgtgcagagcctgctggacctcttccagaccagcgaggagaagtctgagttcctgggcttcaccagctacacagagaagagcggcatctgcaatgtgctggacatctgggaggaggagaacagcgacaacctgctgacagccttcttcagcagccccagcaccagcaccttcaccggcttctag

SEQ ID NO: 149260 - DNA, 654 bp, synthetic construct
  misc_feature 1..654: note = Description of Artificial Sequence: Synthetic coding sequence
  source 1..654: mol_type = other DNA
atgaacagcggggccatgaggatccacagcaagggccacttccagggcggcatccaggtgaagaatgagaagaaccggcccagcctgaagagcctgaagacagacaacagacctgagaagagcaagtgcaagcccctgtggggcaaggtgttctacctggacctgcccagcgtgaccatcagcgagaagctgcagaaggacatcaaggacctgggcggccgggtggaggagttcctgagcaaggacatctcctacctgatcagcaacaagaaggaggccaagtttgcccagaccctgggccgcatcagccctgtgcccagccctgagagcgcctacacagctgagaccaccagcccccaccccagccatgatggcagcagcttcaagagcccagacacagtgtgcctgagccggggcaagctgctggtggagaaggccatcaaggaccatgacttcatccccagcaacagcatcctgagcaatgccctgtcctggggcgtgaagatcctgcacattgatgacatccgctactacatcgagcagaagaagaaggagctgtacctgctgaagaagagcagcacctctgtgagagatggcggcaagagggtgggcagcggggcccagaagaccaggaaggccctgcagagcatctag

SEQ ID NO: 149261 - DNA, 1848 bp, synthetic construct
  misc_feature 1..1848: note = Description of Artificial Sequence: Synthetic coding sequence
  source 1..1848: mol_type = other DNA
atgtctgagcccgggaaaggagatgactgcctggagctggagagctccatggccgagagccggctgcgggccccagacctgggcgtgagccgctgcctgggcaagtgccagaagaacagccctggggccaggaagcaccccttcagcggcaagagcttctacctggacctgcctgctgggaagaacctgcagttcctgactggagccatccagcagctgggcggcgtgattgagggcttcctgagcaaggaggtgtcctacatcgtgagcagccggcgggaggtgaaggccgagagcagcggcaagagccaccggggctgccccagccccagccccagcgaggtgcgggtggagaccagcgccatggtggaccccaagggcagccacccccggcccagcaggaagcctgtggacagcgtgcccctgagccggggcaaggagctgctgcagaaggccatccggaaccagggcagcatcagcggcggcggcagcggcggcagcagcagcctgctgaccaatgcccgctcctggggcgtgcgcatcctgcacgtggatgagatgatgatgcacgtgcagcagctgagcctggccagcctgtgtgtgaagaagcagcagcccaagaagccagagggcacctgcccagctgctgagagcaggaccaggaaggtggcccggctgaaggcccccttcctgaagattgaagatgagagcaggaagttccggcccttccaccaccagttcaagagcttccctgagatctccttcctgggccccaaggatgccagcccctttgaggcccccaccaccctgggctccatgcaccacacccgggagagcaaggatggagagcccagccccaggtctgctgcccacaccatgcccaggaggaagaagggctactgtgagtgctgccaggaggcctttgaggagctgcacgtgcacctgcagagcgcccagcacaggagctttgccctggaggcccacctgtatgcagaggtggaccgcatcatcgcccagctgagccacagctttgctgacatccccttccaggccggcctgccccgctggagcggcagccctgccagtgactgtgaccccctgtgcccagagaccctgcacccccaccagcccagccacccccgggccgccagcccccgcatcaggaaggaggacagctgccaggcctctgtgacccagggccgggctgctggccagcagcgctggacagagagcctggatggagtgatgggccccccagccagccacacctgtgtgtctgccaccaccctgctgcctgccctgcccaagggcagccgggagcagggctgcctgtgcccctgcccagccagcttcacccagagccacctggtgaccagcctggccctgctgcccggggagtggagccctgctgaggacatgcccctgcaccccagccaggagaacagctttgccccagctgacatccctgtgaagggccccctgctcttccctgaggcccggccctggctgatgtctgcccgctgctgggtgcggcccttcccctttgtgacctggggctgcctgatcccccatgacaccacccccctgcacgaggaggtgagcccctgcccctgcctgcggctgggctacctgtacctgctgctgacccagagcctgtggtgccgggtgcgggtgcccagcctgagcacagctggccccatccccaggaccagccacccctgcaccctggccttccccagctacctgaatgaccatgacctgggccacctgtgccaggccaagccccagggctggaacaccccccagcccttcctgcactgcggcttcctggccgtggacagcggctag

SEQ ID NO: 149262 - DNA, 1296 bp, synthetic construct
  misc_feature 1..1296: note = Description of Artificial Sequence: Synthetic coding sequence
  source 1..1296: mol_type = other DNA
atgtctgagcccgggaaaggagatgactgcctggagctggagagctccatggccgagagccggctgcgggccccagacctgggcgtgagccgctgcctgggcaagtgccagaagaacagccctggggccaggaagcaccccttcagcggcaagagcttctacctggacctgcctgctgggaagaacctgcagttcctgactggagccatccagcagctgggcggcgtgattgagggcttcctgagcaaggaggtgtcctacatcgtgagcagccggcgggaggtgaaggccgagagcagcggcaagagccaccggggctgccccagccccagccccagcgaggtgcgggtggagaccagcgccatggtggaccccaagggcagccacccccggcccagcaggaagcctgtggacagcgtgcccctgagccggggcaaggagctgctgcagaaggccatccggaaccagggcagcatcagcggcggcggcagcggcggcagcagcagcctgctgaccaatgcccgctcctggggcgtgcgcatcctgcacgtggatgagatgatgatgcacgtgcagcagctgagcctggccagcctgtgtgtgaagaagcagcagcccaagaagccagagggcacctgcccagctgctgagagcaggaccaggaaggtggcccggctgaaggcccccttcctgaagattgaagatgagagcaggaagttccggcccttccaccaccagttcaagagcttccctgagatctccttcctgggccccaaggatgccagcccctttgaggcccccaccaccctgggctccatgcaccacacccgggagagcaaggatggagagcccagccccaggtctgctgcccacaccatgcccaggaggaagaagggctactgtgagtgctgccaggaggcctttgaggagctgcacgtgcacctgcagagcgcccagcacaggagctttgccctggaggcccacctgtatgcagaggtggaccgcatcatcgcccagctgagccacagctttgctgacatccccttccaggccggcctgccccgctggagcggcagccctgccagtgactgtgaccccctgtgcccagagaccctgcacccccaccagcccagccacccccgggccgccagcccccgcatcaggaaggaggacagctgccaggcctctgtgacccagggccgggctgctggccagcagcgctggacagagagcctggatggagtgatgggccccccagccagccacacctgccaccggccctgccgcctgccctag

SEQ ID NO: 149263 - DNA, 474 bp, synthetic construct
  misc_feature 1..474: note = Description of Artificial Sequence: Synthetic coding sequence
  source 1..474: mol_type = other DNA
atgtctgagcccgggaaaggagatgactgcctggagctggagagctccatggccgagagccggctgcgggccccagacctgggcgtgagccgctgcctgggcaagtgccagaagaacagccctggggccaggaagcaccccttcagcggcaagagcttctacctggacctgcctgctgggaagaacctgcagttcctgactggagccatccagcagctgggcggcgtgattgagggcttcctgagcaaggaggtgtcctacatcgtgagcagccggcgggaggtgaaggccgagagcagcggcaagagccaccggggctgccccagccccagccccagcgaggtgcgggtggagaccagcgccatggtggaccccaagggcagccacccccggcccagcaggaagcctgtggacagcgtgcccctgagccggggcaaggagctgctgcagaaggccatccggaaccagaagtag

SEQ ID NO: 149264 - DNA, 570 bp, synthetic construct
  misc_feature 1..570: note = Description of Artificial Sequence: Synthetic coding sequence
  source 1..570: mol_type = other DNA
atggtgggcggcggccagccctgtggccccaacatgtctgaggtgtcctgcaagaagagagatgactacctggagtggccagagtacttcatggctgtggccttcctgagcgcccagaggagcaaggaccccaacagccaggtgggcgcctgcatcgtgaacagcgagaacaagatcgtgggcatcggctacaacggcatgcccaacggctgcagtgatgatgtgctgccctggaggagaacagctgagaacaagctggacaccaagtacccctacgtgtgccacgccgagctgaatgccatcatgaacaagaacagcacagatgtgaagggctgcagcatgtatgtggccctcttcccctgcaatgaatgtgccaagctgatcatccaggccggcatcaaggaggtgatcttcatgtctgacaagtaccatgacagtgatgaggccacagctgcccggctgctcttcaacatggccggcgtgaccttcaggaagttcatccccaagtgcagcaagatcgtgattgactttgacagcatcaacagccggcccagccagaagctgcagtag

SEQ ID NO: 149265 - DNA, 537 bp, synthetic construct
  misc_feature 1..537: note = Description of Artificial Sequence: Synthetic coding sequence
  source 1..537: mol_type = other DNA
atgtctgaggtgtcctgcaagaagagagatgactacctggagtggccagagtacttcatggctgtggccttcctgagcgcccagaggagcaaggaccccaacagccaggtgggcgcctgcatcgtgaacagcgagaacaagatcgtgggcatcggctacaacggcatgcccaacggctgcagtgatgatgtgctgccctggaggagaacagctgagaacaagctggacaccaagtacccctacgtgtgccacgccgagctgaatgccatcatgaacaagaacagcacagatgtgaagggctgcagcatgtatgtggccctcttcccctgcaatgaatgtgccaagctgatcatccaggccggcatcaaggaggtgatcttcatgtctgacaagtaccatgacagtgatgaggccacagctgcccggctgctcttcaacatggccggcgtgaccttcaggaagttcatccccaagtgcagcaagatcgtcatcgactttgacagcatcaacagccggcccagccagaagctgcagtag

SEQ ID NO: 149266 - DNA, 510 bp, synthetic construct
  misc_feature 1..510: note = Description of Artificial Sequence: Synthetic coding sequence
  source 1..510: mol_type = other DNA
atgtctgaggtgtcctgcaagaagagagatgactacctggagtggccagagtacttcatggctgtggccttcctgagcgcccagaggagcaaggaccccaacagccaggtgggcgcctgcatcgtgaacagcgagaacaagatcgtgggcatcggctacaacggcatgcccaacggctgcagtgatgatgtgctgccctggaggagaacagctgagaacaagctggacaccaagtacccctacgtgtgccacgccgagctgaatgccatcatgaacaagaacagcacagatgtgaagggctgcagcatgtatgtggccctcttcccctgcaatgaatgtgccaagctgatcatccaggccggcatcaaggaggtgatcttcatgtctgacaagtaccatgacagtgatgaggccacagctgcccggctgctcttcaacatggccggcgtgaccttcaggaagttcatccccaagtgcagcaagatcgtcatcgactttgacagcatctag

SEQ ID NO: 149267 - DNA, 222 bp, synthetic construct
  misc_feature 1..222: note = Description of Artificial Sequence: Synthetic coding sequence
  source 1..222: mol_type = other DNA
atgtctgaggtgtcctgcaagaagagagatgactacctggagtggccagagtacttcatggctgtggccttcctgagcgcccagaggagcaaggaccccaacagccaggtgggcgcctgcatcgtgaacagcgagaacaagatcgtgggcatcggctacaacggcatgcccaacggctgcagtgatgatgtgctgccctggaggagaacagctgagaactag

SEQ ID NO: 149268 - DNA, 180 bp, synthetic construct
  misc_feature 1..180: note = Description of Artificial Sequence: Synthetic coding sequence
  source 1..180: mol_type = other DNA
atgtctgaggtgtcctgcaagaagagagatgactacctggagtggccagagtacttcatggctgtggccttcctgagcgcccagaggagcaaggaccccaacagccaggtgggcgcctgcatcgtgaacagcgagaacaagatcgtgggcatcggctacaacggcatgcccaacggctag

SEQ ID NO: 149269 - DNA, 72 bp, synthetic construct
  misc_feature 1..72: note = Description of Artificial Sequence: Synthetic coding sequence
  source 1..72: mol_type = other DNA
atgtctgaggtgtcctgcaagaagagagatgactacctggagtggccagagtacttcatggctgtggcctag

SEQ ID NO: 149270 - DNA, 363 bp, synthetic construct
  misc_feature 1..363: note = Description of Artificial Sequence: Synthetic coding sequence
  source 1..363: mol_type = other DNA
atgtctgaggtgtcctgcaagaagagagatgactacctggagtggccagagtacttcatggctgtggccttcctgagcgcccagaggagcaaggaccccaacagccaggtgggcgcctgcatcgtgaacagcgagaacaagatcgtgggcatcggctacaacggcatgcccaacggctgcagtgatgatgtgctgccctggaggagaacagctgagaacaagctggacaccaagtacccctacgtgtgccacgccgagctgaatgccatcatgaacaagaacagcacagatgtgaagggctgcagcatgtatgtggccctcttcccctgcaatgaatgtgccaagctgatcatccaggcctag

SEQ ID NO: 149271 - DNA, 537 bp, synthetic construct; identical to SEQ ID NO: 149265
  misc_feature 1..537: note = Description of Artificial Sequence: Synthetic coding sequence
  source 1..537: mol_type = other DNA

SEQ ID NO: 149272 - DNA, 360 bp, synthetic construct
  misc_feature 1..360: note = Description of Artificial Sequence: Synthetic coding sequence
  source 1..360: mol_type = other DNA
atgtctgaggtgtcctgcaagaagagagatgactacctggagtggccagagtacttcatggctgtggccttcctgagcgcccagaggagcaaggaccccaacagccaggtgggcgcctgcatcgtgaacagcgagaacaagatcgtgggcatcggctacaacggcatgcccaacggctgcagtgatgatgtgctgccctggaggagaacagctgagaacaagctggacaccaagtacccctacgtgtgccacgccgagctgaatgccatcatgaacaagaacagcacagatgtgaagggctgcagcatgtatgtggccctcttcccctgcaatgaatgtgccaagctgatcatccagtag

SEQ ID NO: 149273 - DNA, 297 bp, synthetic construct
  misc_feature 1..297: note = Description of Artificial Sequence: Synthetic coding sequence
  source 1..297: mol_type = other DNA
atgtctgaggtgtcctgcaagaagagagatgactacctggagtggccagagtacttcatggctgtggccttcctgagcgcccagaggagcaaggaccccaacagccaggtgggcgcctgcatcgtgaacagcgagaacaagatcgtgggcatcggctacaacggcatgcccaacggctgcagtgatgatgtgctgccctggaggagaacagctgagaacaagctggacaccaagtacccctacgtgtgccacgccgagctgaatgccatcatgaacaagaacagcacagatgtgtag

SEQ ID NO: 149274 - DNA, 780 bp, synthetic construct
  misc_feature 1..780: note = Description of Artificial Sequence: Synthetic coding sequence
  source 1..780: mol_type = other DNA
atgaacaagctgaagagcagccagaaggacaaggtgcggcagttcatgatcttcacccagagcagcgagaagacagctgtgtcctgcctgagccagaatgactggaagctggatgtggccacagacaacttcttccagaaccctgagctgtacatccgggagagcgtgaagggcagcctggacaggaagaagctggagcagctgtacaaccgctacaaggacccccaggatgagaacaagattggaattgatggcatccagcagttctgtgatgacctggccctggaccctgccagcatctctgtgctgatcatcgcctggaagttccgggccgccacccagtgtgagttcagcaagcaggagttcatggatggcatgacagagctgggctgtgacagcattgagaagctgaaggcccagatccccaagatggagcaggagctgaaggagcccggccgcttcaaggacttctaccagttcaccttcaactttgccaagaaccctggccagaagggcctggacctggagatggccatcgcctactggaacctggtgctgaatggccgcttcaagttcctggacctgtggaacaagttcctgctggagcaccacaagaggagcatccccaaggacacctggaacctgctgctggacttcagcaccatgattgctgatgacatgagcaactatgatgaggagggcgcctggcctgtgctgattgatgactttgtggagtttgcccggccccagattgctggcaccaagagcaccaccgtgtag

SEQ ID NO: 149275 - DNA, 660 bp, synthetic construct
  misc_feature 1..660: note = Description of Artificial Sequence: Synthetic coding sequence
  source 1..660: mol_type = other DNA
atgaacaagctgaagagcagccagaaggacaaggtgcggcagttcatgatcttcacccagagcagcgagaagacagctgtgtcctgcctgagccagaatgactggaagctggatgtggccacagacaacttcttccagaaccctgagctgtacatccgggagagcgtgaagggcagcctggacaggaagaagctggagcagctgtacaaccgctacaaggacccccaggatgagaacaagattggaattgatggcatgacagagctgggctgtgacagcattgagaagctgaaggcccagatccccaagatggagcaggagctgaaggagcccggccgcttcaaggacttctaccagttcaccttcaactttgccaagaaccctggccagaagggcctggacctggagatggccatcgcctactggaacctggtgctgaatggccgcttcaagttcctggacctgtggaacaagttcctgctggagcaccacaagaggagcatccccaaggacacctggaacctgctgctggacttcagcaccatgattgctgatgacatgagcaactatgatgaggagggcgcctggcctgtgctgattgatgactttgtggagtttgcccggccccagattgctggcaccaagagcaccaccgtgtag

SEQ ID NO: 149276 - DNA, 387 bp, synthetic construct
  misc_feature 1..387: note = Description of Artificial Sequence: Synthetic coding sequence
  source 1..387: mol_type = other DNA
atgatcttcacccagagcagcgagaagacagctgtgtcctgcctgagccagaatgactggaagctggatgtggccacagacaacttcttccagaaccctgagctgtacatccgggagagcgtgaagggcagcctggacaggaagaagctggagcagctgtacaaccgctacaaggacccccaggatgagaacaagattggaattgatggcatccagcagttctgtgatgacctggccctggaccctgccagcatctctgtgctgatcatcgcctggaagttccgggccgccacccagtgtgagttcagcaagcaggagttcatggatggcatgacagagctgggctgtgacagcattgagaagctgaaggcccagatccccaagtag

SEQ ID NO: 149277 - DNA, 879 bp, synthetic construct
  misc_feature 1..879: note = Description of Artificial Sequence: Synthetic coding sequence
  source 1..879: mol_type = other DNA
atgcacagtgatgctgctgctgtgaacttccagctgaacagccacctgagcaccctggccaacatccacaagatctaccacaccctgaacaagctgaacctgacagaggacatcggccaggatgaccaccagacaggcagcctgcggagctgcagcagcagtgactgcttcaacaaggtgatgccacccaggaagaagagaagacctgccagcggagatgacctgagcgccaagaagagcagacatgacagcatgtacagaaaatatgacagcacccgcatcaagacagaggaggaggccttcagcagcaagcgctgcctggagtggttctatgaatatgccggcacagatgatgtggtgggccctgagggcatggagaagttctgtgaggacatcggcgtggagccagaaaatgtggtgatgctggtgctggcctggaagctggatgcccagaacatgggctacttcaccctgcaggagtggctgaagggcatgaccagcctgcagtgtgacaccacagagaagctgaggaacaccctggactacctgcgctccttcctgaatgacagcaccaacttcaagctgatctaccgctatgcctttgattttgcccgggagaaggaccagaggagcctggacatcaacacagccaagtgcatgctgggcctgctgctgggcaagatctggcccctcttccctgtgttccaccagttcctggagcagagcaagtacaaggtgatcaacaaggaccagtggtgcaatgtgctggagttcagcaggaccatcaacctggacctgagcaactatgatgaagatggagcctggcctgtgctgctggatgaatttgtggagtggtacaaggacaagcagatgtcctag

SEQ ID NO: 149278 - DNA, 699 bp, synthetic construct
  misc_feature 1..699: note = Description of Artificial Sequence: Synthetic coding sequence
  source 1..699: mol_type = other DNA
atgccacccaggaagaagagaagacctgccagcggagatgacctgagcgccaagaagagcagacatgacagcatgtacagaaaatatgacagcacccgcatcaagacagaggaggaggccttcagcagcaagcgctgcctggagtggttctatgaatatgccggcacagatgatgtggtgggccctgagggcatggagaagttctgtgaggacatcggcgtggagccagaaaatgtggtgatgctggtgctggcctggaagctggatgcccagaacatgggctacttcaccctgcaggagtggctgaagggcatgaccagcctgcagtgtgacaccacagagaagctgaggaacaccctggactacctgcgctccttcctgaatgacagcaccaacttcaagctgatctaccgctatgcctttgattttgcccgggagaaggaccagaggagcctggacatcaacacagccaagtgcatgctgggcctgctgctgggcaagatctggcccctcttccctgtgttccaccagttcctggagcagagcaagtacaaggtgatcaacaaggaccagtggtgcaatgtgctggagttcagcaggaccatcaacctggacctgagcaactatgatgaagatggagcctggcctgtgctgctggatgaatttgtggagtggtacaaggacaagcagatgtcctag

SEQ ID NO: 149279 - DNA, 774 bp, synthetic construct
  misc_feature 1..774: note = Description of Artificial Sequence: Synthetic coding sequence
  source 1..774: mol_type = other DNA
atgcacagtgatgctgctgctgtgaacttccagctgaacagccacctgagcaccctggccaacatccacaagatctaccacaccctgaacaagctgaacctgacagaggacatcggccaggatgaccaccagacaggcagcctgcggagctgcagcagcagtgactgcttcaacaaggtgatgccacccaggaagaagagaagacctgccagcggagatgacctgagcgccaagaagagcagacatgacagcatgtacagaaaatatgacagcacccgcatcaagacagaggaggaggccttcagcagcaagcgctgcctggagtggttctatgaatatgccggcacagatgatgtggtgggccctgagggcatggagaagttctgtgaggacatcggcgtggagccagaaaatgtggtgatgctggtgctggcctggaagctggatgcccagaacatgggctacttcaccctgcaggagtggctgaagggcatgaccagcctgcagtgtgacaccacagagaagctgaggaacaccctggactacctgcgctccttcctgaatgacagcaccaacttcaagctgatctaccgctatgcctttgattttgcccggcagagcaagtacaaggtgatcaacaaggaccagtggtgcaatgtgctggagttcagcaggaccatcaacctggacctgagcaactatgatgaagatggagcctggcctgtgctgctggatgaatttgtggagtggtacaaggacaagcagatgtcctag

SEQ ID NO: 149280 - DNA, 1011 bp, synthetic construct
  misc_feature 1..1011: note = Description of Artificial Sequence: Synthetic coding sequence
  source 1..1011: mol_type = other DNA
atggaggtggaggccgccctgggctgcagcggccagggccggggctgcggcggcgtggccccagctggccggggccgggagcgggccagcgagcggggcaccagggtgcgcatcagcaagggcctgtctggagctgggggctctgtgaggaaggctgacttccagctgaacagccacctgagcaccctggccaacatccacaagatctaccacaccctgaacaagctgaacctgacagaggacatcggccaggatgaccaccagacaggcagcctgcggagctgcagcagcagtgactgcttcaacaaggtgatgccacccaggaagaagagaagacctgccagcggagatgacctgagcgccaagaagagcagacatgacagcatgtacagaaaatatgacagcacccgcatcaagacagaggaggaggccttcagcagcaagcgctgcctggagtggttctatgaatatgccggcacagatgatgtggtgggccctgagggcatggagaagttctgtgaggacatcggcgtggagccagaaaatgtggtgatgctggtgctggcctggaagctggatgcccagaacatgggctacttcaccctgcaggagtggctgaagggcatgaccagcctgcagtgtgacaccacagagaagctgaggaacaccctggactacctgcgctccttcctgaatgacagcaccaacttcaagctgatctaccgctatgcctttgattttgcccgggagaaggaccagaggagcctggacatcaacacagccaagtgcatgctgggcctgctgctgggcaagatctggcccctcttccctgtgttccaccagttcctggagcagagcaagtacaaggtgatcaacaaggaccagtggtgcaatgtgctggagttcagcaggaccatcaacctggacctgagcaactatgatgaagatggagcctggcctgtgctgctggatgaatttgtggagtggtacaaggacaagcagatgtcctag

SEQ ID NO: 149281 - DNA, 1854 bp, synthetic construct
  misc_feature 1..1854: note = Description of Artificial Sequence: Synthetic coding sequence
  source 1..1854: mol_type = other DNA
atggctgctgtggccgccggcggcctggtgggcaagggccgggacatcagcctggccgccctgcagagacatgacccctacatcaacagaattgtggatgtggccagccaggtggccctgtacaccttcggccaccgggccaatgagtgggagaagacagatgtggagggcaccctgtttgtgtacaccaggtctgccagccccaagcacggcttcaccatcatgaaccggctgtccatggagaacagaacagagcccatcaccaaggacctggacttccagctgcaggaccccttcctgctgtacagaaatgcccggctgagcatctacggcatctggttctatgacaaggaggagtgccagagaattgctgagctgatgaagaacctgacccagtatgagcagctgaaggcccaccagggcaccggggccggcatcagccctgtgatcctgaacagcggggagggcaaggaggtggacatcctgaggatgctgatcaaggccaaggatgagtacaccaagtgcaagacctgcagcgagcccaagaagatcaccagcagcagcgccatctatgacaaccccaacctgatcaagcccatccctgtgaagcccagcgagaaccagcagcagaggatcccccagcccaaccagaccctggaccctgagccccagcacctgagcctgacagccctgtttgggaagcaggacaaggccacctgccaggagaccgtggagcccccccagaccctgcaccagcagcagcagcagcagcagcagcagcaggagaagctgcccatccggcagggcgtggtgcgcagcctgtcctatgaggagccccggcggcacagcccccccatcgagaagcagctgtgcccagccatccagaagctgatggtgcgctctgctgacctgcaccccctgtctgagctgcctgagaaccggccctgtgaaaatggcagcacccacagcgctggggagttcttcaccggccctgtgcagcccggcagcccccacaacatcggcaccagcagaggagtgcagaatgccagcaggacccagaacctgtttgagaagctgcagagcaccccaggagctgccaacaagtgtgaccccagcaccccagccccagccagcagcgctgccctgaacagaagccgggcccccacctctgtgacccctgtggcccctgggaagggcctggcccagcccccccaggcctacttcaacggcagcctgcccccccagacagtgggccaccaggcccacggccgggagcagagcaccctgccccggcagaccctgcccatcagcggcagccagacaggcagcagcggggtcatcagcccccaggagctgctgaagaagctgcagatcgtgcagcaggagcagcagctgcacgccagcaacagacctgccctggccgccaagtttcctgtgctggcccagagcagcggcaccgggaagcccctggagagctggatcaacaagacccccaacacagagcagcagacccccctcttccaggtgatcagcccccagaggatcccagccacagctgcccccagcctgctgatgagccccatggtgtttgcccagcccacctctgtgccccccaaggagcgggagagcggcctgctgcctgtgggcggccaggagcccccagctgctgccaccagcctgctgctgcccatccagagccctgagcccagcgtcatcaccagcagccccctgaccaagctgcagctgcaggaggccctgctgtacctgatccagaatgatgacaacttcctgaacatcatctatgaggcctacctgttctccatgacccaggccgccatgaagaagaccatgtag

SEQ ID NO: 149282 - DNA, 1548 bp, synthetic construct
  misc_feature 1..1548: note = Description of Artificial Sequence: Synthetic coding sequence
  source 1..1548: mol_type = other DNA
atgcagatcaaggtgtccatctacggcatctggttctatgacaaggaggagtgccagagaattgctgagctgatgaagaacctgacccagtatgagcagctgaaggcccaccagggcaccggggccggcatcagccctgtgatcctgaacagcggggagggcaaggaggtggacatcctgaggatgctgatcaaggccaaggatgagtacaccaagtgcaagacctgcagcgagcccaagaagatcaccagcagcagcgccatctatgacaaccccaacctgatcaagcccatccctgtgaagcccagcgagaaccagcagcagaggatcccccagcccaaccagaccctggaccctgagccccagcacctgagcctgacagccctgtttgggaagcaggacaaggccacctgccaggagaccgtggagcccccccagaccctgcaccagcagcagcagcagcagcagcagcagcaggagaagctgcccatccggcagggcgtggtgcgcagcctgtcctatgaggagccccggcggcacagcccccccatcgagaagcagctgtgcccagccatccagaagctgatggtgcgctctgctgacctgcaccccctgtctgagctgcctgagaaccggccctgtgaaaatggcagcacccacagcgctggggagttcttcaccggccctgtgcagcccggcagcccccacaacatcggcaccagcagaggagtgcagaatgccagcaggacccagaacctgtttgagaagctgcagagcaccccaggagctgccaacaagtgtgaccccagcaccccagccccagccagcagcgctgccctgaacagaagccgggcccccacctctgtgacccctgtggcccctgggaagggcctggcccagcccccccaggcctacttcaacggcagcctgcccccccagacagtgggccaccaggcccacggccgggagcagagcaccctgccccggcagaccctgcccatcagcggcagccagacaggcagcagcggggtcatcagcccccaggagctgctgaagaagctgcagatcgtgcagcaggagcagcagctgcacgccagcaacagacctgccctggccgccaagtttcctgtgctggcccagagcagcggcaccgggaagcccctggagagctggatcaacaagacccccaacacagagcagcagacccccctcttccaggtgatcagcccccagaggatcccagccacagctgcccccagcctgctgatgagccccatggtgtttgcccagcccacctctgtgccccccaaggagcgggagagcggcctgctgcctgtgggcggccaggagcccccagctgctgccaccagcctgctgctgcccatccagagccctgagcccagcgtcatcaccagcagccccctgaccaagctgcagctgcaggaggccctgctgtacctgatccagaatgatgacaacttcctgaacatcatctatgaggcctacctgttctccatgacccaggccgccatgaagaagaccatgtag

SEQ ID NO: 149283 - DNA, 1263 bp, synthetic construct
  misc_feature 1..1263: note = Description of Artificial Sequence: Synthetic coding sequence
  source 1..1263: mol_type = other DNA
atggagaccaagagggtggagatccctggctctgtgctggatgacttctgcagccgcttcatcctgcacatccccagcgaggagcgggacaatgccatccgggtgtgcttccagatcgagctggcccactggttctacctggacttctacatgcagaacaccccaggcctgccccagtgtggcatccgggactttgccaaggctgtgttcagccactgccccttcctgctgccccagggagaagatgtggagaaggtgctggatgagtggaaggagtacaagatgggcgtgcccacctacggggccatcatcctggatgagaccctggagaatgtgctgctggtgcagggctacctggccaagagcggctggggcttccccaagggcaaggtgaacaaggaggaggcccctcatgactgtgccgcccgggaggtgtttgaggagactggatttgacatcaaggactacatctgcaaggatgactacatcgagctgcgcatcaatgaccagctggcccggctgtacatcatccctggcatccccaaggacaccaagttcaaccccaagacccggcgggagatcagaaatattgagtggttcagcattgagaagctgccctgccacagaaatgacatgacccccaagagcaagctgggcctggcccccaacaagttcttcatggccatccccttcatccggcccctgcgggactggctgagcagaagatttggagacagcagtgacagcgacaatggcttcagcagcacaggcagcaccccagccaagcccaccgtggagaagctgagcaggaccaagttccgccacagccagcagctgttcccagatggcagccctggggaccagtgggtgaagcaccggcagcccctgcagcagaagccctacaacaaccacagcgagatgtctgacctgctgaagggcaagaaccagagcatgagaggaaatggaaggaagcagtaccaggacagccccaaccagaagaagaggaccaacggcctgcagcctgccaagcagcagaacagcctgatgaagtgtgagaagaagctgcaccccaggaagctgcaggacaactttgaaacagatgctgtgtatgacctgcccagcagcagcgaggaccagctgctggagcacgccgagggccagcctgtggcctgcaatggccactgcaagttccccttcagcagccgggccttcctgtccttcaagtttgaccacaatgccatcatgaagatcctggacctgtag

SEQ ID NO: 149284 - DNA, 1158 bp, synthetic construct
  misc_feature 1..1158: note = Description of Artificial Sequence: Synthetic coding sequence
  source 1..1158: mol_type = other DNA
atggagaccaagagggtggagatccctggctctgtgctggatgacttctgcagccgcttcatcctgcacatccccagcgaggagcgggacaatgccatccgggtgtgcttccagatcgagctggcccactggttctacctggacttctacatgcagaacaccccaggcctgccccagtgtggcatccgggactttgccaaggctgtgttcagccactgccccttcctgctgccccagggagaagatgtggagaaggtgctggatgagtggaaggagtacaagatgggcgtgcccacctacggggccatcatcctggatgagaccctggagaatgtgctgctggtgcagggctacctggccaagagcggctggggcttccccaagggcaaggtgaacaaggaggaggcccctcatgactgtgccgcccgggaggtgtttgaggagactggatttgacatcaaggactacatctgcaaggatgactacatcgagctgcgcatcaatgaccagctggcccggctgtacatcatccctggcatccccaaggacaccaagttcaaccccaagacccggcgggagatcagaaatattgagtggttcagcattgagaagctgccctgccacagaaatgacatgacccccaagagcaagctgggcctggcccccaacaagttcttcatggccatccccttcatccggcccctgcgggactggctgagcagaagatttggagacagcagtgacagcgacaatggcttcagcagcacaggcagcaccccagccaagcccaccgtggagaagctgagcaggaccaagttccgccacagccagcagctgttcccagatggcagccctggggaccagtgggtgaagcaccggcagcccctgcagcagaagccctacaacaaccacagcgagatgtctgacctgctgaagggcaagaagtgtgagaagaagctgcaccccaggaagctgcaggacaactttgaaacagatgctgtgtatgacctgcccagcagcagcgaggaccagctgctggagcacgccgagggccagcctgtggcctgcaatggccactgcaagttccccttcagcagccgggccttcctgtccttcaagtttgaccacaatgccatcatgaagatcctggacctgtag

SEQ ID NO: 149285 - DNA, 630 bp, synthetic construct
  misc_feature 1..630: note = Description of Artificial Sequence: Synthetic coding sequence
  source 1..630: mol_type = other DNA
atgacccccaagagcaagctgggcctggcccccaacaagttcttcatggccatccccttcatccggcccctgcgggactggctgagccgccgctttggagacagcagtgacagcgacaatggcttcagcagcacaggcagcaccccagccaagcccaccgtggagaagctgagcaggaccaagttccgccacagccagcagctgttcccagatggcagccctggggaccagtgggtgaagcaccggcagcccctgcagcagaagccctacaacaaccacagcgagatgtctgacctgctgaagggcaagaaccagagcatgagaggaaatggaaggaagcagtaccaggacagccccaaccagaagaagaggaccaacggcctgcagcctgccaagcagcagaacagcctgatgaagtgtgagaagaagctgcaccccaggaagctgcaggacaactttgaaacagatgctgtgtatgacctgcccagcagcagcgaggaccagctgctggagcacgccgagggccagcctgtggcctgcaatggccactgcaagttccccttcagcagccgggccttcctgtccttcaagtttgaccacaatgccatcatgaagatcctggacctgtag

SEQ ID NO: 149286 - DNA, 1341 bp, synthetic construct
  misc_feature 1..1341: note = Description of Artificial Sequence: Synthetic coding sequence
  source 1..1341: mol_type = other DNA
atgacagagctgggcatggtggtgctgggcatcgacaccacccacctgtggatgctgcccctgaccccaggctcctggaacagcatgaggagccgccacaagtggaactggccccagggctcctggggcctgggcggccccccaagaagcacagccttcctggagtgctgcaccagcttcctgcccaatgacctgggcttcacagacagctacagccagaaggccttctgtggcatctacagcaaggatggccagatcttcatgtctgcctgccaggaccagaccatccggctgtatgactgccgctatggccgcttcaggaagttcaagagcatcaaggccagagatgtgggctggagcgtgctggatgtggccttcaccccagatggcaaccacttcctgtacagctcctggagcgactacatccacatctgcaacatctacggggagggggacacccacacagccctggacctgcggccagatgagaggagatttgctgtgttcagcattgctgtgtccagtgatggccgggaggtgctgggcggggccaatgatggctgcctgtatgtgtttgaccgggagcagaacagaaggaccctgcagatcgagagccatgaagatgatgtgaatgctgtggcctttgctgacatcagcagccagatcctcttctctggaggagatgatgccatctgcaaggtgtgggacaggaggaccatgagagaagatgaccccaagcctgtgggcgccctggccggccaccaggacggcatcaccttcatcgacagcaaaggagatgcccgctacctgatcagcaacagcaaggaccagaccatcaagctgtgggacatccgccgcttcagcagccgggagggcatggaggccagccggcaggccgccacccagcagaactgggactaccgctggcagcaggtgcccaagaaggcctggaggaagctgaagctgcccggggacagcagcctgatgacctaccggggccacggcgtgctgcacaccctcatccgctgccgcttcagccccatccacagcacaggccagcagttcatctacagcggctgcagcacaggcaaggtggtggtgtatgacctgctgagcggccacatcgtgaagaagctgaccaaccacaaggcctgtgtgagagatgtgtcctggcacccctttgaggagaagatcgtgagcagctcctgggatggcaacctgcggctgtggcagtaccggcaggccgagtacttccaggatgacatgcctgagagtgaagaatgtgccagcgccccagcccctgtgccccagagcagcacccccttcagcagcccccagtag

SEQ ID NO: 149287 - DNA, 1563 bp, synthetic construct
  misc_feature 1..1563: note = Description of Artificial Sequence: Synthetic coding sequence
  source 1..1563: mol_type = other DNA
atgggcagcaggaacagcagcagcgctggcagcggcagcggggaccccagcgagggcctgcccaggagaggagctggcctgcggcgctctgaggaggaggaggaggaggatgaagatgtggacctggcccaggccctgctggacagcgaggaggagaatgaccgggcctgggatggccgcctgggggaccgctacaacccccctgtggatgccaccccagacacccgggagctggagttcaatgagatcaagacccaggtggagctggccaccggccagctgggcctgcggcgggccgcccagaagcacagcttccccaggatgctgcaccagcgggagcggggcctgtgccaccggggcagcttcagcctgggggagcagagcagggtcatcagccacttcctgcccaatgacctgggcttcacagacagctacagccagaaggccttctgtggcatctacagcaaggatggccagatcttcatgtctgcctgccaggaccagaccatccggctgtatgactgccgctatggccgcttcaggaagttcaagagcatcaaggccagagatgtgggctggagcgtgctggatgtggccttcaccccagatggcaaccacttcctgtacagctcctggagcgactacatccacatctgcaacatctacggggagggggacacccacacagccctggacctgcggccagatgagaggagatttgctgtgttcagcattgctgtgtccagtgatggccgggaggtgctgggcggggccaatgatggctgcctgtatgtgtttgaccgggagcagaacagaaggaccctgcagatcgagagccatgaagatgatgtgaatgctgtggcctttgctgacatcagcagccagatcctcttctctggaggagatgatgccatctgcaaggtgtgggacaggaggaccatgagagaagatgaccccaagcctgtgggcgccctggccggccaccaggacggcatcaccttcatcgacagcaaaggagatgcccgctacctgatcagcaacagcaaggaccagaccatcaagctgtgggacatccgccgcttcagcagccgggagggcatggaggccagccggcaggccgccacccagcagaactgggactaccgctggcagcaggtgcccaagaaggcctggaggaagctgaagctgcccggggacagcagcctgatgacctaccggggccacggcgtgctgcacaccctcatccgctgccgcttcagccccatccacagcacaggccagcagttcatctacagcggctgcagcacaggcaaggtggtggtgtatgacctgctgagcggccacatcgtgaagaagctgaccaaccacaaggcctgtgtgagagatgtgtcctggcacccctttgaggagaagatcgtgagcagctcctgggatggcaacctgcggctgtggcagtaccggcaggccgagtacttccaggatgacatgcctgagagtgaagaatgtgccagcgccccagcccctgtgccccagagcagcacccccttcagcagcccccagtag

SEQ ID NO: 149288 - DNA, 1641 bp, synthetic construct
  misc_feature 1..1641: note = Description of Artificial Sequence: Synthetic coding sequence
  source 1..1641: mol_type = other DNA
atgggcagcaggaacagcagcagcgctggcagcggcagcggggaccccagcgagggcctgcccaggagaggagctggcctgcggcgctctgaggaggaggaggaggaggatgaagatgtggacctggcccaggtgctggcctacctgctgcggcggggccaggtgcggctggtgcagggcggcggggccgccaacctgcagttcatccaggccctgctggacagcgaggaggagaatgaccgggcctgggatggccgcctgggggaccgctacaacccccctgtggatgccaccccagacacccgggagctggagttcaatgagatcaagacccaggtggagctggccaccggccagctgggcctgcggcgggccgcccagaagcacagcttccccaggatgctgcaccagcgggagcggggcctgtgccaccggggcagcttcagcctgggggagcagagcagggtcatcagccacttcctgcccaatgacctgggcttcacagacagctacagccagaaggccttctgtggcatctacagcaaggatggccagatcttcatgtctgcctgccaggaccagaccatccggctgtatgactgccgctatggccgcttcaggaagttcaagagcatcaaggccagagatgtgggctggagcgtgctggatgtggccttcaccccagatggcaaccacttcctgtacagctcctggagcgactacatccacatctgcaacatctacggggagggggacacccacacagccctggacctgcggccagatgagaggagatttgctgtgttcagcattgctgtgtccagtgatggccgggaggtgctgggcggggccaatgatggctgcctgtatgtgtttgaccgggagcagaacagaaggaccctgcagatcgagagccatgaagatgatgtgaatgctgtggcctttgctgacatcagcagccagatcctcttctctggaggagatgatgccatctgcaaggtgtgggacaggaggaccatgagagaagatgaccccaagcctgtgggcgccctggccggccaccaggacggcatcaccttcatcgacagcaaaggagatgcccgctacctgatcagcaacagcaaggaccagaccatcaagctgtgggacatccgccgcttcagcagccgggagggcatggaggccagccggcaggccgccacccagcagaactgggactaccgctggcagcaggtgcccaagaaggcctggaggaagctgaagctgcccggggacagcagcctgatgacctaccggggccacggcgtgctgcacaccctcatccgctgccgcttcagccccatccacagcacaggccagcagttcatctacagcggctgcagcacaggcaaggtggtggtgtatgacctgctgagcggccacatcgtgaagaagctgaccaaccacaaggcctgtgtgagagatgtgtcctggcacccctttgaggagaagatcgtgagcagctcctgggatggcaacctgcggctgtggcagtaccggcaggccgagtacttccaggatgacatgcctgagagtgaagaatgtgccagcgccccagcccctgtgccccagagcagcacccccttcagcagcccccagtag

SEQ ID NO: 149289 - DNA, 369 bp, synthetic construct
  misc_feature 1..369: note = Description of Artificial Sequence: Synthetic coding sequence
  source 1..369: mol_type = other DNA
atgggcagcaggaacagcagcagcgctggcagcggcagcggggaccccagcgagggcctgcccaggagaggagctggcctgcggcgctctgaggaggaggaggaggaggatgaagatgtggacctggcccaggtgctggcctacctgctgcggcggggccaggtgcggctggtgcagggcggcggggccgccaacctgcagttcatccaggccctgctggacagcgaggaggagaatgaccgggcctgggatggccgcctgggggaccgctacaacccccctgtggatgccaccccagacacccgggagctggagttcaatgagatcaagacccaggtggagctggccaccggccagctgggcctgtag

SEQ ID NO: 149290 - DNA, 222 bp, synthetic construct
  misc_feature 1..222: note = Description of Artificial Sequence: Synthetic coding sequence
  source 1..222: mol_type = other DNA
atgggcagcaggaacagcagcagcgctggcagcggcagcggggaccccagcgagggcctgcccaggagaggagctggcctgcggcgctctgaggaggaggaggaggaggatgaagatgtggacctggcccaggtgctggcctacctgctgcggcggggccaggtgcggctggtgcagggcggcggggccgccaacctgcagttcatccaggccctgctgtag

SEQ ID NO: 149291 - DNA, 282 bp, synthetic construct
  misc_feature 1..282: note = Description of Artificial Sequence: Synthetic coding sequence
  source 1..282: mol_type = other DNA
atgggcagcaggaacagcagcagcgctggcagcggcagcggggaccccagcgagggcctgcccaggagaggagctggcctgcggcgctctgaggaggaggaggaggaggatgaagatgtggacctggcccaggtgctggcctacctgctgcggcggggccaggtgcggctggtgcagggcggcggggccgccaacctgcagttcatccaggccctgctggacagcgaggaggagaatgaccgggcctgggatggccgcctgggggaccgctacaacccctag

SEQ ID NO: 149292 - DNA, 327 bp, synthetic construct
  misc_feature 1..327: note = Description of Artificial Sequence: Synthetic coding sequence
  source 1..327: mol_type = other DNA
atgggcagcaggaacagcagcagcgctggcagcggcagcggggaccccagcgagggcctgcccaggagaggagctggcctgcggcgctctgaggaggaggaggaggaggatgaagatgtggacctggcccaggtgctggcctacctgctgcggcggggccaggtgcggctggtgcagggcggcggggccgccaacctgcagttcatccaggccctgctggacagcgaggaggagaatgaccgggcctgggatggccgcctgggggaccgctacaacccccctgtggatgccaccccagacacccgggagctggagttcaatgaatag

SEQ ID NO: 149293 - DNA, 1641 bp, synthetic construct; identical to SEQ ID NO: 149288
  misc_feature 1..1641: note = Description of Artificial Sequence: Synthetic coding sequence
  source 1..1641: mol_type = other DNA

SEQ ID NO: 149294 - DNA, 273 bp, synthetic construct
  misc_feature 1..273: note = Description of Artificial Sequence: Synthetic coding sequence
  source 1..273: mol_type = other DNA
atgggcagcaggaacagcagcagcgctggcagcggcagcggggaccccagcgagggcctgcccaggagaggagctggcctgcggcgctctgaggaggaggaggaggaggatgaagatgtggacctggcccaggccctgctggacagcgaggaggagaatgaccgggcctgggatggccgcctgggggaccgctacaacccccctgtggatgccaccccagacacccgggagctggagttcaatgagatcaagacccaggtggagctggcctag

SEQ ID NO: 149295 - DNA, 93 bp, synthetic construct
  misc_feature 1..93: note = Description of Artificial Sequence: Synthetic coding sequence
  source 1..93: mol_type = other DNA
atgggcagcaggaacagcagcagcgctggcagcggcagcggggaccccagcgagggcctgcccaggagaggagctggcctgcggcgctcctag

SEQ ID NO: 149296 - DNA, 429 bp, synthetic construct
  misc_feature 1..429: note = Description of Artificial Sequence: Synthetic coding sequence
  source 1..429: mol_type = other DNA
atgggcagcaggaacagcagcagcgctggcagcggcagcggggaccccagcgagggcctgcccaggagaggagctggcctgcggcgctctgaggaggaggaggaggaggatgaagatgtggacctggcccaggtgctggcctacctgctgcggcggggccaggtgcggctggtgcagggcggcggggccgccaacctgcagttcatccaggccctgctggacagcgaggaggagaatgaccgggcctgggatggccgcctgggggaccgctacaacccccctgtggatgccaccccagacacccgggagctggagttcaatgagatcaagacccaggtggagctggccaccggccagctgggcctgcggcgggccgcccagaagcacagcttccccaggatgctgcaccagcgggagcggggcctgtag

SEQ ID NO: 149297 - DNA, 204 bp, synthetic construct
  misc_feature 1..204: note = Description of Artificial Sequence: Synthetic coding sequence
  source 1..204: mol_type = other DNA
atgggcagcaggaacagcagcagcgctggcagcggcagcggggaccccagcgagggcctgcccaggagaggagctggcctgcggcgctctgaggaggaggaggaggaggatgaagatgtggacctggcccagaggccttctgaggtgggcgccggccgccgctgcagcaagttcaccatccacagcggccccctgggcctgtag

SEQ ID NO: 149298 - DNA, 321 bp, synthetic construct
  misc_feature 1..321: note = Description of Artificial Sequence: Synthetic coding sequence
  source 1..321: mol_type = other DNA
atgggcagcaggaacagcagcagcgctggcagcggcagcggggaccccagcgagggcctgcccaggagaggagctggcctgcggcgctctgaggaggaggaggaggaggatgaagatgtggacctggcccaggtgctggcctacctgctgcggcggcccagctggacccagaggaagaggatgacagagctgggcatggtggtgctgggcatcgacaccacccacctgtggatgctgcccctgaccccaggctcctggaacagcatgaggagccgccacaagtggaactggccccagggctcctggggcctgggcggctag

SEQ ID NO: 149299 - DNA, 387 bp, synthetic construct
  misc_feature 1..387: note = Description of Artificial Sequence: Synthetic coding sequence
  source 1..387: mol_type = other DNA
atgggcagcaggaacagcagcagcgctggcagcggcagcggggaccccagcgagggcctgcccaggagaggagctggcctgcggcgctctgaggaggaggaggaggaggatgaagatgtggacctggcccaggccctgctggacagcgaggaggagaatgaccgggcctgggatggccgcctgggggaccgctacaacccccctgtggatgccaccccagacacccgggagctggagttcaatgagatcaagacccaggtggagctggccaccggccagctgggcctgcggcgggccgcccagaagcacagcttccccaggatgctgcaccagcgggagcggggcctgtgccaccggggcagcttcagcctgggggagcagagctag

SEQ ID NO: 149300 - DNA, 465 bp, synthetic construct
  misc_feature 1..465: note = Description of Artificial Sequence: Synthetic coding sequence
  source 1..465: mol_type = other DNA
atgggcagcaggaacagcagcagcgctggcagcggcagcggggaccccagcgagggcctgcccaggagaggagctggcctgcggcgctctgaggaggaggaggaggaggatgaagatgtggacctggcccaggtgctggcctacctgctgcggcggggccaggtgcggctggtgcagggcggcggggccgccaacctgcagttcatccaggccctgctggacagcgaggaggagaatgaccgggcctgggatggccgcctgggggaccgctacaacccccctgtggatgccaccccagacacccgggagctggagttcaatgagatcaagacccaggtggagctggccaccggccagctgggcctgcggcgggccgcccagaagcacagcttccccaggatgctgcaccagcgggagcggggcctgtgccaccggggcagcttcagcctgggggagcagagctag

SEQ ID NO: 149301 - DNA, 2829 bp, synthetic construct
  misc_feature 1..2829: note = Description of Artificial Sequence: Synthetic coding sequence
  source 1..2829: mol_type = other DNA
atgaagagaagagctggcctgggcggctccatgaggtctgtggtgggcttcctgagccagaggggcctgcacggggaccccctgctgacccaggacttccagaggcggcggctgcggggctgcaggaacctgtacaagaaggacctgctgggccacttcggctgtgtgaatgccatcgagttcagcaacaacggcggccagtggctggtgtctggaggagatgaccggcgggtgctgctgtggcacatggagcaggccatccacagccgggtgaagcccatccagctgaagggggagcaccacagcaacatcttctgcctggccttcaacagcggcaacaccaaggtgttcagcggcggcaatgatgagcaggtgatcctgcatgatgtggagagcagcgagaccctggatgtgtttgcccatgaagatgctgtgtatggcctgtctgtgtcccctgtgaatgacaacatctttgccagcagcagtgatgatggccgggtgctgatctgggacatccgggagagcccccatggagagcccttctgcctggccaactaccccagcgccttccacagcgtgatgttcaaccctgtggagccccggctgctggccacagccaacagcaaggagggcgtgggcctgtgggacatcaggaagccccagagcagcctgctgcgctatggaggcaacctgagcctgcagagcgccatgtctgtgcgcttcaacagcaatggcacccagctgctggccctgcggcggcggctgccccctgtgctgtatgacatccacagccggctgcctgtgttccagtttgacaaccagggctacttcaacagctgcaccatgaagagctgctgctttgctggggaccgggaccagtacatcctgagcggcagtgatgacttcaacctgtacatgtggaggatcccagctgaccctgaggccggcggcatcggccgggtggtgaatggagccttcatggtgctgaagggccacaggagcatcgtgaaccaggtgcgcttcaacccccacacctacatgatctgcagcagtggagtggagaagatcatcaagatctggagcccctacaagcagcccggctgcacaggagacctggatggaagaattgaagatgacagccgctgcctgtacacccatgaggagtacatcagcctggtgctgaacagcggcagcggcctgagccatgactatgccaaccagagcgtgcaggaggaccccaggatgatggccttctttgacagcctggtgcggcgggagattgagggctggagcagtgacagcgacagcgacctgtctgagagcaccatcctgcagctgcacgccggcgtgtctgagaggagcggctacacagattctgagagcagcgccagcctgcccaggagccccccacccaccgtggatgagagcgctgacaatgccttccacctgggccccctgcgggtgaccaccaccaacacagtggccagcaccccacccacccccacctgtgaagatgctgccagccggcagcagaggctgagcgccctgcggcgctaccaggacaagaggctgctggccctgagcaatgaaagtgacagtgaagaaaatgtgtgtgaggtggagctggacacagacctcttcccccggcccaggagccccagcccagaagatgagagcagcagcagcagcagcagcagcagcagtgaagatgaggaggagctgaatgaaagaagagccagcacctggcagagaaatgccatgagaagacggcagaagaccacccgggaggacaagcccagcgcccccatcaagcccaccaacacctacatcggggaggacaactatgactacccccagatcaaggtggatgacctgagcagcagccccaccagcagccctgagaggagcaccagcaccctggagatccagcccagccgggccagccccaccagtgacattgaatctgtggagaggaagatctacaaggcctacaagtggctgcgctacagctacatctcctacagcaacaacaaggatggagagaccagcctggtgactggagaggctgatgagggccgggccggcaccagccacaaggacaacccagcccccagcagcagcaaggaggcctgcctgaacatcgccatggcccagaggaaccaggacctgcccccagagggctgcagcaaggacaccttcaaggaggagacccccaggacccccagcaatggacctggccacgagcacagcagccacgcctgggccgaggtgcctgagggcaccagccaggacaccggcaacagcggctctgtggagcacccctttgagaccaagaagctgaatggcaaggccctgagcagcagagctgaggagccccccagcccccctgtgcccaaggccagcggcagcaccctgaacagcggcagcggcaactgccccaggacccagagtgatgacagcgaggagaggagcctggagaccatctgtgccaaccacaacaacggccgcctgcaccccaggcctccccacccccacaacaacggccagaacctgggggagctggaggtggtggcctacagcagccctggccacagcgacacagaccgggacaacagcagcctgaccggcaccctgctgcacaaggactgctgcggcagcgagatggcctgtgagaccccaaatgccggcacccgggaggaccccacagacaccccagccacagacagcagcagagctgtgcacggccacagcggcctgaagaggcagagaattgagctggaggacacagattctgagaacagcagcagcgagaagaagctgaagacctag

SEQ ID NO: 149302 - DNA, 2583 bp, synthetic construct
  misc_feature 1..2583: note = Description of Artificial Sequence: Synthetic coding sequence
  source 1..2583: mol_type = other DNA
atggagcaggccatccacagccgggtgaagcccatccagctgaagggggagcaccacagcaacatcttctgcctggccttcaacagcggcaacaccaaggtgttcagcggcggcaatgatgagcaggtgatcctgcatgatgtggagagcagcgagaccctggatgtgtttgcccatgaagatgctgtgtatggcctgtctgtgtcccctgtgaatgacaacatctttgccagcagcagtgatgatggccgggtgctgatctgggacatccgggagagcccccatggagagcccttctgcctggccaactaccccagcgccttccacagcgtgatgttcaaccctgtggagccccggctgctggccacagccaacagcaaggagggcgtgggcctgtgggacatcaggaagccccagagcagcctgctgcgctatggaggcaacctgagcctgcagagcgccatgtctgtgcgcttcaacagcaatggcacccagctgctggccctgcggcggcggctgccccctgtgctgtatgacatccacagccggctgcctgtgttccagtttgacaaccagggctacttcaacagctgcaccatgaagagctgctgctttgctggggaccgggaccagtacatcctgagcggcagtgatgacttcaacctgtacatgtggaggatcccagctgaccctgaggccggcggcatcggccgggtggtgaatggagccttcatggtgctgaagggccacaggagcatcgtgaaccaggtgcgcttcaacccccacacctacatgatctgcagcagtggagtggagaagatcatcaagatctggagcccctacaagcagcccggctgcacaggagacctggatggaagaattgaagatgacagccgctgcctgtacacccatgaggagtacatcagcctggtgctgaacagcggcagcggcctgagccatgactatgccaaccagagcgtgcaggaggaccccaggatgatggccttctttgacagcctggtgcggcgggagattgagggctggagcagtgacagcgacagcgacctgtctgagagcaccatcctgcagctgcacgccggcgtgtctgagaggagcggctacacagattctgagagcagcgccagcctgcccaggagccccccacccaccgtggatgagagcgctgacaatgccttccacctgggccccctgcgggtgaccaccaccaacacagtggccagcaccccacccacccccacctgtgaagatgctgccagccggcagcagaggctgagcgccctgcggcgctaccaggacaagaggctgctggccctgagcaatgaaagtgacagtgaagaaaatgtgtgtgaggtggagctggacacagacctcttcccccggcccaggagccccagcccagaagatgagagcagcagcagcagcagcagcagcagcagtgaagatgaggaggagctgaatgaaagaagagccagcacctggcagagaaatgccatgagaagacggcagaagaccacccgggaggacaagcccagcgcccccatcaagcccaccaacacctacatcggggaggacaactatgactacccccagatcaaggtggatgacctgagcagcagccccaccagcagccctgagaggagcaccagcaccctggagatccagcccagccgggccagccccaccagtgacattgaatctgtggagaggaagatctacaaggcctacaagtggctgcgctacagctacatctcctacagcaacaacaaggatggagagaccagcctggtgactggagaggctgatgagggccgggccggcaccagccacaaggacaacccagcccccagcagcagcaaggaggcctgcctgaacatcgccatggcccagaggaaccaggacctgcccccagagggctgcagcaaggacaccttcaaggaggagacccccaggacccccagcaatggacctggccacgagcacagcagccacgcctgggccgaggtgcctgagggcaccagccaggacaccggcaacagcggctctgtggagcacccctttgagaccaagaagctgaatggcaaggccctgagcagcagagctgaggagccccccagcccccctgtgcccaaggccagcggcagcaccctgaacagcggcagcggcaactgccccaggacccagagtgatgacagcgaggagaggagcctggagaccatctgtgccaaccacaacaacggccgcctgcaccccaggcctccccacccccacaacaacggccagaacctgggggagctggaggtggtggcctacagcagccctggccacagcgacacagaccgggacaacagcagcctgaccggcaccctgctgcacaaggactgctgcggcagcgagatggcctgtgagaccccaaatgccggcacccgggaggaccccacagacaccccagccacagacagcagcagagctgtgcacggccacagcggcctgaagaggcagagaattgagctggaggacacagattctgagaacagcagcagcgagaagaagctgaagacctag

SEQ ID NO: 149303 - DNA, 633 bp, synthetic construct
  misc_feature 1..633: note = Description of Artificial Sequence: Synthetic coding sequence
  source 1..633: mol_type = other DNA
atggagcaggccatccacagccgggtgaagcccatccagctgaagggggagcaccacagcaacatcttctgcctggccttcaacagcggcaacaccaaggtgttcagcggcggcaatgatgagcaggtgatcctgcatgatgtggagagcgagaccctggatgtgtttgcccatgaagatgctgtgtatggcctgtctgtgtcccctgtgaatgacaacatctttgccagcagcagtgatgatggccgggtgctgatctgggacatccgggagagcccccacggggagcccttctgcctggccaactaccccagcgccttccacagcgtgatgttcaaccctgtggagccccggctgctggccacagccaacagcaaggagggcgtgggcctgtgggacatcaggaagccccagagcagcctgctgcgctatggaggcaacctgagcctgcagagcgccatgtctgtgcgcttcaacagcaatggcacccagctgctggccctgcggcggcggctgccccctgtgctgtatgacatccacagccggctgcccgtcttccagtttgacaaccagggctacttcaacagctgcaccatgaagagctgctgctttgctggggaccgggaccagtag

SEQ ID NO: 149304 - DNA, 2583 bp, synthetic construct; identical to SEQ ID NO: 149302
  misc_feature 1..2583: note = Description of Artificial Sequence: Synthetic coding sequence
  source 1..2583: mol_type = other DNA

SEQ ID NO: 149305 - DNA, 357 bp, synthetic construct
  misc_feature 1..357: note = Description of Artificial Sequence: Synthetic coding sequence
  source 1..357: mol_type = other DNA
atgcccttcctggagctggacaccaacctgcctgccaacagagtgcctgctggcctggagaagaggctgtgtgccgctgctgccagcatcctgggcaagccagctgacagagtgaatgtgacagtgcggcccggcctggccatggccctgagcggcagcacagagccctgtgcccagctgagcatcagcagcattggagtggtgggcacagctgaggacaacagaagccacagcgcccacttctttgagttcctgaccaaggagctggccctgggccaggaccgcatcctgatccgcttcttccccctggagagctggcagatcggcaagattggaacagtgatgaccttcctgtag

SEQ ID NO: 149306 - DNA, 357 bp, synthetic construct; identical to SEQ ID NO: 149305
  misc_feature 1..357: note = Description of Artificial Sequence: Synthetic coding sequence
  source 1..357: mol_type = other DNA

SEQ ID NO: 149307 - DNA, 399 bp, synthetic construct
  misc_feature 1..399: note = Description of Artificial Sequence: Synthetic coding sequence
  source 1..399: mol_type = other DNA
atgcagctgttcctgctggccgtgtctgtgcccctgcctgccatgcccttcctggagctggacaccaacctgcctgccaacagagtgcctgctggcctggagaagaggctgtgtgccgctgctgccagcatcctgggcaagccagctgacagagtgaatgtgacagtgcggcccggcctggccatggccctgagcggcagcacagagccctgtgcccagctgagcatcagcagcattggagtggtgggcacagctgaggacaacagaagccacagcgcccacttctttgagttcctgaccaaggagctggccctgggccaggaccgcatcctgatccgcttcttccccctggagagctggcagatcggcaagattggaacagtgatgaccttcctgtag

SEQ ID NO: 149308 - DNA, 348 bp, synthetic construct
  misc_feature 1..348: note = Description of Artificial Sequence: Synthetic coding sequence
  source 1..348: mol_type = other DNA
atgcccatgtttattgtgaacaccaacgtgccccgggcctctgtgcctgatggcttcctgtctgagctgacccagcagctggcccaggccaccgggaagccaccccagtacatcgctgtgcacgtggtgcctgaccagctgatggccttcggcggcagcagcgagccctgtgccctgtgcagcctgcacagcatcggcaagattggaggagcccagaacagaagctacagcaagctgctgtgtggcctgctggccgagcggctgcgcatcagcccagacagagtgtacatcaactactatgacatgaatgctgccaacgtgggctggaacaacagcacctttgcctag

SEQ ID NO: 149309 - DNA, 1224 bp, synthetic construct
  misc_feature 1..1224: note = Description of Artificial Sequence: Synthetic coding sequence
  source 1..1224: mol_type = other DNA
atgaacaacagcggggctgatgaaattggcaagctgtttgtgggcggcctggactggagcaccacccaggagaccctgcggagctacttcagccagtatggagaggtggtggactgtgtgatcatgaaggacaagaccaccaaccagagccggggctttggatttgtgaagttcaaggaccccaactgtgtgggcaccgtgctggccagccggccccacaccctggatggcaggaacatcgaccccaagccctgcaccccccggggcatgcagcctgagaggacccggcccaaggagggctggcagaagggccccaggagtgacaacagcaagagcaacaagatctttgtgggcggcatcccccacaactgtggggagacagagctgcgggagtacttcaagaagtttggagtggtgacagaggtggtgatgatctatgatgctgagaagcagaggccccggggcttcggcttcatcacctttgaagatgagcagagcgtggaccaggccgtgaacatgcacttccatgacatcatgggcaagaaggtggaggtgaagagagctgagccccgggacagcaagagccaggcccctggccagcccggggccagccagtggggcagccgggtggtgcccaatgctgccaacggctgggccggccagcccccacccacctggcagcagggctacggcccccagggcatgtgggtgcctgctggccaggccatcggcggctacggccccccacctgctggccgcggggcccctcctcctcctccacccttcaccagctacatcgtgtccaccccacctgggggcttccccccaccccagggcttcccccagggctacggggccccaccccagttctcctttggctacggccccccacctcctcctccagaccagtttgcccctcctggggtgcccccacctccagccacccctggggccgcccccctggccttccccccaccacccagccaggccgccccagacatgagcaagcccccaacagcccagcctgacttcccctacggccagtatgccggctacggccaggacctgagcggcttcggccagggcttcagtgaccccagccagcagccccccagctatggaggccccagcgtgcccggcagcggcggccccccagctgggggcagcggcttcggccggggccagaaccacaacgtgcagggcttccacccctacagaagatag

SEQ ID NO: 149310 - DNA, 2223 bp, synthetic construct
  misc_feature 1..2223: note = Description of Artificial Sequence: Synthetic coding sequence
  source 1..2223: mol_type = other DNA
atggccgccttcagcgagatgggcgtgatgcctgagatcgcccaggccgtggaggagatggactggctgctgcccacagacatccaggccgagagcatccccctcatcctgggcggcggagatgtgctgatggctgctgagaccggcagcggcaagacaggagccttcagcatccctgtgatccagatcgtgtatgagaccctgaaggaccagcaggagggcaagaagggcaagaccaccatcaagacaggagcctctgtgctgaacaagtggcagatgaacccctatgaccggggcagcgcctttgccatcggcagtgatggcctgtgctgccagagccgggaggtgaaggagtggcacggctgccgggccaccaagggcctgatgaagggcaagcactactatgaggtgtcctgccacgaccagggcctgtgccgggtgggctggagcaccatgcaggccagcctggacctgggcacagacaagtttggatttggatttggaggcaccgggaagaagagccacaacaagcagtttgacaactacggggaggagttcaccatgcatgacaccatcggctgctacctggacatcgacaagggccacgtgaagttcagcaagaatggcaaggacctgggcctggcctttgagatccccccccacatgaagaaccaggccctcttccctgcctgtgtgctgaagaatgctgagctgaagttcaactttggagaggaggagttcaagttcccccccaaggatggctttgtggccctgagcaaggccccagatggctacatcgtgaagagccagcacagcggaaatgcccaggtgacccagaccaagttcctgcccaatgcccccaaggccctgattgtggagcccagccgggagctggccgagcagaccctgaacaacatcaagcagttcaagaagtacatcgacaaccccaagctgcgggagctgctgatcatcggcggcgtggccgcccgggaccagctgtctgtgctggagaatggagtggacatcgtggtgggcaccccaggccgcctggatgacctggtgtccacaggcaagctgaacctgagccaggtgcgcttcctggtgctggatgaagcagatggcctgctgagccagggctacagcgacttcatcaacaggatgcacaaccagatcccccaggtgaccagtgatggcaagaggctgcaggtgattgtgtgcagcgccaccctgcacagctttgatgtgaagaagctgtctgagaagatcatgcacttccccacctgggtggacctgaagggggaggacagcgtgcctgacacagtgcaccacgtggtggtgcctgtgaaccccaagacagaccggctgtgggagcggctgggcaagagccacatcagaacagatgatgtgcacgccaaggacaacaccaggcctggggccaacagccctgagatgtggagcgaggccatcaagatcctgaagggggagtatgctgtgcgggccatcaaggagcacaagatggaccaggccatcatcttctgcaggaccaagattgactgtgacaacctggagcagtacttcatccagcagggcggcggccctgacaagaagggccaccagttcagctgtgtgtgcctgcacggggacaggaagccccatgagaggaagcagaacctggagcgcttcaagaagggagatgtgcgcttcctgatctgcacagatgtggccgcccggggcatcgacatccacggcgtgccctacgtgatcaacgtgaccctgcctgatgagaagcagaactacgtgcacagaattggccgggtgggccgggcagagaggatgggcctggccatcagcctggtggccacagagaaggagaaggtgtggtaccacgtgtgcagcagccggggcaagggctgctacaacacccggctgaaggaggatggcggctgcaccatctggtacaatgagatgcagctgctgtctgaaattgaggagcacctgaactgcaccatcagccaggtggagccagacatcaaggtgcctgtggatgaatttgatggcaaggtgacctacggccagaagagagctgctgggggcggcagctacaagggccacgtggacatcctggcccccaccgtgcaggagctggccgccctggagaaggaggcccagaccagcttcctgcacctgggctacctgcccaaccagctgttccgcaccttctag

SEQ ID NO: 149311 - DNA, 51 bp, synthetic construct
  misc_feature 1..51: note = Description of Artificial Sequence: Synthetic coding sequence
  source 1..51: mol_type = other DNA
atggccgccttcagcgagatgggcgtgatgcctgagatcgcccaggcctag

SEQ ID NO: 149312 - DNA, 1869 bp, synthetic construct
  misc_feature 1..1869: note = Description of Artificial Sequence: Synthetic coding sequence
  source 1..1869: mol_type = other DNA
atggccgccttcagcgagatgggcgtgatgcctgagatcgcccaggccgtggaggagatggactggctgctgcccacagacatccaggccgagagcatccccctcatcctgggcggcggagatgtgctgatggctgctgagaccggcagcggcaagacaggagccttcagcatccctgtgatccagatcgtgtatgagaccctgaaggaccagcaggagggcaagaagggcaagaccaccatcaagacaggagcctctgtgctgaacaagtggcagatgaacccctatgaccgggaggtgaaggagtggcacggctgccgggccaccaagggcctgatgaagggcaagcactactatgaggtgtcctgccacgaccagggcctgtgccgggtgggctggagcaccatgcaggccagcctggacctgggcacagacaagtttggatttggatttggaggcaccgggaagaagagccacaacaagcagtttgacaactacggggaggagttcaccatgcatgacaccatcggctgctacctggacatcgacaagggccacgtgaagttcagcaagaatggcaaggacctgggcctggcctttgagatccccccccacatgaagaaccaggccctcttccctgcctgtgtgctgaagaatgctgagctgaagttcaactttggagaggaggagttcaagttcccccccaaggatggctttgtggccctgagcaaggccccagatggctacatcgtgaagagccagcacagcggaaatgcccaggtgacccagaccaagttcctgcccaatgcccccaaggccctgattgtggagcccagccgggagctggccgagcagaccctgaacaacatcaagcagttcaagaagtacatcgacaaccccaagctgcgggagctgctgatcatcggcggcgtggccgcccgggaccagctgtctgtgctggagaatggagtggacatcgtggtgggcaccccaggccgcctggatgacctggtgtccacaggcaagctgaacctgagccaggtgcgcttcctggtgctggatgaagcagatggcctgctgagccagggctacagcgacttcatcaacaggatgcacaaccagatcccccaggtgaccagtgatggcaagaggctgcaggtgattgtgtgcagcgccaccctgcacagctttgatgtgaagaagctgtctgagaagatcatgcacttccccacctgggtggacctgaagggggaggacagcgtgcctgacacagtgcaccacgtggtggtgcctgtgaaccccaagacagaccggctgtgggagcggctgggcaagagccacatcagaacagatgatgtgcacgccaaggacaacaccaggcctggggccaacagccctgagatgtggagcgaggccatcaagatcctgaagggggagtatgctgtgcgggccatcaaggagcacaagatggaccaggccatcatcttctgcaggaccaagattgactgtgacaacctggagcagtacttcatccagcagggcggcggccctgacaagaagggccaccagttcagctgtgtgtgcctgcacggggacaggaagccccatgagaggaagcagaacctggagcgcttcaagaagggagatgtgcgcttcctgatctgcacagatgtggccgcccggggcatcgacatccacggcgtgccctacgtgatcaacgtgaccctgcctgatgagaagcagaactacgtgcacagaattggccgggtgggccgggcagagaggatgggcctggccatcagcctggtggccacagagaaggagaaggtgtggtaccacatggtgcagagagatgctgtgaccatctag

SEQ ID NO: 149313 - DNA, 2628 bp, synthetic construct
  misc_feature 1..2628: note = Description of Artificial Sequence: Synthetic coding sequence
  source 1..2628: mol_type = other DNA
atgggcaagacagccaacagccctggcagcggggcccggccagaccctgtgcgctccttcaaccgctggaagaagaagcacagccaccggcagaacaagaagaagcagctgaggaagcagctgaagaagccagagtggcaggtggagcgggagagcatcagccggctgatgcagaactatgagaagatcaacgtgaatgagatcacccgcttcagtgacttccccctgagcaagaagaccctgaagggcctgcaggaggcccagtaccgcctggtgacagagatccagaagcagaccatcggcctggccctgcagggcaaggatgtgctgggcgccgccaagacaggcagcggcaagaccctggccttcctggtgcctgtgctggaggccctgtaccgcctgcagtggaccagcacagatggcctgggcgtgctgatcatcagccccacccgggagctggcctaccagacctttgaggtgctgaggaaggtgggcaagaaccacgacttctctgctggcctcatcatcggcggcaaggacctgaagcatgaagctgagcgcatcaacaacatcaacatcctggtgtgcaccccaggccgcctgctgcagcacatggatgagaccgtgtccttccacgccacagacctgcagatgctggtgctggatgaggccgaccgcatcctggacatgggctttgctgacaccatgaatgctgtgattgagaacctgcccaagaagaggcagaccctgctcttcagcgccacccagaccaagtctgtgaaggacctggcccggctgagcctgaagaacccagaatatgtgtgggtgcatgagaaggccaagtacagcaccccagccaccctggagcagaactacatcgtgtgtgagctgcagcagaagatctctgtgctgtacagcttcctgcggagccacctgaagaagaagagcatcgtgttcttcagcagctgcaaggaggtgcagtacctgtacagagtcttctgccgcctgcggcctggggtgtccatcctggccctgcacggccggcagcagcagatgaggaggatggaggtgtacaatgaatttgtgaggaagagagctgctgtgctgtttgccacagacattgctgcccggggcctggacttccctgctgtgaactgggtgctgcagtttgactgcccagaagatgccaacacctacatccacagagctggccgcacagcccgctacaaggaggatggagaggccctgctgatcctgctgcccagcgagaaggccatggtgcagcagctgctgcagaagaaggtgcctgtgaaggagatcaagatcaaccctgagaagctgattgatgtgcagaagaagctggagagcatcctggcccaggaccaggacctgaaggagcgggcccagcgctgctttgtgtcctatgtgcgctctgtgtacctgatgaaggacaaggaggtgtttgatgtgtccaagctgcccatcccagaatatgccctgagcctgggcctggccgtggccccccgggtgcgcttcctgcagaagatgcagaagcagcccaccaaggagctggtgcgcagccaggccgacaaggtgattgagccccgggcccccagcctgaccaatgatgaggtggaggagttccgggcctacttcaatgagaagatgagcatcctgcagaagggcggcaagaggctggagggcacagagcaccggcaggacaatgacacaggaaatgaggagcaggaggaggaggaggatgatgaggaggagatggaggagaagctggccaaggccaagggcagccaggcccccagcctgcccaacaccagcgaggcccagaagatcaaggaggtgcccacccagttcctggacagagatgaggaggaggaggatgctgacttcctgaaggtgaagaggcacaacgtgtttggcctggacctgaaggatgagaagaccctgcagaagaaggagcccagcaagagcagcatcaagaagaagatgaccaaggtggccgaggccaagaaggtgatgaagaggaacttcaaggtgaacaagaagatcaccttcacagatgaaggagagctggtgcagcagtggccccagatgcagaagagcgccatcaaggatgctgaagaagatgatgacacaggaggcatcaacctgcacaaggccaaggagcggctgcaggaggaggacaagtttgacaaggaggagtacaggaagaagatcaaggccaagcaccgggagaagaggctgaaggagcgggaggcccggcgggaggccaacaagaggcaggccaaggccaaggatgaggaggaggccttcctggactggagcgatgatgatgatgatgatgatgatggctttgaccccagcaccctgcctgaccctgacaagtaccgcagcagtgaagattctgattctgaggacatggagaacaagatcagtgacaccaagaagaagcagggcatgaagaagaggagcaacagcgaggtggaggatgtgggccccaccagccacaacaggaagaaggcccgctgggacaccctggagcccctggacaccggcctgagcctggccgaggatgaggagctggtgctgcacctgctgcggagccagagctag

SEQ ID NO: 149314 - DNA, 2346 bp, synthetic construct
  misc_feature 1..2346: note = Description of Artificial Sequence: Synthetic coding sequence
  source 1..2346: mol_type = other DNA
atgggcaagacagccaacagccctggcagcggggcccggccagaccctgtgcgctccttcaaccgctggaagaagaagcacagccaccggcagaacaagaagaagcagctgaggaagcagctgaagaagccagagtggcaggtggagcgggagagcatcagccggctgatgcagaactatgagaagatcaacgtgaatgagatcacccgcttcagtgacttccccctgagcaagaagaccctgaagggcctgcaggaggcccagtaccgcctggtgacagagatccagaagcagaccatcggcctggccctgcagggcaaggatgtgctgggcgccgccaagacaggcagcggcaagaccctggccttcctggtgcctgtgaatgaggccgaccgcatcctggacatgggctttgctgacaccatgaatgctgtgattgagaacctgcccaagaagaggcagaccctgctcttcagcgccacccagaccaagtctgtgaaggacctggcccggctgagcctgaagaacccagaatatgtgtgggtgcatgagaaggccaagtacagcaccccagccaccctggagcagaactacatcgtgtgtgagctgcagcagaagatctctgtgctgtacagcttcctgcggagccacctgaagaagaagagcatcgtgttcttcagcagctgcaaggaggtgcagtacctgtacagagtcttctgccgcctgcggcctggggtgtccatcctggccctgcacggccggcagcagcagatgaggaggatggaggtgtacaatgaatttgtgaggaagagagctgctgtgctgtttgccacagacattgctgcccggggcctggacttccctgctgtgaactgggtgctgcagtttgactgcccagaagatgccaacacctacatccacagagctggccgcacagcccgctacaaggaggatggagaggccctgctgatcctgctgcccagcgagaaggccatggtgcagcagctgctgcagaagaaggtgcctgtgaaggagatcaagatcaaccctgagaagctgattgatgtgcagaagaagctggagagcatcctggcccaggaccaggacctgaaggagcgggcccagcgctgctttgtgtcctatgtgcgctctgtgtacctgatgaaggacaaggaggtgtttgatgtgtccaagctgcccatcccagaatatgccctgagcctgggcctggccgtggccccccgggtgcgcttcctgcagaagatgcagaagcagcccaccaaggagctggtgcgcagccaggccgacaaggtgattgagccccgggcccccagcctgaccaatgatgaggtggaggagttccgggcctacttcaatgagaagatgagcatcctgcagaagggcggcaagaggctggagggcacagagcaccggcaggacaatgacacaggaaatgaggagcaggaggaggaggaggatgatgaggaggagatggaggagaagctggccaaggccaagggcagccaggcccccagcctgcccaacaccagcgaggcccagaagatcaaggaggtgcccacccagttcctggacagagatgaggaggaggaggatgctgacttcctgaaggtgaagaggcacaacgtgtttggcctggacctgaaggatgagaagaccctgcagaagaaggagcccagcaagagcagcatcaagaagaagatgaccaaggtggccgaggccaagaaggtgatgaagaggaacttcaaggtgaacaagaagatcaccttcacagatgaaggagagctggtgcagcagtggccccagatgcagaagagcgccatcaaggatgctgaagaagatgatgacacaggaggcatcaacctgcacaaggccaaggagcggctgcaggaggaggacaagtttgacaaggaggagtacaggaagaagatcaaggccaagcaccgggagaagaggctgaaggagcgggaggcccggcgggaggccaacaagaggcaggccaaggccaaggatgaggaggaggccttcctggactggagcgatgatgatgatgatgatgatgatggctttgaccccagcaccctgcctgaccctgacaagtaccgcagcagtgaagattctgattctgaggacatggagaacaagatcagtgacaccaagaagaagcagggcatgaagaagaggagcaacagcgaggtggaggatgtgggccccaccagccacaacaggaagaaggcccgctgggacaccctggagcccctggacaccggcctgagcctggccgaggatgaggagctggtgctgcacctgctgcggagccagagctag

SEQ ID NO: 149315 - DNA, 1959 bp, synthetic construct
  misc_feature 1..1959: note = Description of Artificial Sequence: Synthetic coding sequence
  source 1..1959: mol_type = other DNA
atgagaggaggcggctttggagaccgggaccgggaccgggaccggggcggctttggagcccggggcggcggcggcctgccccccaagaagtttggaaatcctggagagcggctgaggaagaagaagtgggacctgtctgagctgcccaagtttgagaagaacttctacgtggagcaccctgaggtggcccggctgaccccctatgaggtggatgagctgcggaggaagaaggagatcaccgtgagaggaggagatgtgtgccccaagcctgtgtttgccttccaccacgccaacttcccccagtatgtgatggatgtgctgatggaccagcacttcacagagcccacccccatccagtgccagggcttccccctggccctgagcggccgggacatggtgggcatcgcccagacaggcagcggcaagaccctggcctacctgctgcctgccatcgtgcacatcaaccaccagccctacctggagagaggagatggccccatctgcctggtgctggcccccacccgggagctggcccagcaggtgcagcaggtggctgatgattatggcaagtgcagccggctgaagagcacctgcatctacggcggggcccccaagggcccccagatccgggacctggagcggggcgtggagatctgcatcgccaccccaggccgcctgattgacttcctggagagcggcaagaccaacctgcggcgctgcacctacctggtgctggatgaggccgacaggatgctggacatgggctttgagccccagatcaggaagatcgtggaccagatccggccagaccggcagaccctgatgtggagcgccacctggcccaaggaggtgcggcagctggccgaggacttcctgcgggactacacccagatcaacgtgggcaacctggagctgagcgccaaccacaacatcctgcagatcgtggatgtgtgcatggagagcgagaaggaccacaagctgatccagctgatggaggagatcatggccgagaaggagaacaagaccatcatctttgtggagaccaagaggcgctgtgatgacctgaccaggaggatgagaagagatggctggccagccatgtgcatccacggggacaagagccagcctgagcgggactgggtgctgaatgagttccgcagcggcaaggcccccatcctgattgccacagatgtggccagccggggcctgggctttgatgtggaggatgtgaagtttgtgatcaactatgactaccccaacagcagtgaagattatgtgcacagaattggaagaacagcccggagcaccaacaagggcacagcctacaccttcttcaccccaggcaacctgaagcaggcccgggagctgatcaaggtgctggaggaggccaaccaggccatcaaccccaagctgatgcagctggtggaccacagaggaggcggcggcggcggcggcggccgcagccgctaccgcaccaccagcagcgccaacaaccccaacctgatgtaccaggatgaatgtgaccggcggctgcggggcgtgaaggatggcggcagaagagacagcgccagctacagagacagaagtgaaacagaccgggccggctacgccaacggcagcggctacggcagccccaacagcgcctttggagcccaggccggccagtacacctacggccagggcacctatggagctgctgcctacggcaccagcagctacacagcccaggagtatggagctggcacctatggagccagcagcaccaccagcacaggccgcagcagccagagcagcagccagcagttctctggaattggccgcagcggccagcagccccagcccctgatgagccagcagtttgcccagcccccaggggccaccaacatgattggctacatgggccagacagcctaccagtacccacctcctcctcctcctcctccacccagcaggaagtag

SEQ ID NO: 149316 - DNA, 2196 bp, synthetic construct
  misc_feature 1..2196: note = Description of Artificial Sequence: Synthetic coding sequence
  source 1..2196: mol_type = other DNA
ctgcccactggatttgtggcccccatcctgtgtgtgctgctgcccagccccacccgggaggccgccaccgtggccagcgccaccggggacagcgccagcgagcgggagagcgctgccccagctgctgcccccacagctgaggcccccccacccagcgtggtgaccaggcctgagccccaggccctgcccagccctgccatccgggcccccctgcctgacctgtaccccttcggcaccatgaggggcggcggctttggagaccgggaccgggaccgggacagaggaggctttggagcccggggcggcggcggcctgccccccaagaagtttggaaatcctggagagcggctgaggaagaagaagtgggacctgtctgagctgcccaagtttgagaagaacttctacgtggagcaccctgaggtggcccggctgaccccctatgaggtggatgagctgcggaggaagaaggagatcaccgtgagaggaggagatgtgtgccccaagcctgtgtttgccttccaccacgccaacttcccccagtatgtgatggatgtgctgatggaccagcacttcacagagcccacccccatccagtgccagggcttccccctggccctgagcggccgggacatggtgggcatcgcccagacaggcagcggcaagaccctggcctacctgctgcctgccatcgtgcacatcaaccaccagccctacctggagagaggagatggccccatctgcctggtgctggcccccacccgggagctggcccagcaggtgcagcaggtggctgatgattatggcaagtgcagccggctgaagagcacctgcatctatggaggagcccccaagggcccccagatccgggacctggagcggggcgtggagatctgcatcgccaccccaggccgcctgattgacttcctggagagcggcaagaccaacctgcggcgctgcacctacctggtgctggatgaagctgacaggatgctggacatgggctttgagccccagatcaggaagatcgtggaccagatccggccagaccggcagaccctgatgtggagcgccacctggcccaaggaggtgcggcagctggccgaggacttcctgcgggactacacccagatcaacgtgggcaacctggagctgagcgccaaccacaacatcctgcagatcgtggatgtgtgcatggagagcgagaaggaccacaagctgatccagctgatggaggagatcatggccgagaaggagaacaagaccatcatctttgtggagaccaagagaagatgtgatgacctgaccaggaggatgagaagagatggctggccagccatgtgcatccatggagacaagagccagcctgagcgggactgggtgctgaatgagttccgcagcggcaaggcccccatcctgattgccacagatgtggccagccggggcctggatgtggaggatgtgaagtttgtgatcaactatgactaccccaacagcagcgaggactatgtgcaccgcatcggccgcacagcccggagcaccaacaagggcacagcctacaccttcttcaccccaggcaacctgaagcaggcccgggagctgatcaaggtgctggaggaggccaaccaggccatcaaccccaagctgatgcagctggtggaccaccggggcggcggcggcggcggcggcaaaggaggccgcagccgctaccgcaccaccagcagcgccaacaaccccaacctgatgtaccaggatgaatgtgaccggcggctgcggggcgtgaaggatggcggccggcgggacagcgccagctacagagacagaagtgaaacagacagagctggctacgccaatggaagtggctacggcagccccaacagcgccttcggggcccaggccggccagtacacctacggccagggcacctacggggctgctgcctacggcaccagcagctacacagcccaggagtatggagctggcacctacggggccagcagcaccaccagcacaggccgcagcagccagagcagcagccagcagttcagcggcatcggccgcagcggccagcagccccagcccctgatgagccagcagtttgcccagcccccaggggccaccaacatgattggctacatgggccagacagcctaccagtacccacctcctcctcctcctcctccacccagcaggaagtag

SEQ ID NO: 149317 - DNA, 2190 bp, synthetic construct
  misc_feature 1..2190: note = Description of Artificial Sequence: Synthetic coding sequence
  source 1..2190: mol_type = other DNA
ctgcccactggatttgtggcccccatcctgtgtgtgctgctgcccagccccacccgggaggccgccaccgtggccagcgccaccggggacagcgccagcgagcgggagagcgctgccccagctgctgcccccacagctgaggcccccccacccagcgtggtgaccaggcctgagccccaggccctgcccagccctgccatccgggcccccctgcctgacctgtaccccttcggcaccatgaggggcggcggctttggagaccgggaccgggaccgggacagaggaggctttggagcccggggcggcggcggcctgccccccaagaagtttggaaatcctggagagcggctgaggaagaagaagtgggacctgtctgagctgcccaagtttgagaagaacttctacgtggagcaccctgaggtggcccggctgaccccctatgaggtggatgagctgcggaggaagaaggagatcaccgtgagaggaggagatgtgtgccccaagcctgtgtttgccttccaccacgccaacttcccccagtatgtgatggatgtgctgatggaccagcacttcacagagcccacccccatccagtgccagggcttccccctggccctgagcggccgggacatggtgggcatcgcccagacaggcagcggcaagaccctggcctacctgctgcctgccatcgtgcacatcaaccaccagccctacctggagagaggagatggccccatctgcctggtgctggcccccacccgggagctggcccagcaggtgcagcaggtggctgatgattatggcaagtgcagccggctgaagagcacctgcatctatggaggagcccccaagggcccccagatccgggacctggagcggggcgtggagatctgcatcgccaccccaggccgcctgattgacttcctggagagcggcaagaccaacctgcggcgctgcacctacctggtgctggatgaagctgacaggatgctggacatgggctttgagccccagatcaggaagatcgtggaccagatccggccagaccggcagaccctgatgtggagcgccacctggcccaaggaggtgcggcagctggccgaggacttcctgcgggactacacccagatcaacgtgggcaacctggagctgagcgccaaccacaacatcctgcagatcgtggatgtgtgcatggagagcgagaaggaccacaagctgatccagctgatggaggagatcatggccgagaaggagaacaagaccatcatctttgtggagaccaagagaagatgtgatgacctgaccaggaggatgagaagagatggctggccagccatgtgcatccatggagacaagagccagcctgagcgggactgggtgctgaatgagttccgcagcggcaaggcccccatcctgattgccacagatgtggccagccggggcctggatgtggaggatgtgaagtttgtgatcaactatgactaccccaacagcagcgaggactatgtgcaccgcatcggccgcacagcccggagcaccaacaagggcacagcctacaccttcttcaccccaggcaacctgaagcaggcccgggagctgatcaaggtgctggaggaggccaaccaggccatcaaccccaagctgatgcagctggtggaccaccggggcggcggcggcggcggcggcggccgcagccgctaccgcaccaccagcagcgccaacaaccccaacctgatgtaccaggatgaatgtgaccggcggctgcggggcgtgaaggatggcggccggcgggacagcgccagctacagagacagaagtgaaacagacagagctggctacgccaatggaagtggctacggcagccccaacagcgccttcggggcccaggccggccagtacacctacggccagggcacctacggggctgctgcctacggcaccagcagctacacagcccaggagtatggagctggcacctacggggccagcagcaccaccagcacaggccgcagcagccagagcagcagccagcagttcagcggcatcggccgcagcggccagcagccccagcccctgatgagccagcagtttgcccagcccccaggggccaccaacatgattggctacatgggccagacagcctaccagtacccacctcctcctcctcctcctccacccagcaggaagtag

SEQ ID NO: 149318 - DNA, 2214 bp, synthetic construct
  misc_feature 1..2214: note = Description of Artificial Sequence: Synthetic coding sequence
  source 1..2214: mol_type = other DNA
cccaacctgcccactggatttgtggcccccatcctgtgtgtgctgctgcccagccccacccgggaggccgccaccgtggccagcgccaccggggacagcgccagcgagcgggagagcgctgccccagctgctgcccccacagctgaggcccccccacccagcgtggtgaccaggcctgagccccaggccctgcccagccctgccatccgggcccccctgcctgacctgtaccccttcggcaccatgaggggcggcggctttggagaccgggaccgggaccgggacagaggaggctttggagcccggggcggcggcggcctgccccccaagaagtttggaaatcctggagagcggctgaggaagaagaagtgggacctgtctgagctgcccaagtttgagaagaacttctacgtggagcaccctgaggtggcccggctgaccccctatgaggtggatgagctgcggaggaagaaggagatcaccgtgagaggaggagatgtgtgccccaagcctgtgtttgccttccaccacgccaacttcccccagtatgtgatggatgtgctgatggaccagcacttcacagagcccacccccatccagtgccagggcttccccctggccctgagcggccgggacatggtgggcatcgcccagacaggcagcggcaagaccctggcctacctgctgcctgccatcgtgcacatcaaccaccagccctacctggagagaggagatggccccatctgcctggtgctggcccccacccgggagctggcccagcaggtgcagcaggtggctgatgattatggcaagtgcagccggctgaagagcacctgcatctatggaggagcccccaagggcccccagatccgggacctggagcggggcgtggagatctgcatcgccaccccaggccgcctgattgacttcctggagagcggcaagaccaacctgcggcgctgcacctacctggtgctggatgaagctgacaggatgctggacatgggctttgagccccagatcaggaagatcgtggaccagatccggccagaccggcagaccctgatgtggagcgccacctggcccaaggaggtgcggcagctggccgaggacttcctgcgggactacacccagatcaacgtgggcaacctggagctgagcgccaaccacaacatcctgcagatcgtggatgtgtgcatggagagcgagaaggaccacaagctgatccagctgatggaggagatcatggccgagaaggagaacaagaccatcatctttgtggagaccaagagaagatgtgatgacctgaccaggaggatgagaagagatggctggccagccatgtgcatccatggagacaagagccagcctgagcgggactgggtgctgaatgagttccgcagcggcaaggcccccatcctgattgccacagatgtggccagccggggcctggatgtggaggatgtgaagtttgtgatcaactatgactaccccaacagcagcgaggactatgtgcaccgcatcggccgcacagcccggagcaccaacaagggcacagcctacaccttcttcaccccaggcaacctgaagcaggcccgggagctgatcaaggtgctggaggaggccaaccaggccatcaaccccaagctgatgcagctggtggaccaccggggcggcggcggcggcggcggcaaaggaggccgcagccgctaccgcaccaccagcagcgccaacaaccccaacctgatgtaccaggatgaatgtgaccggcggctgcggggcgtgaaggatggcggccggcgggacagcgccagctacagagacagaagtgaaacagacagagctggctacgccaatggaagtggctacggcagccccaacagcgccttcggggcccaggccggccagtacacctacggccagggcacctacggggctgctgcctacggcaccagcagctacacagcccaggagtatggagctggcacctacggggccagcagcaccaccagcacaggccgcagcagccagagcagcagccagcagttcagcggcatcggccgcagcggccagcagccccagcccctgatgagccagcagtttgcccagcccccaggggccaccaacaccctgctgctgctgcccctgctgctgctgcacgtgaatgagaccacccaggtggtggtgaccccagctgacctgatcaccttctag

SEQ ID NO: 149319 - DNA, 546 bp, synthetic construct
  misc_feature 1..546: note = Description of Artificial Sequence: Synthetic coding sequence
  source 1..546: mol_type = other DNA
atgcagctggtggaccaccggggcggcggcggcggcggcggcggccgcagccgctaccgcaccaccagcagcgccaacaaccccaacctgatgtaccaggatgaatgtgaccggcggctgcggggcgtgaaggatggcggccggcgggacagcgccagctacagagacagaagtgaaacagacagagctggctacgccaatggaagtggctacggcagccccaacagcgccttcggggcccaggccggccagtacacctacggccagggcacctacggggctgctgcctacggcaccagcagctacacagcccaggagtatggagctggcacctacggggccagcagcaccaccagcacaggccgcagcagccagagcagcagccagcagttcagcggcatcggccgcagcggccagcagccccagcccctgatgagccagcagtttgcccagcccccaggggccaccaacatgattggctacatgggccagacagcctaccagtacccacctcctcctcctcctcctccacccagcaggaagtag

SEQ ID NO: 149320 - DNA, 2013 bp, synthetic construct
  misc_feature 1..2013: note = Description of Artificial Sequence: Synthetic coding sequence
  source 1..2013: mol_type = other DNA
atgagccacctgcccatgaagctgctgaggaagaagattgagaagaggaacctgaagctgcggcagaggaacctgaagttccagggcgccagcaacctgaccctgtctgagacccagaatggagatgtgtctgaggagaccatgggcagcaggaaggtgaagaagagcaagcagaagcccatgaatgtgggcctgtctgagacccagaatggaggcatgagccaggaggccgtgggcaacatcaaggtgaccaagagcccccagaagagcacagtgctgaccaatggagaggccgccatgcagagcagcaacagcgagagcaagaagaagaagaagaagaagaggaagatggtgaatgatgctgagccagacaccaagaaggccaagacagaaaataaaggcaagtctgaggaggagagcgctgagaccaccaaggagacagagaacaacgtggagaagccagacaatgatgaagatgaaagtgaggtgcccagcctgcccctgggcctgactggagcctttgaggacaccagctttgccagcctgtgcaacctggtgaatgaaaacaccctgaaggccatcaaggagatgggcttcaccaacatgacagagatccagcacaagagcatccggcccctgctggagggccgggacctgctggccgccgccaagacaggcagcggcaagaccctggccttcctgatcccagctgtggagctgattgtgaagctgcgcttcatgcccagaaatggcaccggggtgctgatcctgagccccacccgggagctggccatgcagaccttcggcgtgctgaaggagctgatgacccaccacgtgcacacctacggcctcatcatgggcggcagcaacagatctgctgaggcccagaagctgggcaatggcatcaacatcatcgtggccaccccaggccgcctgctggaccacatgcagaacaccccaggcttcatgtacaagaacctgcagtgcctggtgattgatgaagctgaccgcatcctggatgtgggctttgaggaggagctgaagcagatcatcaagctgctgcccacccggcggcagaccatgctgttcagcgccacccagaccaggaaggtggaggacctggcccgcatcagcctgaagaaggagcccctgtatgtgggcgtggatgatgacaaggccaatgccaccgtggatggcctggagcagggctacgtggtgtgccccagcgagaagcgcttcctgctgctcttcaccttcctgaagaagaacaggaagaagaagctgatggtgttcttcagcagctgcatgtctgtgaagtaccactatgagctgctgaactacatcgacctgcctgtgctggccatccacggcaagcagaagcagaacaagaggaccaccaccttcttccagttctgcaatgctgacagcggcaccctgctgtgcacagatgtggccgcccggggcctggacatccctgaggtggactggatcgtgcagtatgaccccccagatgaccccaaggagtacatccaccgggtgggccgcacagcccggggcctgaatggccggggccacgccctgctgatcctgcggcctgaggagctgggcttcctgcgctacctgaagcagagcaaggtgcccctgtctgaatttgacttctcctggagcaagatcagtgacatccagagccagctggagaagctgattgagaagaactacttcctgcacaagagcgcccaggaggcctacaagagctacatccgggcctatgacagccacagcctgaagcagatcttcaacgtgaacaacctgaacctgccccaggtggccctgagctttggcttcaaggtgcccccatttgtggacctgaatgtgaacagcaatgaaggcaagcagaagaagaggggcggcggcggcggcttcggctaccagaagaccaagaaggtggagaagagcaagatcttcaagcacatcagcaagaagagcagtgacagccggcagttcagccactag

SEQ ID NO: 149321 - DNA, 1230 bp, synthetic construct
  misc_feature 1..1230: note = Description of Artificial Sequence: Synthetic coding sequence
  source 1..1230: mol_type = other DNA
atggagcaggagcagacctttggagtgctgaaggagctgatgacccaccacgtgcacacctacggcctcatcatgggcggcagcaacagatctgctgaggcccagaagctgggcaatggcatcaacatcatcgtggccaccccaggccgcctgctggaccacatgcagaacaccccaggcttcatgtacaagaacctgcagtgcctggtgattgatgaggccgaccgcatcctggatgtgggctttgaggaggagctgaagcagatcatcaagctgctgcccacccggcggcagaccatgctgttcagcgccacccagaccaggaaggtggaggacctggcccgcatcagcctgaagaaggagcccctgtatgtgggcgtggatgatgacaaggccaatgccaccgtggatggcctggagcagggctacgtggtgtgccccagcgagaagcgcttcctgctgctcttcaccttcctgaagaagaacaggaagaagaagctgatggtgttcttcagcagctgcatgtctgtgaagtaccactatgagctgctgaactacatcgacctgcctgtgctggccatccacggcaagcagaagcagaacaagaggaccaccaccttcttccagttctgcaatgctgacagcggcaccctgctgtgcacagatgtggccgcccggggcctggacatccctgaggtggactggatcgtgcagtatgaccccccagatgaccccaaggagtacatccaccgggtgggccgcacagcccggggcctgaatggccggggccacgccctgctgatcctgcggcctgaggagctgggcttcctgcgctacctgaagcagagcaaggtgcccctgtctgaatttgacttctcctggagcaagatcagtgacatccagagccagctggagaagctgattgagaagaactacttcctgcacaagagcgcccaggaggcctacaagagctacatccgggcctatgacagccacagcctgaagcagatcttcaacgtgaacaacctgaacctgccccaggtggccctgagctttggcttcaaggtgcccccatttgtggacctgaatgtgaacagcaatgaaggcaagcagaagaagagaggaggcggcggcggcttcggctaccagaagaccaagaaggtggagaagagcaagatcttcaagcacatcagcaagaagagcagtgacagccggcagttcagccactag

SEQ ID NO: 149322 - DNA, 2475 bp, synthetic construct
  misc_feature 1..2475: note = Description of Artificial Sequence: Synthetic coding sequence
  source 1..2475: mol_type = other DNA
atggctgctgcctttgaggccagcggggccctggccgctgtggccacagccatgcctgctgagcacgtggccgtgcaggtgcctgcccctgagcccaccccaggccctgtgcgcatcctgaggacagcccaggacctgagcagccccaggaccaggactggagatgtgctgctggccgagcctgctgactttgagagcctgctgctgagcaggcctgtgctggagggcctgcgggccgccggctttgagcggcccagccctgtgcagctgaaggccatccccctgggccgctgtggcctggacctgattgtgcaggccaagagcggcaccgggaagacctgtgtgttcagcaccatcgccctggacagcctggtgctggagaacctgagcacccagatcctgatcctggcccccacccgggagattgctgtgcagatccacagcgtcatcacagccatcggcatcaagatggagggcctggagtgccacgtgttcatcggcggcacccccctgagccaggacaagacccggctgaagaagtgccacatcgctgtgggcagccctggccgcatcaagcagctgattgagctggactacctgaaccctggcagcatccgcctcttcatcctggatgaagctgacaagctgctggaggagggcagcttccaggagcagatcaactggatctacagcagcctgcctgccagcaagcagatgctggccgtgtctgccacctacccagagttcctggccaatgccctgaccaagtacatgagggaccccacctttgtgcggctgaacagcagtgaccccagcctcatcggcctgaagcagtactacaaggtggtgaacagctaccccctggcccacaaggtgtttgaggagaagacccagcacctgcaggagctgttcagccgcatccccttcaaccaggccctggtgttcagcaacctgcacagccgggcccagcacctggccgacatcctgagcagcaagggcttccctgctgagtgcatcagcggcaacatgaaccagaaccagaggctggatgccatggccaagctgaagcacttccactgccgggtgctgatcagcacagacctgaccagccggggcattgatgctgagaaggtgaacctggtggtgaacctggatgtgcccctggactgggagacctacatgcacagaattggccgggccggccgcttcggcaccctgggcctgactgtgacctactgctgccgcggggaggaggagaacatgatgatgagaattgcccagaagtgcaacatcaacctgctgcccctgcctgaccccatccccagcggcctgatggaggagtgtgtggactgggatgtggaggtgaaggctgctgtgcacacctacggcatcgcctctgtgcccaaccagcccctgaagaagcagatccagaagattgaaagaaccctgcagatccagaaggcccatggagaccacatggccagcagcaggaacaacagcgtgtctggcctgtctgtgaagagcaagaacaacaccaagcagaagctgcctgtgaagagccacagtgaatgtggcatcatcgagaaggccaccagccccaaggagctgggctgtgaccggcagagcgaggagcagatgaagaacagcgtgcagacccctgtggagaacagcaccaacagccagcaccaggtgaaggaggccctgcctgtgtccctgccccagatcccctgcctgagcagcttcaagatccaccagccctacaccctgacctttgctgagctggtggaggactatgagcactacatcaaggagggcctggagaagcctgtggagatcatccgccactacacaggccctggggaccagacagtgaacccccagaatggatttgtgaggaacaaggtgattgagcagagggtgcctgtgctggccagcagcagccagagcggggacagcgagagtgacagcgacagctacagcagcaggaccagcagccagagcaagggcaacaagagctacctggagggcagcagtgacaaccagctgaaggacagcgagagcacccctgtggatgaccgcatcagcctggagcagcccccaaatggaagtgacacccccaaccctgagaagtaccaggagagccctggcatccagatgaagacccggctgaaggagggcgccagccagagggccaagcagagcagaagaaacctgccccggcgcagcagcttccggctgcagacagaggcccaggaggatgactggtatgactgccaccgggagatccggctgtccttcagtgacacctaccaggactatgaggagtactggagggcctactaccgggcctggcaggagtactatgctgctgccagccacagctactactggaatgcccagaggcaccccagctggatggccgcctaccacatgaacaccatctacctgcaggagatgatgcacagcaaccagtag

SEQ ID NO: 149323 - DNA, 417 bp, synthetic construct
  misc_feature 1..417: note = Description of Artificial Sequence: Synthetic coding sequence
  source 1..417: mol_type = other DNA
atggctgctgcctttgaggccagcggggccctggccgctgtggccacagccatgcctgctgagcacgtggccgtgcaggtgcctgcccctgagcccaccccaggccctgtgcgcatcctgaggacagcccaggacctgagcagccccaggaccaggactggagatgtgctgctggccgagcctgctgactttgagagcctgctgctgagcaggcctgtgctggagggcctgcgggccgccggctttgagcggcccagccctgtgcagctgaaggccatccccctgggccgctgtggcctggacctgattgtgcaggccaagagcggcaccgggaagacctgtgtgttcagcaccatcgccctggacagcctggtgctggagaacctgagcacccaggccgagctgagcaacagctag

SEQ ID NO: 149324 - DNA, 2352 bp, synthetic construct
  misc_feature 1..2352: note = Description of Artificial Sequence: Synthetic coding sequence
  source 1..2352: mol_type = other DNA
atgcctgggaagctgcggagtgatgctggcctggagagtgacacagccatgaagaagggggagaccctgaggaagcagacagaggagaaggagaagaaggagaagcccaagagtgacaagacagaggagattgctgaggaggaggagaccgtcttccccaaggccaagcaggtgaagaagaaggccgagcccagcgaggtggacatgaacagccccaagagcaagaaggccaagaagaaggaggagcccagccagaatgacatcagccccaagaccaagagcctgaggaagaagaaggagcccatcgagaagaaggtggtgagcagcaagaccaagaaggtgaccaagaatgaggagcccagcgaggaggagattgatgcccccaagcccaagaagatgaagaaggagaaggagatgaatggagagacccgggagaagagccccaagctgaagaatggcttcccccaccctgagccagactgcaaccccagcgaggccgccagcgaggagagcaacagcgagattgagcaggagatccctgtggagcagaaggagggcgccttcagcaacttccccatcagcgaggagaccatcaagctgctgaagggccggggcgtgaccttcctgttccccatccaggccaagaccttccaccacgtgtacagcggcaaggacctgattgcccaggccaggacaggcaccgggaagaccttctcctttgccatccccctgattgagaagctgcatggagagctgcaggacaggaagaggggccgggccccccaggtgctggtgctggcccccacccgggagctggccaaccaggtgtccaaggacttcagtgacatcaccaagaagctgtctgtggcctgcttctatggaggcaccccctacggcggccagtttgagaggatgagaaatggaattgacatcctggtgggcaccccaggccgcatcaaggaccacatccagaatggcaagctggacctgaccaagctgaagcacgtggtgctggatgaggtggaccagatgctggacatgggctttgctgaccaggtggaggagatcctgtctgtggcctacaagaaggacagcgaggacaacccccagaccctgctcttcagcgccacctgcccccactgggtgttcaacgtggccaagaagtacatgaagagcacctatgagcaggtggacctgattggcaagaagacccagaagacagccatcaccgtggagcacctggccatcaagtgccactggacccagagagctgctgtgattggagatgtgatccgggtgtacagcggccaccagggccgcaccatcatcttctgtgagaccaagaaggaggcccaggagctgagccagaacagcgccatcaagcaggatgcccagagcctgcacggggacatcccccagaagcagcgggagatcaccctgaagggcttcagaaatggcagctttggagtgctggtggccaccaacgtggccgcccggggcctggacatccctgaggtggacctggtgatccagagcagcccccccaaggatgtggagagctacatccacaggagcggccgcacaggccgggccggccgcactggagtgtgcatctgcttctaccagcacaaggaggagtaccagctggtgcaggtggagcagaaggccggcatcaagttcaagagaattggagtgcccagcgccacagagatcatcaaggccagcagcaaggatgccatccggctgctggacagcgtgcccccaacagccatcagccacttcaagcagagcgctgagaagctgattgaggagaagggagctgtggaggccctggccgccgccctggcccacatcagcggggccacctctgtggaccagaggagcctcatcaacagcaatgtgggctttgtgaccatgatcctgcagtgcagcattgagatgcccaacatctcctatgcctggaaggagctgaaggagcagctgggggaggagattgacagcaaggtgaagggcatggtgttcctgaagggcaagctgggcgtgtgctttgatgtgcccacagcctctgtgacagagatccaggagaagtggcatgacagccgccgctggcagctgtctgtggccacagagcagcctgagctggagggcccccgggagggctatggaggcttccggggccagcgggagggcagccggggcttccggggccagagagatggcaacagacgcttccggggccagcgggagggcagccggggcccccggggccagaggtctgggggcggcaacaagagcaacagaagccagaacaagggccagaagaggagcttcagcaaggccttcggccagtag

SEQ ID NO: 149325 - DNA, 249 bp, synthetic construct
  misc_feature 1..249: note = Description of Artificial Sequence: Synthetic coding sequence
  source 1..249: mol_type = other DNA
atgcctgggaagctgcggagtgatgctggcctggagagtgacacagccatgaagaagggggagaccctgaggaagcagacagaggagaaggagaagaaggagaagcccaagagtgacaagacagaggagattgctgaggaggaggagaccgtcttccccaaggccaagcaggtgaagaagaaggccgagcccagcgaggtggacatgaacagccccaagagcaagaagaagaagaagaagaagaagtag

SEQ ID NO: 149326 - DNA, 2463 bp, synthetic construct
  misc_feature 1..2463: note = Description of Artificial Sequence: Synthetic coding sequence
  source 1..2463: mol_type = other DNA
atggccggggagctggccgacaagaaggacagagatgccagccccagcaaggaggagaggaagaggagcaggaccccagaccgggagcgggaccgggaccgggacaggaagagcagccccagcaaggacaggaagaggcacaggagccgggacagaagaagaggaggcagccgcagccgcagccgcagccgcagcaagtctgctgagcgggagcggcggcacaaggagcgggagcgggacaaggagcgggacaggaacaagaaggaccgggaccgggacaaggatggccaccggcgggacaaggacaggaagaggagcagcctgagccctggccggggcaaggacttcaagagcaggaaggaccgggacagcaagaaggatgaagaagatgagcacggggacaagaagcccaaggcccagcccctgagcctggaggagctgctggccaagaagaaggccgaggaggaggccgaggccaagcccaagttcctgagcaaggccgagcgggaggccgaggccctgaagaggcggcagcaggaggtggaggagcggcagaggatgctggaggaggagaggaagaagaggaagcagttccaggacctgggcaggaagatgctggaggacccccaggagcgggagcggcgggagcggcgggagaggatggagcgggagaccaatggaaatgaagatgaggagggccggcagaagatccgggaggagaaggacaagagcaaggagctgcacgccatcaaggagcgctacctgggcggcatcaagaagagaagaaggaccaggcacctgaatgacaggaagtttgtgtttgagtgggatgccagcgaggacaccagcattgactacaaccccctgtacaaggagcggcaccaggtgcagctgctgggccggggcttcatcgccggcatcgacctgaagcagcagaagcgggagcagagccgcttctacggggacctgatggagaagaggaggaccctggaggagaaggagcaggaggaggcccggctgaggaagctgaggaagaaggaggccaagcagcgctgggatgacagacactggagccagaagaagctggatgagatgacagaccgggactggaggatcttccgggaggactacagcatcaccaccaagggcggcaagatccccaaccccatccgctcctggaaggacagcagcctgcccccccacatcctggaggtgattgacaagtgtggctacaaggagcccacccccatccagaggcaggccatccccatcggcctgcagaacagagacatcatcggcgtggccgagactggaagtggcaagacagctgccttcctgatccccctgctggtgtggatcaccaccctgcccaagattgaccgcatcgaggagagtgaccagggcccctatgccatcatcctggcccccacccgggagctggcccagcagatcgaggaggagaccatcaagtttgggaagcccctgggcatcagaacagtggccgtgattggaggcatcagccgggaggaccagggcttccggctgaggatgggctgtgaaattgtgattgccaccccaggccgcctgattgatgtgctggagaaccgctacctggtgctgagccgctgcacctacgtggtgctggatgaagctgacaggatgattgacatgggctttgagccagatgtgcagaagatcctggagcacatgcctgtgagcaaccagaagccagacacagatgaagcagaagatcctgagaagatgctggccaactttgagagcggcaagcacaagtaccggcagacagtgatgttcaccgccaccatgcccccagctgtggagcggctggcccggagctacctgcggcggcctgctgtggtgtacatcggcagcgctgggaagccccatgagcgggtggagcagaaggtgttcctgatgtctgagagcgagaagaggaagaagctgctggccatcctggagcagggctttgatcctcccatcatcatctttgtgaaccagaagaagggctgtgatgtgctggccaagagcctggagaagatgggctacaatgcctgcaccctgcatggaggcaagggccaggagcagcgggagtttgccctgagcaacctgaaggccggggccaaggacatcctggtggccacagatgtggccggccggggcatcgacatccaggatgtgtccatggtggtgaactatgacatggccaagaacatcgaggactacatccaccgcatcggccgcacaggccgggccggcaagtctggagtggccatcaccttcctgaccaaggaggacagcgctgtgttctatgagctgaagcaggccatcctggagagccctgtgagcagctgccccccagagctggccaaccacccagatgcccagcacaagccaggcaccatcctgaccaagaagagaagagaggagaccatctttgcctag

SEQ ID NO: 149327 - DNA, 417 bp, synthetic construct
  misc_feature 1..417: note = Description of Artificial Sequence: Synthetic coding sequence
  source 1..417: mol_type = other DNA
atggccggggagctggccgacaagaaggacagagatgccagccccagcaaggaggagaggaagaggagcaggaccccagaccgggagcgggaccgggaccgggacaggaagagcagccccagcaaggacaggaagaggcacaggagccgggacagaagaagaggaggcagccgcagccgcagccgcagccgcagcaagtctgctgagcgggagcggcggcacaaggagcgggagcgggacaaggagcgggacaggaacaagaaggaccgggaccgggacaaggatggccaccggcgggacaaggacaggaagaggagcagcctgagccctggccggggcaaggacttcaagagcaggaaggaccgggacagcaagaaggatgaagaagatgagcacggggacaagaagcccaagtag

SEQ ID NO: 149328 - DNA, 549 bp, synthetic construct
  misc_feature 1..549: note = Description of Artificial Sequence: Synthetic coding sequence
  source 1..549: mol_type = other DNA
atggccggggagctggccgacaagaaggacagagatgccagccccagcaaggaggagaggaagaggagcaggaccccagaccgggagcgggaccgggaccgggacaggaagagcagccccagcaaggacaggaagaggcacaggagccgggacagaagaagaggaggcagccgcagccgcagccgcagccgcagcaagtctgctgagcgggagcggcggcacaaggagcgggagcgggacaaggagcgggacaggaacaagaaggaccgggaccgggacaaggatggccaccggcgggacaaggacaggaagaggagcagcctgagccctggccggggcaaggacttcaagagcaggaaggaccgggacagcaagaaggatgaagaagatgagcacggggacaagaagcccaaggcccagcccctgagcctggaggagctgctggccaagaagaaggccgaggaggaggccgaggccaagcccaagttcctgagcaaggccgagcgggaggccgaggccctgaagaggcggcagcaggaggtggagtag

SEQ ID NO: 149329 - DNA, 2580 bp, synthetic construct
  misc_feature 1..2580: note = Description of Artificial Sequence: Synthetic coding sequence
  source 1..2580: mol_type = other DNA
atgaagctgaaggacaccaagagccggcccaagcagagcagctgtgggaagttccagaccaagggcatcaaggtggtgggcaagtggaaggaggtgaagattgaccccaacatgtttgctgatggccagatggatgacctggtgtgctttgaggagctgacagactaccagctggtgtccccagccaagaaccccagcagcctcttcagcaaggaggcccccaagaggaaggcccaggccgtgtctgaggaggaggaggaggaggagggcaagagcagcagccccaagaagaagatcaagctgaagaagagcaagaatgtggccacagagggcaccagcacccagaaggagtttgaggtgaaggaccctgagctggaggcccagggagatgacatggtgtgtgatgatcctgaggccggggagatgaccagcgagaacctggtgcagacagcccccaagaagaagaagaacaagggcaagaagggcctggagcccagccagagcacagctgccaaggtgcccaagaaggccaagacctggatccctgaggtgcatgaccagaaggcagatgtgtctgcctggaaggacctgtttgtgcccaggcctgtgctgcgggccctgtccttcctgggcttcagcgcccccacccccatccaggccctgaccctggccccagccatccgggacaagctggacatcctgggcgctgctgagactggaagtggcaagaccctggcctttgccatccccatgattcatgctgtgctgcagtggcagaagagaaatgctgcccccccacccagcaacacagaggcccctcctggagagaccaggacagaagctggagctgagaccaggagccctgggaaggccgaggccgagagtgatgccctgcctgatgacaccgtcatcgagagcgaggccctgcccagcgacattgctgctgaggcccgggccaagacaggaggcaccgtgtctgaccaggccctgctgtttggagatgatgatgctggggagggccccagcagcctcatccgggagaagcctgtgcccaagcagaatgaaaatgaggaggagaacctggacaaggagcagacaggcaacctgaagcaggagctggatgacaagagcgccacctgcaaggcctaccccaagaggcccctgctgggcctggtgctgacccccacccgggagctggccgtgcaggtgaagcagcacattgatgctgtggcccgcttcaccggcatcaagacagccatcctggtgggcggcatgagcacccagaagcagcagaggatgctgaacagaagacctgagatcgtggtggccaccccaggccgcctgtgggagctgatcaaggagaagcactaccacctgaggaacctgcggcagctgcgctgcctggtggtggatgaagctgacaggatggtggagaagggccactttgctgagctgagccagctgctggagatgctgaatgacagccagtacaaccccaagaggcagaccctggtgttttctgccaccctgaccctggtgcaccaggccccagcccgcatcctgcacaagaagcacaccaagaagatggacaagacagccaagctggacctgctgatgcagaagattggcatgaggggcaagcccaaggtgattgacctgaccagaaatgaggccaccgtggagaccctgacagagaccaagatccactgtgaaacagatgagaaggacttctacctgtactacttcctgatgcagtacccaggccgcagcctggtgtttgccaacagcatcagctgcatcaagaggctgagcggcctgctgaaggtgctggacatcatgcccctgaccctgcacgcctgcatgcaccagaagcagaggctgaggaacctggagcagtttgcccggctggaggactgtgtgctgctggccacagatgtggccgcccggggcctggacatccccaaggtgcagcacgtgatccactaccaggtgcccaggaccagcgagatctacgtgcacaggagcggccgcacagcccgggccaccaatgaaggcctgagcctgatgctgattggaccagaagatgtgatcaacttcaagaagatctacaagaccctgaagaaggatgaggacatccccctcttccctgtgcagaccaagtacatggatgtggtgaaggagcgcatccggctggcccggcagatcgagaagtctgagtacagaaacttccaggcctgcctgcacaacagctggattgagcaggccgctgctgccctggagattgagctggaggaggacatgtacaagggcggcaaggctgaccagcaggaggagcggcggcggcagaagcagatgaaggtgctgaagaaggagctgcggcacctgctgagccagcccctcttcacagagagccagaagaccaagtaccccacccagagcggcaagccacccctgctggtgtctgcccccagcaagtctgagagcgccctgagctgcctgagcaagcagaagaagaagaagaccaagaagcccaaggagccccagcctgagcagccccagcccagcaccagcgccaactag

SEQ ID NO: 149330 - DNA, 2415 bp, synthetic construct
  misc_feature 1..2415: note = Description of Artificial Sequence: Synthetic coding sequence
  source 1..2415: mol_type = other DNA
atgaagctgaaggacaccaagagccggcccaagcagagcagctgtgggaagttccagaccaagggcatcaaggtggtgggcaagtggaaggaggtgaagattgaccccaacatgtttgctgatggccagatggatgacctggtgtgctttgaggagctgacagactaccagctggtgtccccagccaagaaccccagcagcctcttcagcaaggaggcccccaagaggaaggcccaggccgtgtctgaggaggaggaggaggaggagggcaagagcagcagccccaagaagaagatcaagctgaagaagagcaagaatgtggccacagagggcaccagcacccagaaggagtttgaggtgaaggaccctgagctggaggcccagggagatgacatggtgtgtgatgatcctgaggccggggagatgaccagcgagaacctggtgcagacagcccccaagaagaagaagaacaagggcaagaagggcctggagcccagccagagcacagctgccatccgggacaagctggacatcctgggcgctgctgagaccggcagcggcaagaccctggcctttgccatccccatgattcatgctgtgctgcagtggcagaagagaaatgctgcccccccacccagcaacacagaggcccctcctggagagaccaggacagaggccggggctgagaccaggagccctgggaaggccgaggccgagagtgatgccctgcctgatgacacagtgattgaaagtgaggccctgcccagcgacattgctgctgaggcccgggccaagacaggaggcaccgtgtctgaccaggccctgctgtttggagatgatgatgctggggagggccccagcagcctcatccgggagaagcctgtgcccaagcagaatgaaaatgaggaggagaacctggacaaggagcagacaggcaacctgaagcaggagctggatgacaagagcgccacctgcaaggcctaccccaagaggcccctgctgggcctggtgctgacccccacccgggagctggccgtgcaggtgaagcagcacattgatgctgtggcccgcttcaccggcatcaagacagccatcctggtgggcggcatgagcacccagaagcagcagaggatgctgaacagaagacctgagatcgtggtggccaccccaggccgcctgtgggagctgatcaaggagaagcactaccacctgaggaacctgcggcagctgcgctgcctggtggtggatgaggccgacaggatggtggagaagggccactttgctgagctgagccagctgctggagatgctgaatgacagccagtacaaccccaagaggcagaccctggtgttcagcgccaccctgaccctggtgcaccaggccccagcccgcatcctgcacaagaagcacaccaagaagatggacaagacagccaagctggacctgctgatgcagaagattggcatgaggggcaagcccaaggtgattgacctgaccagaaatgaggccaccgtggagaccctgacagagaccaagatccactgtgaaacagatgagaaggacttctacctgtactacttcctgatgcagtacccaggccgcagcctggtgtttgccaacagcatcagctgcatcaagaggctgagcggcctgctgaaggtgctggacatcatgcccctgaccctgcacgcctgcatgcaccagaagcagaggctgaggaacctggagcagtttgcccggctggaggactgtgtgctgctggccacagatgtggccgcccggggcctggacatccccaaggtgcagcacgtgatccactaccaggtgcccaggaccagcgagatctacgtgcacaggagcggccgcacagcccgggccaccaatgaaggcctgagcctgatgctgattggaccagaagatgtgatcaacttcaagaagatctacaagaccctgaagaaggatgaggacatccccctcttccctgtgcagaccaagtacatggatgtggtgaaggagcgcatccggctggcccggcagatcgagaagtctgagtacagaaacttccaggcctgcctgcacaacagctggattgagcaggccgccgccgccctggagattgagctggaggaggacatgtacaagggcggcaaggctgaccagcaggaggagcggcggcggcagaagcagatgaaggtgctgaagaaggagctgcggcacctgctgagccagcccctcttcacagagagccagaagaccaagtaccccacccagagcggcaagccacccctgctggtgtctgcccccagcaagtctgagagcgccctgagctgcctgagcaagcagaagaagaagaagaccaagaagcccaaggagccccagcctgagcagccccagcccagcaccagcgccaactag

SEQ ID NO: 149331 - DNA, 2292 bp, synthetic construct
  misc_feature 1..2292: note = Description of Artificial Sequence: Synthetic coding sequence
  source 1..2292: mol_type = other DNA
atggatgacctggtgtgctttgaggagctgacagactaccagctggtgtccccagccaagaaccccagcagcctcttcagcaaggaggcccccaagaggaaggcccaggccgtgtctgaggaggaggaggaggaggagggcaagagcagcagccccaagaagaagatcaagctgaagaagagcaagaatgtggccacagagggcaccagcacccagaaggagtttgaggtgaaggaccctgagctggaggcccagggagatgacatggtgtgtgatgatcctgaggccggggagatgaccagcgagaacctggtgcagacagcccccaagaagaagaagaacaagggcaagaagggcctggagcccagccagagcacagctgccaaggtgcccaagaaggccaagacctggatccctgaggtgcatgaccagaaggcagatgtgtctgcctggaaggacctgtttgtgcccaggcctgtgctgcgggccctgtccttcctgggcttcagcgcccccacccccatccaggccctgaccctggccccagccatccgggacaagctggacatcctgggcgctgctgagaccggcagcggcaagaccctggcctttgccatccccatgattcatgctgtgctgcagtggcagaagagaaatgctgcccccccacccagcaacacagaggcccctcctggagagaccaggacagaggccggggctgagaccaggagccctgggaaggccgaggccgagagtgatgccctgcctgatgacacagtgattgaaagtgaggccctgcccagcgacattgctgctgaggcccgggccaagacaggaggcaccgtgtctgaccaggccctgctgtttggagatgatgatgctggggagggccccagcagcctcatccgggagaagcctgtgcccaagcagaatgaaaatgaggaggagaacctggacaaggagcagacaggcaacctgaagcaggagctggatgacaagagcgccacctgcaaggcctaccccaagaggcccctgctgggcctggtgctgacccccacccgggagctggccgtgcaggtgaagcagcacattgatgctgtggcccgcttcaccggcatcaagacagccatcctggtgggcggcatgagcacccagaagcagcagaggatgctgaacagaagacctgagatcgtggtggccaccccaggccgcctgtgggagctgatcaaggagaagcactaccacctgaggaacctgcggcagctgcgctgcctggtggtggatgaggccgacaggatggtggagaagggccactttgctgagctgagccagctgctggagatgctgaatgacagccagtacaaccccaagaggcagaccctggtgttcagcgccaccctgaccctggtgcaccaggccccagcccgcatcctgcacaagaagcacaccaagaagatggacaagacagccaagctggacctgctgatgcagaagattggcatgaggggcaagcccaaggtgattgacctgaccagaaatgaggccaccgtggagaccctgacagagaccaagatccactgtgaaacagatgagaaggacttctacctgtactacttcctgatgcagtacccaggccgcagcctggtgtttgccaacagcatcagctgcatcaagaggctgagcggcctgctgaaggtgctggacatcatgcccctgaccctgcacgcctgcatgcaccagaagcagaggctgaggaacctggagcagtttgcccggctggaggactgtgtgctgctggccacagatgtggccgcccggggcctggacatccccaaggtgcagcacgtgatccactaccaggtgcccaggaccagcgagatctacgtgcacaggagcggccgcacagcccgggccaccaatgaaggcctgagcctgatgctgattggaccagaagatgtgatcaacttcaagaagatctacaagaccctgaagaaggatgaggacatccccctcttccctgtgcagaccaagtacatggatgtggtgaaggagcgcatccggctggcccggcagatcgagaagtctgagtacagaaacttccaggcctgcctgcacaacagctggattgagcaggccgccgccgccctggagattgagctggaggaggacatgtacaagggcggcaaggctgaccagcaggaggagcggcggcggcagaagcagatgaaggtgctgaagaaggagctgcggcacctgctgagccagccccagcccagcaccagcgccaactag

SEQ ID NO: 149332 - DNA, 1458 bp, synthetic construct
  misc_feature 1..1458: note = Description of Artificial Sequence: Synthetic coding sequence
  source 1..1458: mol_type = other DNA
atgaccaaggccccctgcaaggcctaccccaagaggcccctgctgggcctggtgctgacccccacccgggagctggccgtgcaggtgaagcagcacattgatgctgtggcccgcttcaccggcatcaagacagccatcctggtgggcggcatgagcacccagaagcagcagaggatgctgaacagaagacctgagatcgtggtggccaccccaggccgcctgtgggagctgatcaaggagaagcactaccacctgaggaacctgcggcagctgcgctgcctggtggtggatgaagctgacaggatggtggagaagggccactttgctgagctgagccagctgctggagatgctgaatgacagccagtacaaccccaagaggcagaccctggtgttttctgccaccctgaccctggtgcaccaggccccagcccgcatcctgcacaagaagcacaccaagaagatggacaagacagccaagctggacctgctgatgcagaagattggcatgaggggcaagcccaaggtgattgacctgaccagaaatgaggccaccgtggagaccctgacagagaccaagatccactgtgaaacagatgagaaggacttctacctgtactacttcctgatgcagtacccaggccgcagcctggtgtttgccaacagcatcagctgcatcaagaggctgagcggcctgctgaaggtgctggacatcatgcccctgaccctgcacgcctgcatgcaccagaagcagaggctgaggaacctggagcagtttgcccggctggaggactgtgtgctgctggccacagatgtggccgcccggggcctggacatccccaaggtgcagcacgtgatccactaccaggtgcccaggaccagcgagatctacgtgcacaggagcggccgcacagcccgggccaccaatgaaggcctgagcctgatgctgattggaccagaagatgtgatcaacttcaagaagatctacaagaccctgaagaaggatgaggacatccccctcttccctgtgcagaccaagtacatggatgtggtgaaggagcgcatccggctggcccggcagatcgagaagtctgagtacagaaacttccaggcctgcctgcacaacagctggattgagcaggccgctgctgccctggagattgagctggaggaggacatgtacaagggcggcaaggctgaccagcaggaggagcggcggcggcagaagcagatgaaggtgctgaagaaggagctgcggcacctgctgagccagcccctcttcacagagagccagaagaccaagtaccccacccagagcggcaagccacccctgctggtgtctgcccccagcaagtctgagagcgccctgagctgcctgagcaagcagaagaagaagaagaccaagaagcccaaggagccccagcctgagcagccccagcccagcaccagcgccaactag

SEQ ID NO: 149333 - DNA, 1623 bp, synthetic construct
  misc_feature 1..1623: note = Description of Artificial Sequence: Synthetic coding sequence
  source 1..1623: mol_type = other DNA
atggccctgaccaggcctgtgcggctcttcagcctggtgacccggctgctgctggccccccggcggggcctgactgtgcgcagcccagatgagcccctgcctgtggtgcgcatccctgtggccctgcagaggcagctggagcagaggcagagcagaagaagaaacctgcccaggcctgtgctggtgcggcccggccccctgctggtgtctgcccggcggcctgagctgaaccagcctgcccggctgaccctgggccgctgggagcgggcccccctggccagccagggctggaagagccggcgggcccggcgggaccacttcagcattgagcgggcccagcaggaggccccagctgtgaggaagctgagcagcaagggcagctttgctgacctgggcctggagccccgggtgctgcacgccctgcaggaggccgcccctgaggtggtgcagcccaccaccgtgcagagcagcaccatccccagcctgctgcggggcagacatgtggtgtgtgccgctgagaccggcagcggcaagaccctgagctacctgctgcccctgctgcagaggctgctgggccagcccagcctggacagcctgcccatcccagccccccggggcctggtgctggtgcccagccgggagctggcccagcaggtgcgggctgtggcccagcccctgggccgcagcctgggcctgctggtgcgggacctggagggcggccacggcatgaggcgcatccggctgcagctgagccggcagcccagcgcagatgtgctggtggccacccctggggccctgtggaaggccctgaagagccgcctcatcagcctggagcagctgtccttcctggtgctggatgaggccgacaccctgctggatgagagcttcctggagctggtggactacatcctggagaagagccacatcgccgagggccctgctgacctggaggaccccttcaaccccaaggcccagctggtgctggtgggcgccaccttccctgagggcgtgggccagctgctgaacaaggtggccagcccagatgctgtgaccaccatcaccagcagcaagctgcactgcatcatgccccacgtgaagcagaccttcctgcggctgaagggagctgacaaggtggccgagctggtgcacatcctgaagcaccgggacagagctgagaggacaggccccagcggcaccgtgctggtgttctgcaacagcagcagcacagtgaactggctgggctacatcctggatgaccacaagatccagcacctgcggctgcagggccagatgcctgccctgatgagggtgggcatcttccagagcttccagaagagcagccgggacatcctgctgtgcacagacatcgccagccggggcctggacagcactggagtggagctggtggtgaactatgacttcccccccaccctgcaggactacatccacagagctggccgggtgggccgggtgggcagcgaggtgcccggcaccgtcatcagctttgtgacccacccctgggatgtgtccctggtgcagaagattgagctggccgccaggagaagaagaagcctgcccggcctggccagctctgtgaaggagcccctgccccaggccacctag

SEQ ID NO: 149334 - DNA, 1989 bp, synthetic construct
  misc_feature 1..1989: note = Description of Artificial Sequence: Synthetic coding sequence
  source 1..1989: mol_type = other DNA
atgagccacgtggccgtggagaatgccctgggcctggaccagcagtttgctggcctggacctgaacagcagtgacaaccagagcggcggcagcacagccagcaagggccgctacatccccccccacctgaggaaccgggaggccaccaagggcttctatgacaaggacagcagcggctggagcagcagcaaggacaaggatgcctacagcagctttggcagcagaagtgacagccggggcaagagcagcttcttcagtgaccggggcagcggcagccggggccgctttgatgaccggggccgcagtgactatgatggcatcggcagcagaggagacaggagcggctttgggaagtttgagcggggcggcaacagccgctggtgtgacaagagtgatgaagatgactggagcaagcccctgcccccatctgagcggctggagcaggagctgttcagcggcggcaacacaggcatcaactttgagaagtatgatgacatccctgtggaggccactggaaacaactgccccccccacatcgagagcttcagtgatgtggagatgggagagatcatcatgggcaacatcgagctgacccgctacacccggcccacccctgtgcagaagcacgccatccccatcatcaaggagaagagggacctgatggcctgtgcccagacaggcagcggcaagacagctgccttcctgctgcccatcctgagccagatctacagtgatggccctggagaggccctgcgggccatgaaggaaaatggccgctatggccgcaggaagcagtaccccatcagcctggtgctggcccccacccgggagctggccgtgcagatctatgaggaggccaggaagttctcctaccgcagccgggtgcggccctgtgtggtgtatggaggagctgacatcggccagcagatccgggacctggagcggggctgccacctgctggtggccaccccaggccgcctggtggacatgatggagcggggcaagattggcctggacttctgcaagtacctggtgctggatgaagctgacaggatgctggacatgggctttgagccccagatccgccgcatcgtggagcaggacaccatgccacccaagggcgtgcgccacaccatgatgttcagcgccaccttccccaaggagatccagatgctggcccgggacttcctggatgagtacatcttcctggccgtgggccgggtgggcagcaccagcgagaacatcacccagaaggtggtgtgggtggaggagagtgacaagaggagcttcctgctggacctgctgaatgccaccgggaaggacagcctgaccctggtgtttgtggagaccaagaagggagctgacagcctggaggacttcctgtaccacgagggctacgcctgcaccagcatccacggggacaggagccagagggaccgggaggaggccctgcaccagttccgcagcggcaagagccccatcctggtggccacagctgtggccgcccggggcctggacatcagcaatgtgaagcacgtgatcaactttgacctgcccagcgacatcgaggagtatgtgcacagaattggaagaacaggccgggtgggcaacctgggcctggccaccagcttcttcaatgaaagaaacatcaacatcaccaaggacctgctggacctgctggtggaggccaagcaggaggtgcccagctggctggagaacatggcctatgagcaccactacaagggcagcagccggggccgcagcaagagcagccgcttcagcggcggctttggagcccgggactaccggcagagcagcggggccagcagcagcagcttcagcagcagccgggccagcagcagccgcagcggcggcggcggccacggcagcagccggggctttggaggcggcggctatggaggcttctacaacagtgatggctacggcggcaactacaacagccagggcgtggactggtggggcaactag

SEQ ID NO: 149335 - DNA, 420 bp, synthetic construct
  misc_feature 1..420: note = Description of Artificial Sequence: Synthetic coding sequence
  source 1..420: mol_type = other DNA
atgagccacgtggccgtggagaatgccctgggcctggaccagcagtttgctggcctggacctgaacagcagtgacaaccagagcggcggcagcacagccagcaagggccgctacatccccccccacctgaggaaccgggaggccaccaagggcttctatgacaaggacagcagcggctggagcagcagcaaggacaaggatgcctacagcagctttggcagcagaagtgacagccggggcaagagcagcttcttcagtgaccggggcagcggcagccggggccgctttgatgaccggggccgcagtgactatgatggcatcggcagcagaggagacaggagcggctacggcggcttctacaacagtgatggctatggaggcaactacaacagccagggcgtggactggtggggcaactag

SEQ ID NO: 149336 - DNA, 1941 bp, synthetic construct
  misc_feature 1..1941: note = Description of Artificial Sequence: Synthetic coding sequence
  source 1..1941: mol_type = other DNA
atgagccacgtggccgtggagaatgccctgggcctggaccagcagtttgctggcctggacctgaacagcagtgacaaccagagcggcggcagcacagccagcagcttctatgacaaggacagcagcggctggagcagcagcaaggacaaggatgcctacagcagctttggcagcagaagtgacagccggggcaagagcagcttcttcagtgaccggggcagcggcagccggggccgctttgatgaccggggccgcagtgactatgatggcatcggcagcagaggagacaggagcggctttgggaagtttgagcggggcggcaacagccgctggtgtgacaagagtgatgaagatgactggagcaagcccctgcccccatctgagcggctggagcaggagctgttcagcggcggcaacacaggcatcaactttgagaagtatgatgacatccctgtggaggccactggaaacaactgccccccccacatcgagagcttcagtgatgtggagatgggagagatcatcatgggcaacatcgagctgacccgctacacccggcccacccctgtgcagaagcacgccatccccatcatcaaggagaagagggacctgatggcctgtgcccagacaggcagcggcaagacagctgccttcctgctgcccatcctgagccagatctacagtgatggccctggagaggccctgcgggccatgaaggaaaatggccgctatggccgcaggaagcagtaccccatcagcctggtgctggcccccacccgggagctggccgtgcagatctatgaggaggccaggaagttctcctaccgcagccgggtgcggccctgtgtggtgtatggaggagctgacatcggccagcagatccgggacctggagcggggctgccacctgctggtggccaccccaggccgcctggtggacatgatggagcggggcaagattggcctggacttctgcaagtacctggtgctggatgaagctgacaggatgctggacatgggctttgagccccagatccgccgcatcgtggagcaggacaccatgccacccaagggcgtgcgccacaccatgatgttcagcgccaccttccccaaggagatccagatgctggcccgggacttcctggatgagtacatcttcctggccgtgggccgggtgggcagcaccagcgagaacatcacccagaaggtggtgtgggtggaggagagtgacaagaggagcttcctgctggacctgctgaatgccaccgggaaggacagcctgaccctggtgtttgtggagaccaagaagggagctgacagcctggaggacttcctgtaccacgagggctacgcctgcaccagcatccacggggacaggagccagagggaccgggaggaggccctgcaccagttccgcagcggcaagagccccatcctggtggccacagctgtggccgcccggggcctggacatcagcaatgtgaagcacgtgatcaactttgacctgcccagcgacatcgaggagtatgtgcacagaattggaagaacaggccgggtgggcaacctgggcctggccaccagcttcttcaatgaaagaaacatcaacatcaccaaggacctgctggacctgctggtggaggccaagcaggaggtgcccagctggctggagaacatggcctatgagcaccactacaagggcagcagccggggccgcagcaagagcagccgcttcagcggcggctttggagcccgggactaccggcagagcagcggggccagcagcagcagcttcagcagcagccgggccagcagcagccgcagcggcggcggcggccacggcagcagccggggctttggaggcggcggctatggaggcttctacaacagtgatggctacggcggcaactacaacagccagggcgtggactggtggggcaactag

SEQ ID NO: 149337 - DNA, 927 bp, synthetic construct
  misc_feature 1..927: note = Description of Artificial Sequence: Synthetic coding sequence
  source 1..927: mol_type = other DNA
atgagggagagccgcctcatcagtgacctgggcggctttgctggggtgcgctctgctgctggccgggactggaggcccttctggctgggcggcctgcggcccagccggctggcccagcccggcttccccagcggcggccctgggggcacccgctgcctgcgggcctgtgagcagggctttgctggcctggacctgaacagcagtgacaaccagagcggcggcagcacagccagcaagggccgctacatccccccccacctgaggaaccgggaggccaccaagggcttctatgacaaggacagcagcggctggagcagcagcaaggacaaggatgcctacagcagctttggcagcagaagtgacagccggggcaagagcagcttcttcagtgaccggggcagcggcagccggggccgctttgatgaccggggccgcagtgactatgatggcatcggcagcagaggagacaggagcggctttgggaagtttgagcggggcggcaacagccgctggtgtgacaagagtgatgaagatgactggagcaagcccctgcccccatctgagcggctggagcaggagctgttcagcggcggcaacacaggcatcaactttgagaagtatgatgacatccctgtggaggccactggaaacaactgccccccccacatcgagagcttcagtgatgtggagatgggagagatcatcatgggcaacatcgagctgacccgctacacccggcccacccctgtgcagaagcacgccatccccatcatcaaggagaagagggacctgatggcctgtgcccagacaggcaagtggaaggtgtgggccccccagaccatccccaacctgctgggcatcagcaccaatgaaagagtgggcagcacagacctgcggggcagccagaagatcttcatccccatctag

SEQ ID NO: 149338 - DNA, 1983 bp, synthetic construct
  misc_feature 1..1983: note = Description of Artificial Sequence: Synthetic coding sequence
  source 1..1983: mol_type = other DNA
atgagccacgtggtggtgaagaatgaccctgagctggaccagcagctggccaacctggacctgaacagcgagaagcagagcggcggggccagcacagccagcaagggccgctacatccccccccacctgaggaaccgggaggccagcaagggcttccatgacaaggacagcagcggctggagctgcagcaaggacaaggatgcctacagcagctttggcagccgggacagccggggcaagccaggctacttcagcgagcggggcagcggcagccggggccgctttgatgaccggggccgcagtgactatgatggcatcggcaaccgggagcggcccggcttcggccgctttgagaggagcggccacagccgctggtgtgacaagtctgtggaggatgactggagcaagcccctgcccccatctgagcggctggagcaggagctgttcagcggcggcaacacaggcatcaactttgagaagtatgatgacatccctgtggaggccaccggcagcaactgccccccccacatcgagaacttcagtgacatcgacatgggagagatcatcatgggcaacatcgagctgacccgctacacccggcccacccctgtgcagaagcacgccatccccatcatcaagggcaagagggacctgatggcctgtgcccagacaggcagcggcaagacagctgccttcctgctgcccatcctgagccagatctacacagatggccctggagaggccctgaaggctgtgaaggaaaatggccgctatggccgcaggaagcagtaccccatcagcctggtgctggcccccacccgggagctggccgtgcagatctatgaggaggccaggaagttctcctaccgcagccgggtgcggccctgtgtggtgtatggaggagctgacatcggccagcagatccgggacctggagcggggctgccacctgctggtggccaccccaggccgcctggtggacatgatggagcggggcaagattggcctggacttctgcaagtacctggtgctggatgaagctgacaggatgctggacatgggctttgagccccagatccgccgcatcgtggagcaggacaccatgccacccaagggcgtgcgccacaccatgatgttcagcgccaccttccccaaggagatccagatgctggcccgggacttcctggatgagtacatcttcctggccgtgggccgggtgggcagcaccagcgagaacatcacccagaaggtggtgtgggtggaggacctggacaagaggagcttcctgctggacatcctgggcgccaccggcagtgacagcctgaccctggtgtttgtggagaccaagaagggagctgacagcctggaggacttcctgtaccacgagggctacgcctgcaccagcatccacggggacaggagccagagggaccgggaggaggccctgcaccagttccgcagcggcaagagccccatcctggtggccacagctgtggccgcccggggcctggacatcagcaatgtgcgccacgtgatcaactttgacctgcccagcgacatcgaggagtatgtgcacagaattggaagaacaggccgggtgggcaacctgggcctggccaccagcttcttcaatgagaagaacatgaacatcaccaaggacctgctggacctgctggtggaggccaagcaggaggtgcccagctggctggagaacatggcctatgagcaccactacaagggcggcagccggggccgcagcaagagcaaccgcttcagcggcggctttggagcccgggactaccggcagagcagcggcagcagcagcagcggctttggagccagccggggcagcagcagccgcagcggcggcggcggctacggcaacagccggggctttggaggcggcggctatggaggcttctacaacagtgatggctacggcggcaactacaacagccagggcgtggactggtggggcaactag

SEQ ID NO: 149339 - DNA, 1983 bp, synthetic construct; identical to SEQ ID NO: 149338
  misc_feature 1..1983: note = Description of Artificial Sequence: Synthetic coding sequence
  source 1..1983: mol_type = other DNA

SEQ ID NO: 149340 - DNA, 753 bp, synthetic construct
  misc_feature 1..753: note = Description of Artificial Sequence: Synthetic coding sequence
  source 1..753: mol_type = other DNA
atggagatcggccggcccaggaaggacacctggaagctggccaacctggacctgaacagcgagaagcagagcggcggggccagcacagccagcaagggccgctacatccccccccacctgaggaaccgggaggccagcaagggcttccatgacaaggacagcagcggctggagctgcagcaaggacaaggatgcctacagcagctttggcagccgggacagccggggcaagccaggctacttcagcgagcggggcagcggcagccggggccgctttgatgaccggggccgcagtgactatgatggcatcggcaaccgggagaggcctggcttcggccgctttgagaggagcggccacagccgctggtgtgacaagtctgtggaggatgactggagcaagcccctgccccccagcgagcggctggagcaggagctgttcagcggcggcaacacaggcatcaactttgagaagtatgatgacatccctgtggaggccaccggcagcaactgccccccccacatcgagaacttcagtgacatcgacatgggagagatcatcatgggcaacatcgagctgacccgctacacccggcccacccctgtgcagaagcacgccatccccatcatcaagggcaagagggacctgatggcctgtgcccagacaggcagcggcaagacagctgccttcctgctgcccatcctgagccagatctacacagatggccctggagaggccctgaaggctgtgaagtag

SEQ ID NO: 149341 - DNA, 675 bp, synthetic construct
  misc_feature 1..675: note = Description of Artificial Sequence: Synthetic coding sequence
  source 1..675: mol_type = other DNA
atgagccacgtggtggtgaagaatgaccctgagctggaccagcagctggccaacctggacctgaacagcgagaagcagagcggcggggccagcacagccagcaagggccgctacatccccccccacctgaggaaccgggaggccagcaagggcttccatgacaaggacagcagcggctggagctgcagcaaggacaaggatgcctacagcagctttggcagccgggacagccggggcaagccaggctacttcagcgagcggggcagcggcagccggggccgctttgatgaccggggccgcagtgactatgatggcatcggcaaccgggagcggcccggcttcggccgctttgagaggagcggccacagccgctggtgtgacaagtctgtggaggatgactggagcaagcccctgcccccatctgagcggctggagcaggagctgttcagcggcggcaacacaggcatcaactttgagaagtatgatgacatccctgtggaggccaccggcagcaactgccccccccacatcgagaacttcagtgacatcgacatgggagagatcatcatgggcaacatcgagctgacccgctacacccggcccacccctgtgcagaagcacgccatccccatcatcaagggcaagagggacctgatggcctgtgcccagacctag

SEQ ID NO: 149342 - DNA, 1974 bp, synthetic construct
  misc_feature 1..1974: note = Description of Artificial Sequence: Synthetic coding sequence
  source 1..1974: mol_type = other DNA
atggagatcggccggcccaggaaggacacctggaagctggccaacctggacctgaacagcgagaagcagagcggcggggccagcacagccagcaagggccgctacatccccccccacctgaggaaccgggaggccagcaagggcttccatgacaaggacagcagcggctggagctgcagcaaggacaaggatgcctacagcagctttggcagccgggacagccggggcaagccaggctacttcagcgagcggggcagcggcagccggggccgctttgatgaccggggccgcagtgactatgatggcatcggcaaccgggagaggcctggcttcggccgctttgagaggagcggccacagccgctggtgtgacaagtctgtggaggatgactggagcaagcccctgccccccagcgagcggctggagcaggagctgttcagcggcggcaacacaggcatcaactttgagaagtatgatgacatccctgtggaggccaccggcagcaactgccccccccacatcgagaacttcagtgacatcgacatgggagagatcatcatgggcaacatcgagctgacccgctacacccggcccacccctgtgcagaagcacgccatccccatcatcaagggcaagagggacctgatggcctgtgcccagacaggcagcggcaagacagctgccttcctgctgcccatcctgagccagatctacacagatggccctggagaggccctgaaggctgtgaaggaaaatggccgctatggaagaaggaagcagtaccccatcagcctggtgctggcccccacccgggagctggccgtgcagatctatgaggaggccaggaagttctcctaccgcagccgggtgcggccctgtgtggtgtatggaggagctgacatcggccagcagatccgggacctggagcggggctgccacctgctggtggccaccccaggccgcctggtggacatgatggagcggggcaagattggcctggacttctgcaagtacctggtgctggatgaggccgacaggatgctggacatgggctttgagccccagatcagaagaattgtggagcaggacaccatgccacccaagggcgtgcgccacaccatgatgttttctgccaccttccccaaggagatccagatgctggcccgggacttcctggatgagtacatcttcctggccgtgggccgggtgggcagcaccagcgagaacatcacccagaaggtggtgtgggtggaggacctggacaagaggagcttcctgctggacatcctgggcgccactggaagtgacagcctgaccctggtgtttgtggagaccaagaagggagctgacagcctggaggacttcctgtaccacgagggctacgcctgcaccagcatccatggagacaggagccagagggaccgggaggaggccctgcaccagttccgcagcggcaagagccccatcctggtggccacagctgtggccgcccggggcctggacatcagcaatgtgagacatgtgatcaactttgacctgcccagcgacatcgaggagtatgtgcaccgcatcggccgcacaggccgggtgggcaacctgggcctggccaccagcttcttcaatgagaagaacatgaacatcaccaaggacctgctggacctgctggtggaggccaagcaggaggtgcccagctggctggagaacatggcctatgagcaccactacaagggcggcagccggggccgcagcaagagcaaccgcttcagcggcggctttggagcccgggactaccggcagagcagcggcagcagcagcagcggctttggagccagccggggcagcagcagccgcagcggcggcggcggctacggcaacagccggggctttggaggcggcggctacggcggcttctacaacagtgatggctatggaggcaactacaacagccagggcgtggactggtggggcaactag

SEQ ID NO: 149343 - DNA, 1278 bp, synthetic construct
  misc_feature 1..1278: note = Description of Artificial Sequence: Synthetic coding sequence
  source 1..1278: mol_type = other DNA
atggctgaaaatgatgtggacaatgagctgctggactatgaagatgatgaggtggagacagctgctggaggagatggagctgaggccccagccaagaaggatgtgaagggcagctatgtgtccatccacagcagcggcttccgggacttcctgctgaagccagagctgctgcgggccatcgtggactgtggctttgagcaccccagcgaggtgcagcacgagtgcatcccccaggccatcctgggcatggatgtgctgtgccaggccaagagcggcatgggcaagacagctgtgtttgtgctggccaccctgcagcagctggagcctgtgacaggccaggtgtctgtgctggtgatgtgccacacccgggagctggccttccagatcagcaaggagtatgagcgcttcagcaagtacatgcccaacgtgaaggtggccgtgttctttggaggcctgagcatcaagaaggatgaggaggtgctgaagaagaactgcccccacatcgtggtgggcaccccaggccgcatcctggccctggccaggaacaagagcctgaacctgaagcacatcaagcacttcatcctggatgaatgtgacaagatgctggagcagctggacatgagaagagatgtgcaggagatcttcaggatgacccctcatgagaagcaggtgatgatgttcagcgccaccctgagcaaggagatccggcctgtgtgcaggaagttcatgcaggaccccatggagatctttgtggatgatgagaccaagctgaccctgcacggcctgcagcagtactacgtgaagctgaaggacaatgagaagaacaggaagctgtttgacctgctggatgtgctggagttcaaccaggtggtgatctttgtgaagtctgtgcagcgctgcatcgccctggcccagctgctggtggagcagaacttccctgccatcgccatccaccggggcatgccccaggaggagcggctgagccgctaccagcagttcaaggacttccagaggcgcatcctggtggccaccaacctgtttggccggggcatggacatcgagcgggtgaacatcgccttcaactatgacatgcctgaggacagcgacacctacctgcaccgctgctaccccctgagccccagccgctggccagagcaggccggcctggccccccgggcctggctgagccacctgtgccccatgaggatgatgcccaggagctccatgatgtgcagaattgccctgcggagcatcctggtgtcctgcctgatgaggtag

SEQ ID NO: 149344 - DNA, 1287 bp, synthetic construct
  misc_feature 1..1287: note = Description of Artificial Sequence: Synthetic coding sequence
  source 1..1287: mol_type = other DNA
atggctgaaaatgatgtggacaatgagctgctggactatgaagatgatgaggtggagacagctgctggaggagatggagctgaggccccagccaagaaggatgtgaagggcagctatgtgtccatccacagcagcggcttccgggacttcctgctgaagccagagctgctgcgggccatcgtggactgtggctttgagcaccccagcgaggtgcagcacgagtgcatcccccaggccatcctgggcatggatgtgctgtgccaggccaagagcggcatgggcaagacagctgtgtttgtgctggccaccctgcagcagctggagcctgtgacaggccaggtgtctgtgctggtgatgtgccacacccgggagctggccttccagatcagcaaggagtatgagcgcttcagcaagtacatgcccaacgtgaaggtggccgtgttctttggaggcctgagcatcaagaaggatgaggaggtgctgaagaagaactgcccccacatcgtggtgggcaccccaggccgcatcctggccctggccaggaacaagagcctgaacctgaagcacatcaagcacttcatcctggatgaatgtgacaagatgctggagcagctggacatgagaagagatgtgcaggagatcttcaggatgacccctcatgagaagcaggtgatgatgttcagcgccaccctgagcaaggagatccggcctgtgtgcaggaagttcatgcaggaccccatggagatctttgtggatgatgagaccaagctgaccctgcacggcctgcagcagtactacgtgaagctgaaggacaatgagaagaacaggaagctgtttgacctgctggatgtgctggagttcaaccaggtggtgatctttgtgaagtctgtgcagcgctgcatcgccctggcccagctgctggtggagcagaacttccctgccatcgccatccaccggggcatgccccaggaggagcggctgagccgctaccagcagttcaaggacttccagaggcgcatcctggtggccaccaacctgtttggccggggcatggacatcgagcgggtgaacatcgccttcaactatgacatgcctgaggacagcgacacctacctgcaccgggtggcccgggccggccgcttcggcaccaagggcctggccatcacctttgtgtctgatgaaaatgatgccaagatcctgaatgatgtgcaggacagatttgaggtgaacatcagcgagctgcctgatgaaattgacatcagcagctacatcgagcagaccaggtag

SEQ ID NO: 149345 - DNA, 1287 bp, synthetic construct; identical to SEQ ID NO: 149344
  misc_feature 1..1287: note = Description of Artificial Sequence: Synthetic coding sequence
  source 1..1287: mol_type = other DNA

SEQ ID NO: 149346 - DNA, 1278 bp, synthetic construct; identical to SEQ ID NO: 149343
  misc_feature 1..1278: note = Description of Artificial Sequence: Synthetic coding sequence
  source 1..1278: mol_type = other DNA

SEQ ID NO: 149347 - DNA, 1287 bp, synthetic construct; identical to SEQ ID NO: 149344
  misc_feature 1..1287: note = Description of Artificial Sequence: Synthetic coding sequence
  source 1..1287: mol_type = other DNA

SEQ ID NO: 149348 - DNA, 1287 bp, synthetic construct; identical to SEQ ID NO: 149344
  misc_feature 1..1287: note = Description of Artificial Sequence: Synthetic coding sequence
  source 1..1287: mol_type = other DNA

SEQ ID NO: 149349 - DNA, 564 bp, synthetic construct
  misc_feature 1..564: note = Description of Artificial Sequence: Synthetic coding sequence
  source 1..564: mol_type = other DNA
atgggcagcagccacatcggcggcctgagcatcaatgaaagacgctgcagcgccagcctgggcctggtgatggccgagaatgatgtggacaatgagctgctggactatgaagatgatgaggtggagacagctgctggaggagatggagctgaggccccagccaagaaggatgtgaagggcagctatgtgtccatccacagcagcggcttccgggacttcctgctgaagccagagctgctgcgggccatcgtggactgtggctttgagcaccccagcgaggtgcagcacgagtgcatcccccaggccatcctgggcatggatgtgctgtgccaggccaagagcggcatgggcaagacagctgtgtttgtgctggccaccctgcagcagctggagcctgtgacaggccaggtgtctgtgctggtgatgtgccacacccgggagctggccttccagatcagcaaggagtatgagcgcttcagcaagtacatgcccaacgtgaaggtggccgtgttcttcggcggcctgagcatcaagaaggatgaggaggtgctgaagaagaactag

SEQ ID NO: 149350 - DNA, 1287 bp, synthetic construct; identical to SEQ ID NO: 149344
  misc_feature 1..1287: note = Description of Artificial Sequence: Synthetic coding sequence
  source 1..1287: mol_type = other DNA

SEQ ID NO: 149351 - DNA, 378 bp, synthetic construct
  misc_feature 1..378: note = Description of Artificial Sequence: Synthetic coding sequence
  source 1..378: mol_type = other DNA
atggctgaaaatgatgtggacaatgagctgctggactatgaagatgatgaggtggagacagctgctggaggagatggagctgaggccccagccaagaaggatgtgaagggcagctatgtgtccatccacagcagcggcttccgggacttcctgctgaagccagagctgctgcgggccatcgtggactgtggctttgagcaccccagcgaggtgcagcacgagtgcatcccccaggccatcctgggcatggatgtgctgtgccaggccaagagcggcatgggcaagacagctgtgtttgtgctggccaccctgcagcagctggagcctgtgacaggccaggtgtctgtgctggtgatgtgccacacccgggagctgtag

SEQ ID NO: 149352 - DNA, 1287 bp, synthetic construct; identical to SEQ ID NO: 149344
  misc_feature 1..1287: note = Description of Artificial Sequence: Synthetic coding sequence
  source 1..1287: mol_type = other DNA

SEQ ID NO: 149353 - DNA, 564 bp, synthetic construct
  misc_feature 1..564: note = Description of Artificial Sequence: Synthetic coding sequence
  source 1..564: mol_type = other DNA
tgaagtgaggagcgggacatcggcaagcccatggagatctttgtggatgatgagaccaagctgaccctgcacggcctgcagcagtactacgtgaagctgaaggacaatgagaagaacaggaagctgtttgacctgctggatgtgctggagttcaaccaggtggtgatctttgtgaagtctgtgcagcgctgcatcgccctggcccagctgctggtggagcagaacttccctgccatcgccatccaccggggcatgccccaggaggagcggctgagccgctaccagcagttcaaggacttccagaggcgcatcctggtggccaccaacctgtttggccggggcatggacatcgagcgggtgaacatcgccttcaactatgacatgcctgaggacagcgacacctacctgcaccgggtggcccgggccggccgcttcggcaccaagggcctggccatcacctttgtgtctgatgaaaatgatgccaagatcctgaatgatgtgcaggacagatttgaggtgaacatcagcgagctgcctgatgaaattgacatcagcagctactag

SEQ ID NO: 149354 - DNA, 378 bp, synthetic construct; identical to SEQ ID NO: 149351
  misc_feature 1..378: note = Description of Artificial Sequence: Synthetic coding sequence
  source 1..378: mol_type = other DNA

SEQ ID NO: 149355 - DNA, 1287 bp, synthetic construct; identical to SEQ ID NO: 149344
  misc_feature 1..1287: note = Description of Artificial Sequence: Synthetic coding sequence
  source 1..1287: mol_type = other DNA

SEQ ID NO: 149356 - DNA, 870 bp, synthetic construct
  misc_feature 1..870: note = Description of Artificial Sequence: Synthetic coding sequence
  source 1..870: mol_type = other DNA
atggctgaaaatgatgtggacaatgagctgctggactatgaagatgatgaggtggagacagctgctggaggagatggagctgaggccccagccaagaaggatgtgaagggcagctatgtgtccatccacagcagcggcttccgggacttcctgctgaagccagagctgctgcgggccatcgtggactgtggctttgagcaccccagcgaggtgcagcacgagtgcatcccccaggccatcctgggcatggatgtgctgtgccaggccaagagcggcatgggcaagacagctgtgtttgtgctggccaccctgcagcagctggagcctgtgacaggccaggtgtctgtgctggtgatgtgccacacccgggagctggccttccagatcagcaaggagtatgagcgcttcagcaagtacatgcccaacgtgaaggtggccgtgttctttggaggcctgagcatcaagaaggatgaggaggtgctgaagaagaactgcccccacatcgtggtgggcaccccaggccgcatcctggccctggccaggaacaagagcctgaacctgaagcacatcaagcacttcatcctggatgaatgtgacaagatgctggagcagctggacatgagaagagatgtgcaggagatcttcaggatgacccctcatgagaagcaggtgatgatgttcagcgccaccctgagcaaggagatccggcctgtgtgcaggaagttcatgcaggaccccatggagatctttgtggatgatgagaccaagctgaccctgcacggcctgcagcagtactacgtgaagctgaaggacaatgagaagaacaggaagctgtttgacctgctggatgtgctggagttcaaccagtag

SEQ ID NO: 149357 - DNA, 1287 bp, synthetic construct; identical to SEQ ID NO: 149344
  misc_feature 1..1287: note = Description of Artificial Sequence: Synthetic coding sequence
  source 1..1287: mol_type = other DNA

SEQ ID NO: 149358 - DNA, 291 bp, synthetic construct
  misc_feature 1..291: note = Description of Artificial Sequence: Synthetic coding sequence
  source 1..291: mol_type = other DNA
atggctgaaaatgatgtggacaatgagctgctggactatgaagatgatgaggtggagacagctgctggaggagatggagctgaggccccagccaagaaggatgtgaagggcagctatgtgtccatccacagcagcggcttccgggacttcctgctgaagccagagctgctgcgggccatcgtggactgtggctttgagcaccccagcgaggtgcagcacgagtgcatcccccaggccatcctgggcatggatgtgctgtgccaggccaagagcggcatgggcaagacctag

SEQ ID NO: 149359 - DNA, 378 bp, synthetic construct; identical to SEQ ID NO: 149351
  misc_feature 1..378: note = Description of Artificial Sequence: Synthetic coding sequence
  source 1..378: mol_type = other DNA

SEQ ID NO: 149360 - DNA, 696 bp, synthetic construct
  misc_feature 1..696: note = Description of Artificial Sequence: Synthetic coding sequence
  source 1..696: mol_type = other DNA
atggctgaaaatgatgtggacaatgagctgctggactatgaagatgatgaggtggagacagctgctggaggagatggagctgaggccccagccaagaaggatgtgaagggcagctatgtgtccatccacagcagcggcttccgggacttcctgctgaagccagagctgctgcgggccatcgtggactgtggctttgagcaccccagcgaggtgcagcacgagtgcatcccccaggccatcctgggcatggatgtgctgtgccaggccaagagcggcatgggcaagacagctgtgtttgtgctggccaccctgcagcagctggagcctgtgacaggccaggtgtctgtgctggtgatgtgccacacccgggagctggccttccagatcagcaaggagtatgagcgcttcagcaagtacatgcccaacgtgaaggtggccgtgttctttggaggcctgagcatcaagaaggatgaggaggtgctgaagaagaactgcccccacatcgtggtgggcaccccaggccgcatcctggccctggccaggaacaagagcctgaacctgaagcacatcaagcacttcatcctggatgaatgtgacaagatgctggagcagctggacatgagaagagatgtgcaggagatcttcaggatgacccctcatgagaagcaggtgatgatgttcagcgccaccctgtag

SEQ ID NO: 149361 - DNA, 399 bp, synthetic construct
  misc_feature 1..399: note = Description of Artificial Sequence: Synthetic coding sequence
  source 1..399: mol_type = other DNA
atggctgaaaatgatgtggacaatgagctgctggactatgaagatgatgaggtggagacagctgctggaggagatggagctgaggccccagccaagaaggatgtgaagggcagctatgtgtccatccacagcagcggcttccgggacttcctgctgaagccagagctgctgcgggccatcgtggactgtggctttgagcaccccagcgaggtgcagcacgagtgcatcccccaggccatcctgggcatggatgtgctgtgccaggccaagagcggcatgggcaagacagctgtgtttgtgctggccaccctgcagcagctggagcctgtgacaggccaggtgtgcttctgtgacagccacttccccaggggggacaatgaggagctgcacctgccctag

SEQ ID NO: 149362 - DNA, 1053 bp, synthetic construct
  misc_feature 1..1053: note = Description of Artificial Sequence: Synthetic coding sequence
  source 1..1053: mol_type = other DNA
atgtggaccatgagctcctggaccatgaagatgatgcgctggaggcagcagctgggggagatgggcctgcggcccctgcccaggaggatgagccgggcccccatgagccccagcacagccctggcctttgtgaccagctgcagcagccagagctgcagcggccccctgagcacagtggccctgagcatccggcagaaggtggccgtgttctttggaggcctgagcatcaagaaggatgaggaggtgctgaagaagaactgcccccacatcgtggtgggcaccccaggccgcatcctggccctggccaggaacaagagcctgaacctgaagcacatcaagcacttcatcctggatgaatgtgacaagatgctggagcagctggacatgagaagagatgtgcaggagatcttcaggatgacccctcatgagaagcaggtgatgatgttcagcgccaccctgagcaaggagatccggcctgtgtgcaggaagttcatgcaggaccccatggagatctttgtggatgatgagaccaagctgaccctgcacggcctgcagcagtactacgtgaagctgaaggacaatgagaagaacaggaagctgtttgacctgctggatgtgctggagttcaaccaggtggtgatctttgtgaagtctgtgcagcgctgcatcgccctggcccagctgctggtggagcagaacttccctgccatcgccatccaccggggcatgccccaggaggagcggctgagccgctaccagcagttcaaggacttccagaggcgcatcctggtggccaccaacctgtttggccggggcatggacatcgagcgggtgaacatcgccttcaactatgacatgcctgaggacagcgacacctacctgcaccgggtggcccgggccggccgcttcggcaccaagggcctggccatcacctttgtgtctgatgaaaatgatgccaagatcctgaatgatgtgcaggacagatttgaggtgaacatcagcgagctgcctgatgaaattgacatcagcagctacatcgagcagaccaggtag

SEQ ID NO: 149363 - DNA, 738 bp, synthetic construct
  misc_feature 1..738: note = Description of Artificial Sequence: Synthetic coding sequence
  source 1..738: mol_type = other DNA
atgtggaccatgagctcctggaccatgaagatgatgcgctggaggcagcagctgggggagatgggcctgcggcccctgcccaggaggatgagccgggcccccatgagccccagcacagccctggcctttgtgaccagctgcagcagccagagctgcagcggccccctgagcacagtggccctgagcatccggcagaaggtggccgtgttctttggaggcctgagcatcaagaaggatgaggaggtgctgaagaagaactgcccccacatcgtggtgggcaccccaggccgcatcctggccctggccaggaacaagagcctgaacctgaagcacatcaagcacttcatcctggatgaatgtgacaagatgctggagcagctggacatgagaagagatgtgcaggagatcttcaggatgacccctcatgagaagcaggtgatgatgttcagcgccaccctgagcaaggagatccggcctgtgtgcaggaagttcatgcaggaccccatggagatctttgtggatgatgagaccaagctgaccctgcacggcctgcagcagtactacgtgaagctgaaggacaatgagaagaacaggaagctgtttgacctgctggatgtgctggagttcaaccaggtggtgatctttgtgaagtctgtgcagcgctgcatcgccctggcccagctgctggtggagcagaacttccctgccatcgccatccaccggggcatgccccagtag

SEQ ID NO: 149364 - DNA, 411 bp, synthetic construct
  misc_feature 1..411: note = Description of Artificial Sequence: Synthetic coding sequence
  source 1..411: mol_type = other DNA
atgggcggcggcagaagaccctatgatgtgttcttcagcaaggtgatggccgagaatgatgtggacaatgagctgctggactatgaagatgatgaggtggagacagctgctggaggagatggagctgaggccccagccaagaaggatgtgaagggcagctatgtgtccatccacagcagcggcttccgggacttcctgctgaagccagagctgctgcgggccatcgtggactgtggctttgagcaccccagcgaggtgcagcacgagtgcatcccccaggccatcctgggcatggatgtgctgtgccaggccaagagcggcatgggcaagacagctgtgtttgtgctggccaccctgcagcagctggagcctgtgacaggccaggtgtctgtgctggtgatgtgccactag

SEQ ID NO: 149365 - DNA, 1287 bp, synthetic construct; identical to SEQ ID NO: 149344
  misc_feature 1..1287: note = Description of Artificial Sequence: Synthetic coding sequence
  source 1..1287: mol_type = other DNA

SEQ ID NO: 149366 - DNA, 594 bp, synthetic construct
  misc_feature 1..594: note = Description of Artificial Sequence: Synthetic coding sequence
  source 1..594: mol_type = other DNA
atggctgaaaatgatgtggacaatgagctgctggactatgaagatgatgaggtggagacagctgctggaggagatggagctgaggccccagccaagaaggatgtgaagggcagctatgtgtccatccacagcagcggcttccgggacttcctgctgaagccagagctgctgcgggccatcgtggactgtggctttgagcaccccagcgaggtgcagcacgagtgcatcccccaggccatcctgggcatggatgtgctgtgccaggccaagagcggcatgggcaagacagctgtgtttgtgctggccaccctgcagcagctggagcctgtgacaggccaggtgtgcttctgtgacagccacttccccaggggggacaatgaggagctgcacctgccctacgtgtctgtgtacttcctgcccaaggtgtctgtgctggtgatgtgccacacccgggagctggccttccagatcagcaaggagtatgagcgcttcagcaagtacatgcccaacgtgaaggtggccgtgttctttggaggcctgagcatcaagaaggatgaggaggtgctgaagaagaactgcccccacatcgtgtag

SEQ ID NO: 149367 - DNA, 570 bp, synthetic construct
  misc_feature 1..570: note = Description of Artificial Sequence: Synthetic coding sequence
  source 1..570: mol_type = other DNA
tgagccaccctgcagcagctggagcctgtgacaggccaggtgtctgtgctggtgatgtgccacacccgggagctggccttccagatcagcaaggagtatgagcgcttcagcaagtacatgcccaacgtgaaggtggccgtgttctttggaggcctgagcatcaagaaggatgaggaggtgctgaagaagaactgcccccacatcgtggtgggcaccccaggccgcatcctggccctggccaggaacaagagcctgaacctgaagcacatcaagcacttcatcctggatgaatgtgacaagatgctggagcagctggacatgagaagagatgtgcaggagatcttcaggatgacccctcatgagaagcaggtgatgatgttcagcgccaccctgagcaaggagatccggcctgtgtgcaggaagttcatgcaggaccccatggagatctttgtggatgatgagaccaagctgaccctgcacggcctgcagcagtactacgtgaagctgaaggacaatgagaagaacaggaagctgtttgacctgctggatgtgctggagttcaaccagtag

SEQ ID NO: 149368 - DNA, 1287 bp, synthetic construct; identical to SEQ ID NO: 149344
  misc_feature 1..1287: note = Description of Artificial Sequence: Synthetic coding sequence
  source 1..1287: mol_type = other DNA

SEQ ID NO: 149369 - DNA, 711 bp, synthetic construct
  misc_feature 1..711: note = Description of Artificial Sequence: Synthetic coding sequence
  source 1..711: mol_type = other DNA
atggctgaaaatgatgtggacaatgagctgctggactatgaagatgatgaggtggagacagctgctggaggagatggagctgaggccccagccaagaaggatgtgaagggcagctatgtgtccatccacagcagcggcttccgggacttcctgctgaagccagagctgctgcgggccatcgtggactgtggctttgagcaccccagcgaggtgcagcacgagtgcatcccccaggccatcctgggcatggatgtgctgtgccaggccaagagcggcatgggcaagacagctgtgtttgtgctggccaccctgcagcagctggagcctgtgacaggccaggtgtctgtgctggtgatgtgccacacccgggagctggccttccagatcagcaaggagtatgagcgcttcagcaagtacatgcccaacgtgaaggtggccgtgttctttggaggcctgagcatcaagaaggatgaggaggtgctgaagaagaactgcccccacatcgtggtgggcaccccaggccgcatcctggccctggccaggaacaagagcctgaacctgaagcacatcaagcacttcatcctggatgaatgtgacaagatgctggagcagctggacatgagaagagatgtgcaggagatcttcaggatgacccctcatgagaagcaggtgatgatgttcagcgccaccctgagcaaggagatcagatag

SEQ ID NO: 149370 - DNA, 564 bp, synthetic construct
  misc_feature 1..564: note = Description of Artificial Sequence: Synthetic coding sequence
  source 1..564: mol_type = other DNA
atgggcagcagccacatcggcggcctgagcatcaatgaaagaagaagaagtgccagcctgggcctggtgatggccgagaatgatgtggacaatgagctgctggactatgaagatgatgaggtggagacagctgctggaggagatggagctgaggccccagccaagaaggatgtgaagggcagctatgtgtccatccacagcagcggcttccgggacttcctgctgaagccagagctgctgcgggccatcgtggactgtggctttgagcaccccagcgaggtgcagcacgagtgcatcccccaggccatcctgggcatggatgtgctgtgccaggccaagagcggcatgggcaagacagctgtgtttgtgctggccaccctgcagcagctggagcctgtgacaggccaggtgtctgtgctggtgatgtgccacacccgggagctggccttccagatcagcaaggagtatgagcgcttcagcaagtacatgcccaacgtgaaggtggccgtgttcttcggcggcctgagcatcaagaaggatgaggaggtgctgaagaagaactag

SEQ ID NO: 149371 - DNA, 399 bp, synthetic construct; identical to SEQ ID NO: 149361
  misc_feature 1..399: note = Description of Artificial Sequence: Synthetic coding sequence
  source 1..399: mol_type = other DNA

SEQ ID NO: 149372 - DNA, 1332 bp, synthetic construct
  misc_feature 1..1332: note = Description of Artificial Sequence: Synthetic coding sequence
  source 1..1332: mol_type = other DNA
atggctgaaaatgatgtggacaatgagctgctggactatgaagatgatgaggtggagacagctgctggaggagatggagctgaggccccagccaagaaggatgtgaagggcagctatgtgtccatccacagcagcggcttccgggacttcctgctgaagccagagctgctgcgggccatcgtggactgtggctttgagcaccccagcgaggtgcagcacgagtgcatcccccaggccatcctgggcatggatgtgctgtgccaggccaagagcggcatgggcaagacagctgtgtttgtgctggccaccctgcagcagctggagcctgtgacaggccaggtgtacctgggccgggtgctgggccggggcttctggtgtgtgtttgtgtctgtgctggtgatgtgccacacccgggagctggccttccagatcagcaaggagtatgagcgcttcagcaagtacatgcccaacgtgaaggtggccgtgttcttcggcggcctgagcatcaagaaggatgaggaggtgctgaagaagaactgcccccacatcgtggtgggcaccccaggccgcatcctggccctggccaggaacaagagcctgaacctgaagcacatcaagcacttcatcctggatgaatgtgacaagatgctggagcagctggacatgagaagagatgtgcaggagatcttcaggatgacccctcatgagaagcaggtgatgatgttttctgccaccctgagcaaggagatccggcctgtgtgcaggaagttcatgcaggaccccatggagatctttgtggatgatgagaccaagctgaccctgcacggcctgcagcagtactacgtgaagctgaaggacaatgagaagaacaggaagctgtttgacctgctggatgtgctggagttcaaccaggtggtgatctttgtgaagtctgtgcagcgctgcatcgccctggcccagctgctggtggagcagaacttccctgccatcgccatccaccggggcatgccccaggaggagcggctgagccgctaccagcagttcaaggacttccagaggcgcatcctggtggccaccaacctgtttggccggggcatggacatcgagcgggtgaacatcgccttcaactatgacatgccagaagattctgacacctacctgcaccgggtggcccgggccggccgcttcggcaccaagggcctggccatcacctttgtgtctgatgaaaatgatgccaagatcctgaatgatgtgcaggacagatttgaggtgaacatcagcgagctgcctgatgaaattgacatcagcagctacatcgagcagaccaggtag

SEQ ID NO: 149373 - DNA, 870 bp, synthetic construct; identical to SEQ ID NO: 149356
  misc_feature 1..870: note = Description of Artificial Sequence: Synthetic coding sequence
  source 1..870: mol_type = other DNA

SEQ ID NO: 149374 - DNA, 564 bp, synthetic construct; identical to SEQ ID NO: 149353
  misc_feature 1..564: note = Description of Artificial Sequence: Synthetic coding sequence
  source 1..564: mol_type = other DNA

SEQ ID NO: 149375 - DNA, 411 bp, synthetic construct; identical to SEQ ID NO: 149364
  misc_feature 1..411: note = Description of Artificial Sequence: Synthetic coding sequence
  source 1..411: mol_type = other DNA

SEQ ID NO: 149376 - DNA, 411 bp, synthetic construct; identical to SEQ ID NO: 149364
  misc_feature 1..411: note = Description of Artificial Sequence: Synthetic coding sequence
  source 1..411: mol_type = other DNA

SEQ ID NO: 149377 - DNA, 399 bp, synthetic construct; identical to SEQ ID NO: 149361
  misc_feature 1..399: note = Description of Artificial Sequence: Synthetic coding sequence
  source 1..399: mol_type = other DNA

SEQ ID NO: 149378 - DNA, 711 bp, synthetic construct; identical to SEQ ID NO: 149369
  misc_feature 1..711: note = Description of Artificial Sequence: Synthetic coding sequence
  source 1..711: mol_type = other DNA

SEQ ID NO: 149379 - DNA, 378 bp, synthetic construct; identical to SEQ ID NO: 149351
  misc_feature 1..378: note = Description of Artificial Sequence: Synthetic coding sequence
  source 1..378: mol_type = other DNA

SEQ ID NO: 149380 - DNA, 987 bp, synthetic construct
  misc_feature 1..987: note = Description of Artificial Sequence: Synthetic coding sequence
  source 1..987: mol_type = other DNA
tgagccaccctgcagcagctggagcctgtgacaggccaggtgtctgtgctggtgatgtgccacacccgggagctggccttccagatcagcaaggagtatgagcgcttcagcaagtacatgcccaacgtgaaggtggccgtgttctttggaggcctgagcatcaagaaggatgaggaggtgctgaagaagaactgcccccacatcgtggtgggcaccccaggccgcatcctggccctggccaggaacaagagcctgaacctgaagcacatcaagcacttcatcctggatgaatgtgacaagatgctggagcagctggacatgagaagagatgtgcaggagatcttcaggatgacccctcatgagaagcaggtgatgatgttcagcgccaccctgagcaaggagatccggcctgtgtgcaggaagttcatgcaggaccccatggagatctttgtggatgatgagaccaagctgaccctgcacggcctgcagcagtactacgtgaagctgaaggacaatgagaagaacaggaagctgtttgacctgctggatgtgctggagttcaaccaggtggtgatctttgtgaagtctgtgcagcgctgcatcgccctggcccagctgctggtggagcagaacttccctgccatcgccatccaccggggcatgccccaggaggagcggctgagccgctaccagcagttcaaggacttccagaggcgcatcctggtggccaccaacctgtttggccggggcatggacatcgagcgggtgaacatcgccttcaactatgacatgcctgaggacagcgacacctacctgcaccgggtggcccgggccggccgcttcggcaccaagggcctggccatcacctttgtgtctgatgaaaatgatgccaagatcctgaatgatgtgcaggacagatttgaggtgaacatcagcgagctgcctgatgaaattgacatcagcagctacatcgagcagaccaggtag

SEQ ID NO: 149381 - DNA, 711 bp, synthetic construct; identical to SEQ ID NO: 149369
  misc_feature 1..711: note = Description of Artificial Sequence: Synthetic coding sequence
  source 1..711: mol_type = other DNA

SEQ ID NO: 149382 - DNA, 564 bp, synthetic construct; identical to SEQ ID NO: 149353
  misc_feature 1..564: note = Description of Artificial Sequence: Synthetic coding sequence
  source 1..564: mol_type = other DNA

SEQ ID NO: 149383 - DNA, 378 bp, synthetic construct; identical to SEQ ID NO: 149351
  misc_feature 1..378: note = Description of Artificial Sequence: Synthetic coding sequence
  source 1..378: mol_type = other DNA

SEQ ID NO: 149384 - DNA, 291 bp, synthetic construct; identical to SEQ ID NO: 149358
  misc_feature 1..291: note = Description of Artificial Sequence: Synthetic coding sequence
  source 1..291: mol_type = other DNA

SEQ ID NO: 149385 - DNA, 378 bp, synthetic construct; identical to SEQ ID NO: 149351
  misc_feature 1..378: note = Description of Artificial Sequence: Synthetic coding sequence
  source 1..378: mol_type = other DNA

SEQ ID NO: 149386 - DNA, 987 bp, synthetic construct; identical to SEQ ID NO: 149380
  misc_feature 1..987: note = Description of Artificial Sequence: Synthetic coding sequence
  source 1..987: mol_type = other DNA

SEQ ID NO: 149387 - DNA, 870 bp, synthetic construct; identical to SEQ ID NO: 149356
  misc_feature 1..870: note = Description of Artificial Sequence: Synthetic coding sequence
  source 1..870: mol_type = other DNA

SEQ ID NO: 149388 - DNA, 738 bp, synthetic construct; identical to SEQ ID NO: 149363
  misc_feature 1..738: note = Description of Artificial Sequence: Synthetic coding sequence
  source 1..738: mol_type = other DNA

SEQ ID NO: 149389 - DNA, 738 bp, synthetic construct; identical to SEQ ID NO: 149363
  misc_feature 1..738: note = Description of Artificial Sequence: Synthetic coding sequence
  source 1..738: mol_type = other DNA

SEQ ID NO: 149390 - DNA, 396 bp, synthetic construct
  misc_feature 1..396: note = Description of Artificial Sequence: Synthetic coding sequence
  source 1..396: mol_type = other DNA
tgagccaccctgcagcagctggagcctgtgacaggccaggtgtctgtgctggtgatgtgccacacccgggagctggccttccagatcagcaaggagtatgagcgcttcagcaagtacatgcccaacgtgaaggtggccgtgttctttggaggcctgagcatcaagaaggatgaggaggtgctgaagaagaactgcccccacatcgtggtgggcaccccaggccgcatcctggccctggccaggaacaagagcctgaacctgaagcacatcaagcacttcatcctggatgaatgtgacaagatgctggagcagctggacatgagaagagatgtgcaggagatcttcaggatgacccctcatgagaagcaggtgatgatgttcagcgccaccctgtag

SEQ ID NO: 149391 - DNA, 411 bp, synthetic construct
  misc_feature 1..411: note = Description of Artificial Sequence: Synthetic coding sequence
  source 1..411: mol_type = other DNA
tgagccaccctgcagcagctggagcctgtgacaggccaggtgtctgtgctggtgatgtgccacacccgggagctggccttccagatcagcaaggagtatgagcgcttcagcaagtacatgcccaacgtgaaggtggccgtgttctttggaggcctgagcatcaagaaggatgaggaggtgctgaagaagaactgcccccacatcgtggtgggcaccccaggccgcatcctggccctggccaggaacaagagcctgaacctgaagcacatcaagcacttcatcctggatgaatgtgacaagatgctggagcagctggacatgagaagagatgtgcaggagatcttcaggatgacccctcatgagaagcaggtgatgatgttcagcgccaccctgagcaaggagatcagatag

SEQ ID NO: 149392 - DNA, 717 bp, synthetic construct
  misc_feature 1..717: note = Description of Artificial Sequence: Synthetic coding sequence
  source 1..717: mol_type = other DNA
atggctgaaaatgatgtggacaatgagctgctggactatgaagatgatgaggtggagacagctgctggaggagatggagctgaggccccagccaagaaggatgtgaagggcagctatgtgtccatccacagcagcggcttccgggacttcctgctgaagccagagctgctgcgggccatcgtggactgtggctttgagcaccccagcgaggtgcagcacgagtgcatcccccaggccatcctgggcatggatgtgctgtgccaggccaagagcggcatgggcaagacagctgtgtttgtgctggccaccctgcagcagctggagcctgtgacaggccaggtgtctgtgctggtgatgtgccacacccgggagctggccttccagatcagcaaggagtatgagcgcttcagcaagtacatgcccaacgtgaaggtggccgtgttctttggaggcctgagcatcaagaaggatgaggaggtgctgaagaagaactgcccccacatcgtggtgggcaccccaggccgcatcctggccctggccaggaacaagagcctgaacctgaagcacatcaagcacttcatcctggatgaatgtgacaagatgctggagcagctggacatgagaagagatgtgcaggagatcttcaggatgacccctcatgagaagcaggtgatgatgttcagcgccaccctgagcaaggagatccggcctgtgtag

SEQ ID NO: 149393 - DNA, 564 bp, synthetic construct; identical to SEQ ID NO: 149353
  misc_feature 1..564: note = Description of Artificial Sequence: Synthetic coding sequence
  source 1..564: mol_type = other DNA

SEQ ID NO: 149394 - DNA, 594 bp, synthetic construct; identical to SEQ ID NO: 149366
  misc_feature 1..594: note = Description of Artificial Sequence: Synthetic coding sequence
  source 1..594: mol_type = other DNA

SEQ ID NO: 149395 - DNA, 594 bp, synthetic construct; identical to SEQ ID NO: 149366
  misc_feature 1..594: note = Description of Artificial Sequence: Synthetic coding sequence
  source 1..594: mol_type = other DNA

SEQ ID NO: 149396 - DNA, 411 bp, synthetic construct; identical to SEQ ID NO: 149364
  misc_feature 1..411: note = Description of Artificial Sequence: Synthetic coding sequence
  source 1..411: mol_type = other DNA

SEQ ID NO: 149397 - DNA, 1278 bp, synthetic construct; identical to SEQ ID NO: 149343
  misc_feature 1..1278: note = Description of Artificial Sequence: Synthetic coding sequence
  source 1..1278: mol_type = other DNA

SEQ ID NO: 149398 - DNA, 1287 bp, synthetic construct; identical to SEQ ID NO: 149344
  misc_feature 1..1287: note = Description of Artificial Sequence: Synthetic coding sequence
  source 1..1287: mol_type = other DNA

SEQ ID NO: 149399 - DNA, 1287 bp, synthetic construct; identical to SEQ ID NO: 149344
  misc_feature 1..1287: note = Description of Artificial Sequence: Synthetic coding sequence
  source 1..1287: mol_type = other DNA

SEQ ID NO: 149400 - DNA, 738 bp, synthetic construct; identical to SEQ ID NO: 149363
  misc_feature 1..738: note = Description of Artificial Sequence: Synthetic coding sequence
  source 1..738: mol_type = other DNA

SEQ ID NO: 149401 - DNA, 696 bp, synthetic construct; identical to SEQ ID NO: 149360
  misc_feature 1..696: note = Description of Artificial Sequence: Synthetic coding sequence
  source 1..696: mol_type = other DNA

SEQ ID NO: 149402 - DNA, 594 bp, synthetic construct; identical to SEQ ID NO: 149366
  misc_feature 1..594: note = Description of Artificial Sequence: Synthetic coding sequence
  source 1..594: mol_type = other DNA

SEQ ID NO: 149403 - DNA, 594 bp, synthetic construct; identical to SEQ ID NO: 149366
  misc_feature 1..594: note = Description of Artificial Sequence: Synthetic coding sequence
  source 1..594: mol_type = other DNA

SEQ ID NO: 149404 - DNA, 540 bp, synthetic construct
  misc_feature 1..540: note = Description of Artificial Sequence: Synthetic coding sequence
  source 1..540: mol_type = other DNA
gtggccgtgttctttggaggcctgagcatcaagaaggatgaggaggtgctgaagaagaactgcccccacatcgtggtgggcaccccaggccgcatcctggccctggccaggaacaagagcctgaacctgaagcacatcaagcacttcatcctggatgaatgtgacaagatgctggagcagctggacatgagaagagatgtgcaggagatcttcaggatgacccctcatgagaagcaggtgatgatgttcagcgccaccctgagcaaggagatccggcctgtgtgcaggaagttcatgcaggaccccatggagatctttgtggatgatgagaccaagctgaccctgcacggcctgcagcagtactacgtgaagctgaaggacaatgagaagaacaggaagctgtttgacctgctggatgtgctggagttcaaccaggtggtgatctttgtgaagtctgtgcagcgctgcatcgccctggcccagctgctggtggagcagaacttccctgccatcgccatccaccggggcatgccccagtag

SEQ ID NO: 149405 - DNA, 594 bp, synthetic construct; identical to SEQ ID NO: 149366
  misc_feature 1..594: note = Description of Artificial Sequence: Synthetic coding sequence
  source 1..594: mol_type = other DNA

SEQ ID NO: 149406 - DNA, 564 bp, synthetic construct; identical to SEQ ID NO: 149353
  misc_feature 1..564: note = Description of Artificial Sequence: Synthetic coding sequence
  source 1..564: mol_type = other DNA

SEQ ID NO: 149407 - DNA, 195 bp, synthetic construct
  misc_feature 1..195: note = Description of Artificial Sequence: Synthetic coding sequence
  source 1..195: mol_type = other DNA
tgagccaccctgcagcagctggagcctgtgacaggccaggtgtctgtgctggtgatgtgccacacccgggagctggccttccagatcagcaaggagtatgagcgcttcagcaagtacatgcccaacgtgaaggtggccgtgttctttggaggcctgagcatcaagaaggatgaggaggtgctgaagaagaactag

SEQ ID NO: 149408 - DNA, 78 bp, synthetic construct
  misc_feature 1..78: note = Description of Artificial Sequence: Synthetic coding sequence
  source 1..78: mol_type = other DNA
tgagccaccctgcagcagctggagcctgtgacaggccaggtgtctgtgctggtgatgtgccacacccgggagctgtag

SEQ ID NO: 149409 - DNA, 66 bp, synthetic construct
  misc_feature 1..66: note = Description of Artificial Sequence: Synthetic coding sequence
  source 1..66: mol_type = other DNA
tgagccaccctgcagcagctggagcctgtgacaggccaggtgtctgtgctggtgatgtgccactag

SEQ ID NO: 149410 - DNA, 870 bp, synthetic construct; identical to SEQ ID NO: 149356
  misc_feature 1..870: note = Description of Artificial Sequence: Synthetic coding sequence
  source 1..870: mol_type = other DNA

SEQ ID NO: 149411 - DNA, 711 bp, synthetic construct; identical to SEQ ID NO: 149369
  misc_feature 1..711: note = Description of Artificial Sequence: Synthetic coding sequence
  source 1..711: mol_type = other DNA

SEQ ID NO: 149412 - DNA, 711 bp, synthetic construct; identical to SEQ ID NO: 149369
  misc_feature 1..711: note = Description of Artificial Sequence: Synthetic coding sequence
  source 1..711: mol_type = other DNA

SEQ ID NO: 149413 - DNA, 978 bp, synthetic construct
  misc_feature 1..978: note = Description of Artificial Sequence: Synthetic coding sequence
  source 1..978: mol_type = other DNA
tgagccaccctgcagcagctggagcctgtgacaggccaggtgtctgtgctggtgatgtgccacacccgggagctggccttccagatcagcaaggagtatgagcgcttcagcaagtacatgcccaacgtgaaggtggccgtgttctttggaggcctgagcatcaagaaggatgaggaggtgctgaagaagaactgcccccacatcgtggtgggcaccccaggccgcatcctggccctggccaggaacaagagcctgaacctgaagcacatcaagcacttcatcctggatgaatgtgacaagatgctggagcagctggacatgagaagagatgtgcaggagatcttcaggatgacccctcatgagaagcaggtgatgatgttcagcgccaccctgagcaaggagatccggcctgtgtgcaggaagttcatgcaggaccccatggagatctttgtggatgatgagaccaagctgaccctgcacggcctgcagcagtactacgtgaagctgaaggacaatgagaagaacaggaagctgtttgacctgctggatgtgctggagttcaaccaggtggtgatctttgtgaagtctgtgcagcgctgcatcgccctggcccagctgctggtggagcagaacttccctgccatcgccatccaccggggcatgccccaggaggagcggctgagccgctaccagcagttcaaggacttccagaggcgcatcctggtggccaccaacctgtttggccggggcatggacatcgagcgggtgaacatcgccttcaactatgacatgcctgaggacagcgacacctacctgcaccgctgctaccccctgagccccagccgctggccagagcaggccggcctggccccccgggcctggctgagccacctgtgccccatgaggatgatgcccaggagctccatgatgtgcagaattgccctgcggagcatcctggtgtcctgcctgatgaggtag

SEQ ID NO: 149414 - DNA, 717 bp, synthetic construct; identical to SEQ ID NO: 149392
  misc_feature 1..717: note = Description of Artificial Sequence: Synthetic coding sequence
  source 1..717: mol_type = other DNA

SEQ ID NO: 149415 - DNA, 717 bp, synthetic construct; identical to SEQ ID NO: 149392
  misc_feature 1..717: note = Description of Artificial Sequence: Synthetic coding sequence
  source 1..717: mol_type = other DNA

SEQ ID NO: 149416 - DNA, 870 bp, synthetic construct; identical to SEQ ID NO: 149356
  misc_feature 1..870: note = Description of Artificial Sequence: Synthetic coding sequence
  source 1..870: mol_type = other DNA

SEQ ID NO: 149417 - DNA, 1278 bp, synthetic construct; identical to SEQ ID NO: 149343
  misc_feature 1..1278: note = Description of Artificial Sequence: Synthetic coding sequence
  source 1..1278: mol_type = other DNA

SEQ ID NO: 149418 - DNA, 411 bp, synthetic construct; identical to SEQ ID NO: 149364
  misc_feature 1..411: note = Description of Artificial Sequence: Synthetic coding sequence
  source 1..411: mol_type = other DNA

SEQ ID NO: 149419 - DNA, 564 bp, synthetic construct; identical to SEQ ID NO: 149349
  misc_feature 1..564: note = Description of Artificial Sequence: Synthetic coding sequence
  source 1..564: mol_type = other DNA

SEQ ID NO: 149420 - DNA, 399 bp, synthetic construct; identical to SEQ ID NO: 149361
  misc_feature 1..399: note = Description of Artificial Sequence: Synthetic coding sequence
  source 1..399: mol_type = other DNA

SEQ ID NO: 149421 - DNA, 870 bp, synthetic construct; identical to SEQ ID NO: 149356
  misc_feature 1..870: note = Description of Artificial Sequence: Synthetic coding sequence
  source 1..870: mol_type = other DNA

SEQ ID NO: 149422 - DNA, 1287 bp, synthetic construct; identical to SEQ ID NO: 149344
  misc_feature 1..1287: note = Description of Artificial Sequence: Synthetic coding sequence
  source 1..1287: mol_type = other DNA

SEQ ID NO: 149423 - DNA, 564 bp, synthetic construct; identical to SEQ ID NO: 149349
  misc_feature 1..564: note = Description of Artificial Sequence: Synthetic coding sequence
  source 1..564: mol_type = other DNA

SEQ ID NO: 149424 - DNA, 291 bp, synthetic construct; identical to SEQ ID NO: 149358
  misc_feature 1..291: note = Description of Artificial Sequence: Synthetic coding sequence
  source 1..291: mol_type = other DNA

SEQ ID NO: 149425 - DNA, 564 bp, synthetic construct; identical to SEQ ID NO: 149349
  misc_feature 1..564: note = Description of Artificial Sequence: Synthetic coding sequence
  source 1..564: mol_type = other DNA

SEQ ID NO: 149426 - DNA, 594 bp, synthetic construct; identical to SEQ ID NO: 149366
  misc_feature 1..594: note = Description of Artificial Sequence: Synthetic coding sequence
  source 1..594: mol_type = other DNA

SEQ ID NO: 149427 - DNA, 291 bp, synthetic construct; identical to SEQ ID NO: 149358
  misc_feature 1..291: note = Description of Artificial Sequence: Synthetic coding sequence
  source 1..291: mol_type = other DNA

SEQ ID NO: 149428 - DNA, 696 bp, synthetic construct; identical to SEQ ID NO: 149360
  misc_feature 1..696: note = Description of Artificial Sequence: Synthetic coding sequence
  source 1..696: mol_type = other DNA

SEQ ID NO: 149429 - DNA, 696 bp, synthetic construct; identical to SEQ ID NO: 149360
  misc_feature 1..696: note = Description of Artificial Sequence: Synthetic coding sequence
  source 1..696: mol_type = other DNA

SEQ ID NO: 149430 - DNA, 717 bp, synthetic construct; identical to SEQ ID NO: 149392
  misc_feature 1..717: note = Description of Artificial Sequence: Synthetic coding sequence
  source 1..717: mol_type = other DNA

SEQ ID NO: 149431 - DNA, 1287 bp, synthetic construct; identical to SEQ ID NO: 149344
  misc_feature 1..1287: note = Description of Artificial Sequence: Synthetic coding sequence
  source 1..1287: mol_type = other DNA

SEQ ID NO: 149432 - DNA, 564 bp, synthetic construct; identical to SEQ ID NO: 149353
  misc_feature 1..564: note = Description of Artificial Sequence: Synthetic coding sequence
  source 1..564: mol_type = other DNA

SEQ ID NO: 149433 - DNA, 564 bp, synthetic construct; identical to SEQ ID NO: 149349
  misc_feature 1..564: note = Description of Artificial Sequence: Synthetic coding sequence
  source 1..564: mol_type = other DNA

SEQ ID NO: 149434 - DNA, 717 bp, synthetic construct; identical to SEQ ID NO: 149392
  misc_feature 1..717: note = Description of Artificial Sequence: Synthetic coding sequence
  source 1..717: mol_type = other DNA

SEQ ID NO: 149435 - DNA, 738 bp, synthetic construct; identical to SEQ ID NO: 149363
  misc_feature 1..738: note = Description of Artificial Sequence: Synthetic coding sequence
  source 1..738: mol_type = other DNA

SEQ ID NO: 149436 - DNA, 1278 bp, synthetic construct; identical to SEQ ID NO: 149343
  misc_feature 1..1278: note = Description of Artificial Sequence: Synthetic coding sequence
  source 1..1278: mol_type = other DNA

SEQ ID NO: 149437 - DNA, 711 bp, synthetic construct; identical to SEQ ID NO: 149369
  misc_feature 1..711: note = Description of Artificial Sequence: Synthetic coding sequence
  source 1..711: mol_type = other DNA

SEQ ID NO: 149438 - DNA, 738 bp, synthetic construct; identical to SEQ ID NO: 149363
  misc_feature 1..738: note = Description of Artificial Sequence: Synthetic coding sequence
  source 1..738: mol_type = other DNA

SEQ ID NO: 149439 - DNA, 1287 bp, synthetic construct; identical to SEQ ID NO: 149344
  misc_feature 1..1287: note = Description of Artificial Sequence: Synthetic coding sequence
  source 1..1287: mol_type = other DNA

SEQ ID NO: 149440 - DNA, 411 bp, synthetic construct; identical to SEQ ID NO: 149364
  misc_feature 1..411: note = Description of Artificial Sequence: Synthetic coding sequence
  source 1..411: mol_type = other DNA

SEQ ID NO: 149441 - DNA, 987 bp, synthetic construct; identical to SEQ ID NO: 149380
  misc_feature 1..987: note = Description of Artificial Sequence: Synthetic coding sequence
  source 1..987: mol_type = other DNA

SEQ ID NO: 149442 - DNA, 399 bp, synthetic construct; identical to SEQ ID NO: 149361
  misc_feature 1..399: note = Description of Artificial Sequence: Synthetic coding sequence
  source 1..399: mol_type = other DNA

SEQ ID NO: 149443 - DNA, 420 bp, synthetic construct
  misc_feature 1..420: note = Description of Artificial Sequence: Synthetic coding sequence
  source 1..420: mol_type = other DNA
atggctgaaaatgatgtggacaatgagctgctggactatgaagatgatgaggtggagacagctgctggaggagatggagctgaggccccagccaagaaggatgtgaagggcagctatgtgtccatccacagcagcggcttccgggacttcctgctgaagccagagctgctgcgggccatcgtggactgtggctttgagcaccccagcgaggtgcagcacgagtgcatcccccaggccatcctgggcatggatgtgctgtgccaggccaagagcggcatgggcaagacagctgtgtttgtgctggccaccctgcagcagctggagcctgtgacaggccagagccatgagcacatgacctctgtgaccctggacaacctgacagctgtgggagatgtgctgagccaggcctggggcagctag

SEQ ID NO: 149444 - DNA, 717 bp, synthetic construct; identical to SEQ ID NO: 149392
  misc_feature 1..717: note = Description of Artificial Sequence: Synthetic coding sequence
  source 1..717: mol_type = other DNA

SEQ ID NO: 149445 - DNA, 564 bp, synthetic construct; identical to SEQ ID NO: 149370
  misc_feature 1..564: note = Description of Artificial Sequence: Synthetic coding sequence
  source 1..564: mol_type = other DNA

SEQ ID NO: 149446 - DNA, 711 bp, synthetic construct; identical to SEQ ID NO: 149369
  misc_feature 1..711: note = Description of Artificial Sequence: Synthetic coding sequence
  source 1..711: mol_type = other DNA

SEQ ID NO: 149447 - DNA, 1278 bp, synthetic construct; identical to SEQ ID NO: 149343
  misc_feature 1..1278: note = Description of Artificial Sequence: Synthetic coding sequence
  source 1..1278: mol_type = other DNA

SEQ ID NO: 149448 - DNA, 696 bp, synthetic construct; identical to SEQ ID NO: 149360
  misc_feature 1..696: note = Description of Artificial Sequence: Synthetic coding sequence
  source 1..696: mol_type = other DNA

SEQ ID NO: 149449 - DNA, 99 bp, synthetic construct
  misc_feature 1..99: note = Description of Artificial Sequence: Synthetic coding sequence
  source 1..99: mol_type = other DNA
tgagccaccctgcagcagctggagcctgtgacaggccaggtgtgcttctgtgacagccacttccccaggggggacaatgaggagctgcacctgccctag

SEQ ID NO: 149450 - DNA, 399 bp, synthetic construct; identical to SEQ ID NO: 149361
  misc_feature 1..399: note = Description of Artificial Sequence: Synthetic coding sequence
  source 1..399: mol_type = other DNA

SEQ ID NO: 149451 - DNA, 399 bp, synthetic construct; identical to SEQ ID NO: 149361
  misc_feature 1..399: note = Description of Artificial Sequence: Synthetic coding sequence
  source 1..399: mol_type = other DNA

SEQ ID NO: 149452 - DNA, 738 bp, synthetic construct; identical to SEQ ID NO: 149363
  misc_feature 1..738: note = Description of Artificial Sequence: Synthetic coding sequence
  source 1..738: mol_type = other DNA

SEQ ID NO: 149453 - DNA, 696 bp, synthetic construct; identical to SEQ ID NO: 149360
  misc_feature 1..696: note = Description of Artificial Sequence: Synthetic coding sequence
  source 1..696: mol_type = other DNA

SEQ ID NO: 149454 - DNA, 732 bp, synthetic construct
  misc_feature 1..732: note = Description of Artificial Sequence: Synthetic coding sequence
  source 1..732: mol_type = other DNA
atgtggaccatgagctcctggaccatgaagatgatgcgctggaggcagcagctgggggagatgggcctgcggcccctgcccaggaggatgagccgggcccccatgagccccagcacagccctggcctttgtgaccagctgcagcagccagagctgcagcggccccctgagcacagtggccctgagcatccggcagaaggtgtctgtgctggtgatgtgccacacccgggagctggccttccagatcagcaaggagtatgagcgcttcagcaagtacatgcccaacgtgaaggtggccgtgttcttcggcggcctgagcatcaagaaggatgaggaggtgctgaagaagaactgcccccacatcgtggtgggcaccccaggccgcatcctggccctggccaggaacaagagcctgaacctgaagcacatcaagcacttcatcctggatgaatgtgacaagatgctggagcagctggacatgagaagagatgtgcaggagatcttcaggatgacccctcatgagaagcaggtgatgatgttttctgccaccctgagcaaggagatccggcctgtgtgcaggaagttcatgcaggatgtgaacaccctgctgcccagcctgccccccctgcctgcccgctgcctgctgcccttcctggccctcttcctgcggctgccctgccacagcagcgccaagaaggccgcctgtgcccagctgggcgtgatgaccccctag

SEQ ID NO: 149455 - DNA, 1287 bp, synthetic construct; identical to SEQ ID NO: 149344
  misc_feature 1..1287: note = Description of Artificial Sequence: Synthetic coding sequence
  source 1..1287: mol_type = other DNA

SEQ ID NO: 149456 - DNA, 1278 bp, synthetic construct; identical to SEQ ID NO: 149343
  misc_feature 1..1278: note = Description of Artificial Sequence: Synthetic coding sequence
  source 1..1278: mol_type = other DNA

SEQ ID NO: 149457 - DNA, 291 bp, synthetic construct; identical to SEQ ID NO: 149358
  misc_feature 1..291: note = Description of Artificial Sequence: Synthetic coding sequence
  source 1..291: mol_type = other DNA

SEQ ID NO: 149458 - DNA, 411 bp, synthetic construct; identical to SEQ ID NO: 149364
  misc_feature 1..411: note = Description of Artificial Sequence: Synthetic coding sequence
  source 1..411: mol_type = other DNA

SEQ ID NO: 149459 - DNA, 564 bp, synthetic construct; identical to SEQ ID NO: 149353
  misc_feature 1..564: note = Description of Artificial Sequence: Synthetic coding sequence
  source 1..564: mol_type = other DNA

SEQ ID NO: 149460 - DNA, 717 bp, synthetic construct; identical to SEQ ID NO: 149392
  misc_feature 1..717: note = Description of Artificial Sequence: Synthetic coding sequence
  source 1..717: mol_type = other DNA

SEQ ID NO: 149461 - DNA, 417 bp, synthetic construct
  misc_feature 1..417: note = Description of Artificial Sequence: Synthetic coding sequence
  source 1..417: mol_type = other DNA
tgagccaccctgcagcagctggagcctgtgacaggccaggtgtctgtgctggtgatgtgccacacccgggagctggccttccagatcagcaaggagtatgagcgcttcagcaagtacatgcccaacgtgaaggtggccgtgttctttggaggcctgagcatcaagaaggatgaggaggtgctgaagaagaactgcccccacatcgtggtgggcaccccaggccgcatcctggccctggccaggaacaagagcctgaacctgaagcacatcaagcacttcatcctggatgaatgtgacaagatgctggagcagctggacatgagaagagatgtgcaggagatcttcaggatgacccctcatgagaagcaggtgatgatgttcagcgccaccctgagcaaggagatccggcctgtgtag

SEQ ID NO: 149462 - DNA, 870 bp, synthetic construct; identical to SEQ ID NO: 149356
  misc_feature 1..870: note = Description of Artificial Sequence: Synthetic coding sequence
  source 1..870: mol_type = other DNA

SEQ ID NO: 149463 - DNA, 1287 bp, synthetic construct; identical to SEQ ID NO: 149344
  misc_feature 1..1287: note = Description of Artificial Sequence: Synthetic coding sequence
  source 1..1287: mol_type = other DNA

SEQ ID NO: 149464 - DNA, 696 bp, synthetic construct; identical to SEQ ID NO: 149360
  misc_feature 1..696: note = Description of Artificial Sequence: Synthetic coding sequence
  source 1..696: mol_type = other DNA

SEQ ID NO: 149465 - DNA, 1287 bp, synthetic construct; identical to SEQ ID NO: 149344
  misc_feature 1..1287: note = Description of Artificial Sequence: Synthetic coding sequence
  source 1..1287: mol_type = other DNA

SEQ ID NO: 149466 - DNA, 378 bp, synthetic construct; identical to SEQ ID NO: 149351
  misc_feature 1..378: note = Description of Artificial Sequence: Synthetic coding sequence
  source 1..378: mol_type = other DNA

SEQ ID NO: 149467 - DNA, 294 bp, synthetic construct
  misc_feature 1..294: note = Description of Artificial Sequence: Synthetic coding sequence
  source 1..294: mol_type = other DNA
tgagccaccctgcagcagctggagcctgtgacaggccaggtgtgcttctgtgacagccacttccccaggggggacaatgaggagctgcacctgccctacgtgtctgtgtacttcctgcccaaggtgtctgtgctggtgatgtgccacacccgggagctggccttccagatcagcaaggagtatgagcgcttcagcaagtacatgcccaacgtgaaggtggccgtgttctttggaggcctgagcatcaagaaggatgaggaggtgctgaagaagaactgcccccacatcgtgtag

SEQ ID NO: 149468 - DNA, 291 bp, synthetic construct; identical to SEQ ID NO: 149358
  misc_feature 1..291: note = Description of Artificial Sequence: Synthetic coding sequence
  source 1..291: mol_type = other DNA

SEQ ID NO: 149469 - DNA, 291 bp, synthetic construct; identical to SEQ ID NO: 149358
  misc_feature 1..291: note = Description of Artificial Sequence: Synthetic coding sequence
  source 1..291: mol_type = other DNA

SEQ ID NO: 149470 - DNA, 1287 bp, synthetic construct; identical to SEQ ID NO: 149344
  misc_feature 1..1287: note = Description of Artificial Sequence: Synthetic coding sequence
  source 1..1287: mol_type = other DNA

SEQ ID NO: 149471 - DNA, 732 bp, synthetic construct; identical to SEQ ID NO: 149454
  misc_feature 1..732: note = Description of Artificial Sequence: Synthetic coding sequence
  source 1..732: mol_type = other DNA

SEQ ID NO: 149472 - DNA, 972 bp, synthetic construct
  misc_feature 1..972: note = Description of Artificial Sequence: Synthetic coding sequence
  source 1..972: mol_type = other DNA
atggctgaaaatgatgtggacaatgagctgctggactatgaagatgatgaggtggagacagctgctggaggagatggagctgaggccccagccaagaaggatgtgaagggcagctatgtgtccatccacagcagcggcttccgggacttcctgctgaagccagagctgctgcgggccatcgtggactgtggctttgagcaccccagcgaggtgcagcacgagtgcatcccccaggccatcctgggcatggatgtgctgtgccaggccaagagcggcatgggcaagacagctgtgtttgtgctggccaccctgcagcagctggagcctgtgacaggccaggtgtctgtgctggtgatgtgccacacccgggagctggccttccagatcagcaaggagtatgagcgcttcagcaagtacatgcccaacgtgaaggtggccgtgttctttggaggcctgagcatcaagaaggatgaggaggtgctgaagaagaactgcccccacatcgtggtgggcaccccaggccgcatcctggccctggccaggaacaagagcctgaacctgaagcacatcaagcacttcatcctggatgaatgtgacaagatgctggagcagctggacatgagaagagatgtgcaggagatcttcaggatgacccctcatgagaagcaggtgatgatgttcagcgccaccctgagcaaggagatccggcctgtgtgcaggaagttcatgcaggaccccatggagatctttgtggatgatgagaccaagctgaccctgcacggcctgcagcagtactacgtgaagctgaaggacaatgagaagaacaggaagctgtttgacctgctggatgtgctggagttcaaccaggagatcacctgcaagtctgtgcagcgcttcagcaccaccaacagctgtggctaccagcccatctggcccaggcatggccaccgggccggggagcactgcttctag

SEQ ID NO: 149473 - DNA, 972 bp, synthetic construct; identical to SEQ ID NO: 149472
  misc_feature 1..972: note = Description of Artificial Sequence: Synthetic coding sequence
  source 1..972: mol_type = other DNA

SEQ ID NO: 149474 - DNA, 1332 bp, synthetic construct; identical to SEQ ID NO: 149372
  misc_feature 1..1332: note = Description of Artificial Sequence: Synthetic coding sequence
  source 1..1332: mol_type = other DNA

SEQ ID NO: 149475 - DNA, 732 bp, synthetic construct; identical to SEQ ID NO: 149454
  misc_feature 1..732: note = Description of Artificial Sequence: Synthetic coding sequence
  source 1..732: mol_type = other DNA

SEQ ID NO: 149476 - DNA, 1332 bp, synthetic construct; identical to SEQ ID NO: 149372
  misc_feature 1..1332: note = Description of Artificial Sequence: Synthetic coding sequence
  source 1..1332: mol_type = other DNA

SEQ ID NO: 149477 - DNA, 420 bp, synthetic construct; identical to SEQ ID NO: 149443
  misc_feature 1..420: note = Description of Artificial Sequence: Synthetic coding sequence
  source 1..420: mol_type = other DNA

SEQ ID NO: 149478 - DNA, 732 bp, synthetic construct; identical to SEQ ID NO: 149454
  misc_feature 1..732: note = Description of Artificial Sequence: Synthetic coding sequence
  source 1..732: mol_type = other DNA

SEQ ID NO: 149479 - DNA, 732 bp, synthetic construct; identical to SEQ ID NO: 149454
  misc_feature 1..732: note = Description of Artificial Sequence: Synthetic coding sequence
  source 1..732: mol_type = other DNA

SEQ ID NO: 149480 - DNA, 420 bp, synthetic construct; identical to SEQ ID NO: 149443
  misc_feature 1..420: note = Description of Artificial Sequence: Synthetic coding sequence
  source 1..420: mol_type = other DNA

SEQ ID NO: 149481 - DNA, 972 bp, synthetic construct; identical to SEQ ID NO: 149472
  misc_feature 1..972: note = Description of Artificial Sequence: Synthetic coding sequence
  source 1..972: mol_type = other DNA

SEQ ID NO: 149482 - DNA, 1332 bp, synthetic construct; identical to SEQ ID NO: 149372
  misc_feature 1..1332: note = Description of Artificial Sequence: Synthetic coding sequence
  source 1..1332: mol_type = other DNA

SEQ ID NO: 149483 - DNA, 732 bp, synthetic construct; identical to SEQ ID NO: 149454
  misc_feature 1..732: note = Description of Artificial Sequence: Synthetic coding sequence
  source 1..732: mol_type = other DNA

SEQ ID NO: 149484 - DNA, 1053 bp, synthetic construct; identical to SEQ ID NO: 149362
  misc_feature 1..1053: note = Description of Artificial Sequence: Synthetic coding sequence
  source 1..1053: mol_type = other DNA

SEQ ID NO: 149485 - DNA, 1332 bp, synthetic construct; identical to SEQ ID NO: 149372
  misc_feature 1..1332: note = Description of Artificial Sequence: Synthetic coding sequence
  source 1..1332: mol_type = other DNA

SEQ ID NO: 149486 - DNA, 1053 bp, synthetic construct; identical to SEQ ID NO: 149362
  misc_feature 1..1053: note = Description of Artificial Sequence: Synthetic coding sequence
  source 1..1053: mol_type = other DNA

SEQ ID NO: 149487 - DNA, 732 bp, synthetic construct; identical to SEQ ID NO: 149454
  misc_feature 1..732: note = Description of Artificial Sequence: Synthetic coding sequence
  source 1..732: mol_type = other DNA

SEQ ID NO: 149488 - DNA, 420 bp, synthetic construct; identical to SEQ ID NO: 149443
  misc_feature 1..420: note = Description of Artificial Sequence: Synthetic coding sequence
  source 1..420: mol_type = other DNA

SEQ ID NO: 149489 - DNA, 1053 bp, synthetic construct; identical to SEQ ID NO: 149362
  misc_feature 1..1053: note = Description of Artificial Sequence: Synthetic coding sequence
  source 1..1053: mol_type = other DNA

SEQ ID NO: 149490 - DNA, 972 bp, synthetic construct; identical to SEQ ID NO: 149472
  misc_feature 1..972: note = Description of Artificial Sequence: Synthetic coding sequence
  source 1..972: mol_type = other DNA

SEQ ID NO: 149491 - DNA, 1053 bp, synthetic construct; identical to SEQ ID NO: 149362
  misc_feature 1..1053: note = Description of Artificial Sequence: Synthetic coding sequence
  source 1..1053: mol_type = other DNA

SEQ ID NO: 149492 - DNA, 420 bp, synthetic construct; identical to SEQ ID NO: 149443
  misc_feature 1..420: note = Description of Artificial Sequence: Synthetic coding sequence
  source 1..420: mol_type = other DNA

SEQ ID NO: 149493 - DNA, 1332 bp, synthetic construct; identical to SEQ ID NO: 149372
  misc_feature 1..1332: note = Description of Artificial Sequence: Synthetic coding sequence
  source 1..1332: mol_type = other DNA

SEQ ID NO: 149494 - DNA, 972 bp, synthetic construct; identical to SEQ ID NO: 149472
  misc_feature 1..972: note = Description of Artificial Sequence: Synthetic coding sequence
  source 1..972: mol_type = other DNA

SEQ ID NO: 149495 - DNA, 972 bp, synthetic construct; identical to SEQ ID NO: 149472
  misc_feature 1..972: note = Description of Artificial Sequence: Synthetic coding sequence
  source 1..972: mol_type = other DNA

SEQ ID NO: 149496 - DNA, 1053 bp, synthetic construct; identical to SEQ ID NO: 149362
  misc_feature 1..1053: note = Description of Artificial Sequence: Synthetic coding sequence
  source 1..1053: mol_type = other DNA

SEQ ID NO: 149497 - DNA, 420 bp, synthetic construct; identical to SEQ ID NO: 149443
  misc_feature 1..420: note = Description of Artificial Sequence: Synthetic coding sequence
  source 1..420: mol_type = other DNA

SEQ ID NO: 149498 - DNA, 1053 bp, synthetic construct; identical to SEQ ID NO: 149362
  misc_feature 1..1053: note = Description of Artificial Sequence: Synthetic coding sequence
  source 1..1053: mol_type = other DNA

SEQ ID NO: 149499 - DNA, 420 bp, synthetic construct; identical to SEQ ID NO: 149443
  misc_feature 1..420: note = Description of Artificial Sequence: Synthetic coding sequence
  source 1..420: mol_type = other DNA

SEQ ID NO: 149500 - DNA, 1332 bp, synthetic construct; identical to SEQ ID NO: 149372
  misc_feature 1..1332: note = Description of Artificial Sequence: Synthetic coding sequence
  source 1..1332: mol_type = other DNA

SEQ ID NO: 149501 - DNA, 552 bp, synthetic construct
  misc_feature 1..552: note = Description of Artificial Sequence: Synthetic coding sequence
  source 1..552: mol_type = other DNA
atggagatctttgtggatgatgagaccaagctgaccctgcacggcctgcagcagtactacgtgaagctgaaggacaatgagaagaacaggaagctgtttgacctgctggatgtgctggagttcaaccaggtggtgatctttgtgaagtctgtgcagcgctgcatcgccctggcccagctgctggtggagcagaacttccctgccatcgccatccaccggggcatgccccaggaggagcgctggctgagccgctaccagcagttcaaggacttccagaggcgcatcctggtggccaccaacctgtttggccggggcatggacatcgagcgggtgaacatcgccttcaactatgacatgccagaagattctgacacctacctgcaccgggtggcccgggccggccgcttcggcaccaagggcctggccatcacctttgtgtctgatgaaaatgatgccaagatcctgaatgatgtgcaggacagatttgaggtgaacatcagcgagctgcctgatgaaattgacatcagcagctacatcgagcagaccaggtag

SEQ ID NO: 149502 - DNA, 2073 bp, synthetic construct
  misc_feature 1..2073: note = Description of Artificial Sequence: Synthetic coding sequence
  source 1..2073: mol_type = other DNA
atgggagatgaggactgggaggccgagatcaacccccacatgagcagctatgtgcccatctttgagaaggaccgctacagcggagaaaatggagacaacttcaacagaacaccagccagcagcagcgagatggatgatggccccagccggcgggaccacttcatgaagagcggctttgccagcggcaggaactttggaaacagagatgctggggagtgcaacaagagggacaacaccagcaccatgggcggctttggagtgggcaagagctttggaaacagaggcttcagcaacagcagatttgaagatggagacagcagcggcttctggagggagagcagcaatgactgtgaggacaaccccaccaggaacagaggcttcagcaagagaggagacaatgacctggaccctgatgagtgcatgcagaggactggaggcctgtttggcagcagaagacctgtgctgagcggcactggaaatggagacaccagccagagccgcagcggcagcggcagcgagcggggcggctacaagggcctgaatgaggaggtgatcaccggcagcggcaagaacagctggaagtctgaggccgagggcggggagagcagtgacacccagggccccaaggtgacctacatccccccacctcctccagaagatgaagattccatctttgcccactaccagacaggcatcaactttgacaagtatgacaccatcctggtggaggtgtctggccatgatgcccccccagccatcctgacctttgaggaggccaacctgtgccagaccctgaacaacaacatcgccaaggccggctacaccaagctgacccctgtgcagaagtacagcatccccatcatcctggccggccgggacctgatggcctgtgcccagacaggcagcggcaagacagctgccttcctgctgcccatcctggcccacatgatgcatgatggcatcacagccagccgcttcaaggagctgcaggagcctgagtgcatcatcgtggcccccacccgggagctggtgaaccagatctacctggaggccaggaagttctcctttggcacctgtgtgcgggctgtggtgatctacggcggcacccagctgggccacagcatccggcagatcgtgcagggctgcaacatcctgtgtgccaccccaggccgcctgatggacatcatcggcaaggagaagattggcctgaagcagatcaagtacctggtgctggatgaggccgacaggatgctggacatgggcttcggccctgagatgaagaagctgatcagctgccccggcatgcccagcaaggagcagaggcagaccctgatgttttctgccaccttccctgaggagatccagaggctggccgctgagttcctgaagagcaactacctgtttgtggccgtgggccaggtgggcggggcctgcagagatgtgcagcagacagtgctgcaggtgggccagttcagcaagcgggagaagctggtggagatcctgaggaacattggagatgagaggaccatggtgtttgtggagaccaagaagaaggctgacttcatcgccaccttcctgtgccaggagaagatcagcaccaccagcatccatggagaccgggagcagcgggagcgggagcaggccctgggggacttccgctttgggaagtgccctgtgctggtggccacctctgtggccgcccggggcctggacattgaaaatgtgcagcacgtgatcaactttgacctgcccagcaccattgatgaatatgtgcaccgcatcggccgcacaggccgctgtggcaacacaggccgggccatctccttctttgacctggagagtgacaaccacctggcccagcccctggtgaaggtgctgacagatgcccagcaggatgtgcctgcctggctggaggagatcgccttcagcacctacatccctggcttcagcggcagcaccagaggaaatgtgtttgcctctgtggacaccaggaagggcaagagcaccctgaacacagctggcttcagcagcagccaggcccccaaccctgtggatgatgagagctgggactag

SEQ ID NO: 149503 - DNA, 2073 bp, synthetic construct; identical to SEQ ID NO: 149502
  misc_feature 1..2073: note = Description of Artificial Sequence: Synthetic coding sequence
  source 1..2073: mol_type = other DNA

SEQ ID NO: 149504 - DNA, 2175 bp, synthetic construct
  misc_feature 1..2175: note = Description of Artificial Sequence: Synthetic coding sequence
  source 1..2175: mol_type = other DNA
atgggagatgaggactgggaggccgagatcaacccccacatgagcagctatgtgcccatctttgagaaggaccgctacagcggagaaaatggagacaacttcaacagaacaccagccagcagcagcgagatggatgatggccccagccggcgggaccacttcatgaagagcggctttgccagcggcaggaactttggaaacagagatgctggggagtgcaacaagagggacaacaccagcaccatgggcggctttggagtgggcaagagctttggaaacagaggcttcagcaacagcagatttgaagatggagacagcagcggcttctggagggagagcagcaatgactgtgaggacaaccccaccaggaacagaggcttcagcaagagaggaggctacagagatggcaacaacagcgaggccagcggcccctaccgccggggcggccggggcagcttccggggctgccggggcggcttcggcctgggcagccccaacaatgacctggaccctgatgagtgcatgcagaggactggaggcctgtttggcagcagaagacctgtgctgagcggcactggaaatggagacaccagccagagccgcagcggcagcggcagcgagcggggcggctacaagggcctgaatgaggaggtgatcaccggcagcggcaagaacagctggaagtctgaggccgagggcggggagagcagtgacacccagggccccaaggtgacctacatccccccacctcctccagaagatgaagattccatctttgcccactaccagacaggcatcaactttgacaagtatgacaccatcctggtggaggtgtctggccatgatgcccccccagccatcctgacctttgaggaggccaacctgtgccagaccctgaacaacaacatcgccaaggccggctacaccaagctgacccctgtgcagaagtacagcatccccatcatcctggccggccgggacctgatggcctgtgcccagacaggcagcggcaagacagctgccttcctgctgcccatcctggcccacatgatgcatgatggcatcacagccagccgcttcaaggagctgcaggagcctgagtgcatcatcgtggcccccacccgggagctggtgaaccagatctacctggaggccaggaagttctcctttggcacctgtgtgcgggctgtggtgatctacggcggcacccagctgggccacagcatccggcagatcgtgcagggctgcaacatcctgtgtgccaccccaggccgcctgatggacatcatcggcaaggagaagattggcctgaagcagatcaagtacctggtgctggatgaggccgacaggatgctggacatgggcttcggccctgagatgaagaagctgatcagctgccccggcatgcccagcaaggagcagaggcagaccctgatgttttctgccaccttccctgaggagatccagaggctggccgctgagttcctgaagagcaactacctgtttgtggccgtgggccaggtgggcggggcctgcagagatgtgcagcagacagtgctgcaggtgggccagttcagcaagcgggagaagctggtggagatcctgaggaacattggagatgagaggaccatggtgtttgtggagaccaagaagaaggctgacttcatcgccaccttcctgtgccaggagaagatcagcaccaccagcatccatggagaccgggagcagcgggagcgggagcaggccctgggggacttccgctttgggaagtgccctgtgctggtggccacctctgtggccgcccggggcctggacattgaaaatgtgcagcacgtgatcaactttgacctgcccagcaccattgatgaatatgtgcaccgcatcggccgcacaggccgctgtggcaacacaggccgggccatctccttctttgacctggagagtgacaaccacctggcccagcccctggtgaaggtgctgacagatgcccagcaggatgtgcctgcctggctggaggagatcgccttcagcacctacatccctggcttcagcggcagcaccagaggaaatgtgtttgcctctgtggacaccaggaagggcaagagcaccctgaacacagctggcttcagcagcagccaggcccccaaccctgtggatgatgagagctgggactag

SEQ ID NO: 149505 - DNA, 318 bp, synthetic construct
  misc_feature 1..318: note = Description of Artificial Sequence: Synthetic coding sequence
  source 1..318: mol_type = other DNA
atgggagatgaggactgggaggccgagatcaacccccacatgagcagctatgtgcccatctttgagaaggaccgctacagcggagaaaatggagacaacttcaacagaacaccagccagcagcagcgagatggatgatggccccagccggcgggaccacttcatgaagagcggctttgccagcggcaggaactttggaaacagagatgctggggagtgcaacaagagggacaacaccagcaccatgggcggctttggagtgggcaagagctttggaaacagaggcttcagcaacagcagatttgaagatggagactag

SEQ ID NO: 149506 - DNA, 2115 bp, synthetic construct
  misc_feature 1..2115: note = Description of Artificial Sequence: Synthetic coding sequence
  source 1..2115: mol_type = other DNA
atgggagatgaggactgggaggccgagatcaacccccacatgagcagctatgtgcccatctttgagaaggaccgctacagcggagaaaatggagacaacttcaacagaacaccagccagcagcagcgagatggatgatggccccagccggcgggaccacttcatgaagagcggctttgccagcggcaggaactttggaaacagagatgctggggagtgcaacaagagggacaacaccagcaccatgggcggctttggagtgggcaagagctttggaaacagaggcttcagcaacagcagatttgaagatggagacagcagcggcttctggaggggctacagagatggcaacaacagcgaggccagcggcccctaccgccggggcggccggggcagcttccggggctgccggggcggcttcggcctgggcagccccaacaatgacctggaccctgatgagtgcatgcagaggactggaggcctgtttggcagcagaagacctgtgctgagcggcactggaaatggagacaccagccagagccgcagcggcagcggcagcgagcggggcggctacaagggcctgaatgaggaggtgatcaccggcagcggcaagaacagctggaagtctgaggccgagggcggggagagcagtgacacccagggccccaaggtgacctacatccccccacctcctccagaagatgaagattccatctttgcccactaccagacaggcatcaactttgacaagtatgacaccatcctggtggaggtgtctggccatgatgcccccccagccatcctgacctttgaggaggccaacctgtgccagaccctgaacaacaacatcgccaaggccggctacaccaagctgacccctgtgcagaagtacagcatccccatcatcctggccggccgggacctgatggcctgtgcccagacaggcagcggcaagacagctgccttcctgctgcccatcctggcccacatgatgcatgatggcatcacagccagccgcttcaaggagctgcaggagcctgagtgcatcatcgtggcccccacccgggagctggtgaaccagatctacctggaggccaggaagttctcctttggcacctgtgtgcgggctgtggtgatctacggcggcacccagctgggccacagcatccggcagatcgtgcagggctgcaacatcctgtgtgccaccccaggccgcctgatggacatcatcggcaaggagaagattggcctgaagcagatcaagtacctggtgctggatgaggccgacaggatgctggacatgggcttcggccctgagatgaagaagctgatcagctgccccggcatgcccagcaaggagcagaggcagaccctgatgttttctgccaccttccctgaggagatccagaggctggccgctgagttcctgaagagcaactacctgtttgtggccgtgggccaggtgggcggggcctgcagagatgtgcagcagacagtgctgcaggtgggccagttcagcaagcgggagaagctggtggagatcctgaggaacattggagatgagaggaccatggtgtttgtggagaccaagaagaaggctgacttcatcgccaccttcctgtgccaggagaagatcagcaccaccagcatccatggagaccgggagcagcgggagcgggagcaggccctgggggacttccgctttgggaagtgccctgtgctggtggccacctctgtggccgcccggggcctggacattgaaaatgtgcagcacgtgatcaactttgacctgcccagcaccattgatgaatatgtgcaccgcatcggccgcacaggccgctgtggcaacacaggccgggccatctccttctttgacctggagagtgacaaccacctggcccagcccctggtgaaggtgctgacagatgcccagcaggatgtgcctgcctggctggaggagatcgccttcagcacctacatccctggcttcagcggcagcaccagaggaaatgtgtttgcctctgtggacaccaggaagggcaagagcaccctgaacacagctggcttcagcagcagccaggcccccaaccctgtggatgatgagagctgggactag

SEQ ID NO: 149507 - DNA, 480 bp, synthetic construct
  misc_feature 1..480: note = Description of Artificial Sequence: Synthetic coding sequence
  source 1..480: mol_type = other DNA
atgggagatgaggactgggaggccgagatcaacccccacatgagcagctatgtgcccatctttgagaaggaccgctacagcggagaaaatggagacaacttcaacagaacaccagccagcagcagcgagatggatgatggccccagccggcgggaccacttcatgaagagcggctttgccagcggcaggaactttggaaacagagatgctggggagtgcaacaagagggacaacaccagcaccatgggcggctttggagtgggcaagagctttggaaacagaggcttcagcaacagcagatttgaagatggagacagcagcggcttctggagggagagcagcaatgactgtgaggacaaccccaccaggaacagaggcttcagcaagagaggaggctacagagatggcaacaacagcgaggccagcggcccctaccgccggggcggccggggcagcttccggggctgccggggcggctag

SEQ ID NO: 149508 - DNA, 1728 bp, synthetic construct
  misc_feature 1..1728: note = Description of Artificial Sequence: Synthetic coding sequence
  source 1..1728: mol_type = other DNA
atgggcagcaggaacctcttcctgaccaacagccctgagagcagcaatgactgtgaggacaaccccaccaggaacagaggcttcagcaagagaggagacaatgacctggaccctgatgagtgcatgcagaggactggaggcctgtttggcagccggcggcctgtgctgtctggaactggaaatggagacaccagccagagccgcagcggcagcggcagcgagcgggacagctggaagtctgaggccgagggcggggagagcagtgacacccagggccccaaggtgacctacatccccccacctcctccagaagatgaggacagcatctttgcccactaccagacaggcatcaactttgacaagtatgacaccatcctggtggaggtgtctggccatgatgcccccccagccatcctgacctttgaggaggccaacctgtgccagaccctgaacaacaacatcgccaaggccggctacaccaagctgacccctgtgcagaagtacagcatccccatcatcctggccggccgggacctgatggcctgtgcccagacaggcagcggcaagacagctgccttcctgctgcccatcctggcccacatgatgcatgatggcatcacagccagccgcttcaaggagctgcaggagcctgagtgcatcatcgtggcccccacccgggagctggtgaaccagatctacctggaggccaggaagttctcctttggcacctgtgtgcgggctgtggtgatctatggaggcacccagctgggccacagcatccggcagatcgtgcagggctgcaacatcctgtgtgccaccccaggccgcctgatggacatcatcggcaaggagaagattggcctgaagcagatcaagtacctggtgctggatgaagctgacaggatgctggacatgggctttggacctgagatgaagaagctgatcagctgccccggcatgcccagcaaggagcagaggcagaccctgatgttcagcgccaccttccctgaggagatccagaggctggccgctgagttcctgaagagcaactacctgtttgtggccgtgggccaggtgggcggggcctgcagagatgtgcagcagacagtgctgcaggtgggccagttcagcaagcgggagaagctggtggagatcctgagaaatattggagatgagaggaccatggtgtttgtggagaccaagaagaaggctgacttcatcgccaccttcctgtgccaggagaagatcagcaccaccagcatccacggggaccgggagcagcgggagcgggagcaggccctgggggacttccgctttggaaaatgtcctgtgctggtggccacctctgtggccgcccggggcctggacattgaaaatgtgcagcacgtgatcaactttgacctgcccagcaccattgatgaatatgtgcacagaattggaagaacaggccgctgtggcaacacaggccgggccatctccttctttgacctggagagtgacaaccacctggcccagcccctggtgaaggtgctgacagatgcccagcaggatgtgcctgcctggctggaggagatcgccttcagcacctacatccctggcttcagcggcagcaccagaggaaatgtgtttgcctctgtggacaccaggaagggcaagagcaccctgaacacagctggcttcagcagcagccaggcccccaaccctgtggatgatgagagctgggactag

SEQ ID NO: 149509 - DNA, 1869 bp, synthetic construct
  misc_feature 1..1869: note = Description of Artificial Sequence: Synthetic coding sequence
  source 1..1869: mol_type = other DNA
atggaggagagcgagcctgagaggaagagggccaggacagatgaggtgcctgctgggggcagccgctctgaggccgaggatgaagatgatgaagattatgtgccctacgtgcccctgcggcagaggcggcagctgctgctgcagaagctgctgcagaggaggaggaaaggagctgctgaggaggagcagcaggacagcggcagcgagcccagaggagatgaagatgacatccccctgggcccccagagcaatgtgtccctgctggaccagcaccagcacctgaaggagaaggccgaggccaggaaggagagcgccaaggagaagcagctgaaggaggaggagaagatcctggagagcgtggccgagggccgggccctgatgtctgtgaaggagatggccaagggcatcacctatgatgaccccatcaagacctcctggaccccacccaggtatgtgctgtccatgtctgaggagagacatgagcgggtgaggaagaagtaccacatcctggtggagggagatggcatccccccacccatcaagagcttcaaggagatgaagtttcctgctgccatcctgcggggcctgaagaagaagggcatccaccaccccacccccatccagatccagggcatccccaccatcctgagcggccgggacatgattggcatcgccttcaccggcagcggcaagaccctggtgttcaccctgcccgtcatcatgttctgcctggagcaggagaagaggctgcccttcagcaagcgggagggcccctacggcctcatcatctgccccagccgggagctggcccggcagacccacggcatcctggagtactactgccgcctgctgcaggaggacagcagccccctgctgcgctgtgccctgtgcatcggcggcatgtctgtgaaggagcagatggagaccatcagacatggagtgcacatgatggtggccaccccaggccgcctgatggacctgctgcagaagaagatggtgtccctggacatctgccgctacctggccctggatgaggccgacaggatgattgacatgggctttgaaggagacatccgcaccatcttctcctacttcaagggccagaggcagaccctgctcttcagcgccaccatgcccaagaagatccagaactttgccaagagcgccctggtgaagcctgtgaccatcaacgtgggccgggccggggccgccagcctggatgtgatccaggaggtggagtatgtgaaggaggaggccaagatggtgtacctgctggagtgcctgcagaagaccccacctcctgtgctgatctttgctgagaagaaggcagatgtggatgccatccacgagtacctgctgctgaagggcgtggaggccgtggccatccatggaggcaaggaccaggaggagaggaccaaggccatcgaggccttccgggagggcaagaaggatgtgctggtggccacagatgtggccagcaagggcctggacttccctgccatccagcacgtgatcaactatgacatgcctgaggagattgagaactacgtgcaccgcatcggccgcacaggccgcagcggcaacacaggaattgccaccaccttcatcaacaaggcctgtgatgaatctgtgctgatggacctgaaggccctgctgctggaggccaagcagaaggtgccccctgtgctgcaggtgctgcactgtggagatgagagcatgctggacatcggcggggagcggggctgtgccttctgtggcggcctgggccaccgcatcacagactgccccaagctggaggccatgcagaccaagcaggtgagcaacattggaaggaaggactacctggcccacagctccatggacttctag

SEQ ID NO: 149510 - DNA, 1881 bp, synthetic construct
  misc_feature 1..1881: note = Description of Artificial Sequence: Synthetic coding sequence
  source 1..1881: mol_type = other DNA
atgcaccagatcaggaagtctgagtacacccagcccacccccatccagtgccagggcgtgcctgtggccctgagcggccgggacatgattggcatcgccaagacaggcagcggcaagacagctgccttcatctggcccatgctgatccacatcatggaccagaaggagctggagcctggagatggccccatcgctgtgattgtgtgccccacccgggagctgtgccagcagatccacgccgagtgcaagagatttgggaaggcctacaacctgcggtctgtggccgtgtatggaggcggctccatgtgggagcaggccaaggccctgcaggagggcgctgagatcgtggtgtgcaccccaggccgcctgattgaccacgtgaagaagaaggccaccaacctgcagagggtgtcctacctggtgtttgatgaagctgacaggatgtttgacatgggctttgagtaccaggtgcgcagcatcgccagccacgtgcggccagaccggcagaccctgctcttcagcgccaccttcaggaagaagattgagaagctggcccgggacatcctgattgaccccatccgggtggtgcagggcgacatcggggaggccaatgaagatgtgacccagatcgtggagatcctgcacagcggccccagcaagtggaactggctgacccggcggctggtggagttcaccagcagcggctctgtgctgctgtttgtgaccaagaaggccaatgctgaggagctggccaacaacctgaagcaggagggccacaacctgggcctgctgcatggagacatggaccagagcgagaggaacaaggtgatcagtgacttcaagaagaaggacatccctgtgctggtggccacagatgtggccgcccggggcctggacatccccagcatcaagacagtcatcaactatgatgtggcccgggacatcgacaccctgctgacccccaaggacagcaactttgctggggacctggtgaggaacctggagggcgccaaccagcacgtgtccaaggagctgctggacctggccatgcagaatgcctggttcaggaagagccgcttcaagggcggcaagggcaagaagctgaacatcggcggcggcggcctgggctaccgggagaggcctggcctgggcagcgagaacatggaccggggcaacaacaacgtgatgagcaactatgaggcctacaagcccagcactggagccatgggagaccggctgacagccatgaaggccgccttccagagccagtacaagagccactttgtggccgccagcctgagcaaccagaaggccggcagcagcgctgctggggccagcggctggaccagcgctggcagcctgaacagcgtgcccaccaacagcgcccagcagggccacaacagcccagacagccctgtgaccagcgctgccaagggcatccctggctttggaaacacaggcaacatcagcggggcccctgtgacctaccccagcgctggggcccagggcgtgaacaacacagccagcggcaacaacagccgggagggcactggaggcagcaatggcaagcgggagcgctacacagaaaatagaggcagcagccgccacagccacggggagactggaaacagacacagcgacagccccaggcatggagatggcggcagacatggagatggctaccgccaccctgagagcagcagccgccacacagatggccaccgccacggggagaacagacatggaggcagcgctggccgccacggggagaacagaggagccaatgatggaagaaatggagagagcaggaaggaggccttcaaccgggagagcaagatggagcccccacccaagaggaagaagagccgctgggacagctag

SEQ ID NO: 149511 - DNA, 2817 bp, synthetic construct
  misc_feature 1..2817: note = Description of Artificial Sequence: Synthetic coding sequence
  source 1..2817: mol_type = other DNA
atgaactggaacaagggcggccctggcaccaagaggggcttcggctttggaggctttgccatctctgctgggaagaaggaggagcccaagctgccccagcagagccacagcgcctttggagccaccagcagcagcagcggctttgggaagagcgccccaccccagctgcccagcttctacaagattggcagcaagagggccaactttgatgaggagaatgcctactttgaagatgaggaggaggacagcagcaatgtggacctgccctacatcccagctgagaacagccccacccggcagcagttccacagcaagcctgtggacagcgacagtgatgatgaccccctggaggccttcatggccgaggtggaggaccaggccgcccgggacatgaagaggctggaggagaaggacaaggagaggaagaatgtgaagggcatcagagatgacatcgaggaggaggatgaccaggaggcctacttccgctacatggccgagaaccccacagctggggtggtgcaggaggaggaggaggacaacctggagtatgacagtgatggcaaccccatcgcccccaccaagaagatcatcgaccccctgccccccatcgaccacagcgagattgactaccccccatttgagaagaacttctacaatgaacatgaggagatcaccaacctgaccccccagcagctgattgacctgcggcacaagctgaacctgcgggtgtctggggccgccccacccaggcctggcagcagctttgcccacttcggctttgatgagcagctgatgcaccagatcaggaagtctgagtacacccagcccacccccatccagtgccagggcgtgcctgtggccctgagcggccgggacatgattggcatcgccaagacaggcagcggcaagacagctgccttcatctggcccatgctgatccacatcatggaccagaaggagctggagcctggagatggccccatcgctgtgattgtgtgccccacccgggagctgtgccagcagatccacgccgagtgcaagagatttgggaaggcctacaacctgcggtctgtggccgtgtatggaggcggctccatgtgggagcaggccaaggccctgcaggagggcgctgagatcgtggtgtgcaccccaggccgcctgattgaccacgtgaagaagaaggccaccaacctgcagagggtgtcctacctggtgtttgatgaagctgacaggatgtttgacatgggctttgagtaccaggtgcgcagcatcgccagccacgtgcggccagaccggcagaccctgctcttcagcgccaccttcaggaagaagattgagaagctggcccgggacatcctgattgaccccatccgggtggtgcagggcgacatcggggaggccaatgaagatgtgacccagatcgtggagatcctgcacagcggccccagcaagtggaactggctgacccggcggctggtggagttcaccagcagcggctctgtgctgctgtttgtgaccaagaaggccaatgctgaggagctggccaacaacctgaagcaggagggccacaacctgggcctgctgcatggagacatggaccagagcgagaggaacaaggtgatcagtgacttcaagaagaaggacatccctgtgctggtggccacagatgtggccgcccggggcctggacatccccagcatcaagacagtcatcaactatgatgtggcccgggacatcgacacccacacccaccgcatcggccgcacaggccgggccggggagaagggcgtggcctacaccctgctgacccccaaggacagcaactttgctggggacctggtgaggaacctggagggcgccaaccagcacgtgtccaaggagctgctggacctggccatgcagaatgcctggttcaggaagagccgcttcaagggcggcaagggcaagaagctgaacattggaggcggcggcctgggctaccgggagcggcccggcctgggcagcgagaacatggaccggggcaacaacaacgtgatgagcaactatgaggcctacaagcccagcactggagccatgggagaccggctgacagccatgaaggccgccttccagagccagtacaagagccactttgtggccgccagcctgagcaaccagaaggccggcagcagcgctgctggggccagcggctggaccagcgctggcagcctgaacagcgtgcccaccaacagcgcccagcagggccacaacagcccagacagccctgtgaccagcgctgccaagggcatccctggcttcggcaacacaggcaacatcagcggggcccctgtgacctaccccagcgctggggcccagggcgtgaacaacacagccagcggcaacaacagccgggagggcaccggcggcagcaatggcaagcgggagcgctacacagagaacagaggcagcagccgccacagccatggagagaccggcaacagacacagcgacagccccaggcatggagatggcggcagacatggagatggctaccgccaccctgagagcagcagccgccacacagatggccacagacatggagaaaatagacatggaggcagcgctggaagacatggagaaaatagaggagccaatgatggaagaaatggagagagcaggaaggaggccttcaaccgggagagcaagatggagcccaagatggagcccaaggtggacagcagcaagatggacaaggtggacagcaagacagacaagacagcagatggctttgctgtgcctgagccccccaagaggaagaagagccgctgggacagctag

SEQ ID NO: 149512 - DNA, 2817 bp, synthetic construct; identical to SEQ ID NO: 149511
  misc_feature 1..2817: note = Description of Artificial Sequence: Synthetic coding sequence
  source 1..2817: mol_type = other DNA

SEQ ID NO: 149513 - DNA, 2817 bp, synthetic construct; identical to SEQ ID NO: 149511
  misc_feature 1..2817: note = Description of Artificial Sequence: Synthetic coding sequence
  source 1..2817: mol_type = other DNA

SEQ ID NO: 149514 - DNA, 2817 bp, synthetic construct; identical to SEQ ID NO: 149511
  misc_feature 1..2817: note = Description of Artificial Sequence: Synthetic coding sequence
  source 1..2817: mol_type = other DNA

SEQ ID NO: 149515 - DNA, 1947 bp, synthetic construct
  misc_feature 1..1947: note = Description of Artificial Sequence: Synthetic coding sequence
  source 1..1947: mol_type = other DNA
atgagccaccacggcggggcccccaaggccagcacctgggtggtggccagccgccgcagcagcacagtgtcccgggcccctgagaggaggcctgctgaggagctgaacagaacaggccctgagggctacagcgtgggccggggcggccgctggaggggcaccagcaggcctcctgaggccgtggccgccggccacgaggagctgcccctgtgctttgccctgaagagccactttgtgggcgctgtgattggccggggcggcagcaagatcaagaacatccagagcaccaccaacaccaccatccagatcatccaggagcagcctgagagcctggtgaagatcttcggcagcaaggccatgcagaccaaggccaaggccgtcatcgacaactttgtgaagaagctggaggagaactacaacagtgaatgtggcatcgacacagccttccagcccagcgtgggcaaggatggcagcacagacaacaacgtggtggccggggaccggcccctgattgactgggaccagatccgggaggagggcctgaagtggcagaagaccaagtgggccgacctgccccccatcaagaagaacttctacaaggagagcacagccaccagcgccatgagcaaggtggaggccgacagctggaggaaagaaaacttcaacatcacctgggatgacctgaaggatggagagaagaggcccatccccaaccccacctgcacctttgatgatgccttccagtgctacccagaggtgatggagaacatcaagaaggccggcttccagaagcccacccccatccagagccaggcctggcccatcgtgctgcagggcatcgacctgattggagtggcccagacaggcaccgggaagaccctgtgctacctgatgcctggcttcatccacctggtgctgcagcccagcctgaagggccagaggaacagacctggcatgctggtgctgacccccacccgggagctggccctgcaggtggagggggagtgctgcaagtacagctacaagggcctgcggtctgtgtgtgtgtatggaggcggcaacagagatgagcagatcgaggagctgaagaagggcgtggacatcatcatcgccaccccaggccgcctgaatgacctgcagatgagcaactttgtgaacctgaagaacatcacctacctggtgctggatgaggccgacaagatgctggacatgggctttgagccccagatcatgaagatcctgctggatgtgcggccagaccggcagacagtgatgaccagcgccacctggccccacagcgtgcaccggctggcccagagctacctgaaggagcccatgattgtgtatgtgggcaccctggacctggtggccgtgtcctctgtgaagcagaacatcatcgtgaccacagaggaggagaagtggagccacatgcagaccttcctgcagagcatgagcagcacagacaaggtgattgtgtttgtgtccaggaaggctgtggccgaccacctgagcagtgacctgatcctgggcaacatctctgtggagagcctgcacggggaccgggagcagagggaccgggagaaggccctggagaacttcaagacaggcaaggtgcgcatcctgattgccacagacctggccagccggggcctggatgtgcatgatgtgacccacgtgtacaactttgacttccccaggaacatcgaggagtatgtgcacagaattggaagaacaggccgggccggccgcactggagtgtccatcaccaccctgaccagaaatgactggagggtggccagcgagctgatcaacatcctggagcgggccaaccagagcatccctgaggagctggtgtccatggccgagcgcttcaaggcccaccagcagaagcgggagatggagaggaagatggagcggccccagggccggcccaagaagttccactag

SEQ ID NO: 149516 - DNA, 588 bp, synthetic construct
  misc_feature 1..588: note = Description of Artificial Sequence: Synthetic coding sequence
  source 1..588: mol_type = other DNA
atgagccaccacggcggggcccccaaggccagcacctgggtggtggccagccgccgcagcagcacagtgtcccgggcccctgagaggaggcctgctgaggagctgaacagaacaggccctgagggctacagcgtgggccggggcggccgctggaggggcaccagcaggcctcctgaggccgtggccgccggccacgaggagctgcccctgtgctttgccctgaagagccactttgtgggcgctgtgattggccggggcggcagcaagatcaagaacatccagagcaccaccaacaccaccatccagatcatccaggagcagcctgagagcctggtgaagatcttcggcagcaaggccatgcagaccaaggccaaggccgtcatcgacaactttgtgaagaagctggaggagaactacaacagtgaatgtggcatcgacacagccttccagcccagcgtgggcaaggatggcagcacagacaacaacgtggtggccggggaccggcccctgattgactgggaccagatccgggaggagggcctgaagtggcagaagaccaagtgggccggcaagaagatcctgatctag

SEQ ID NO: 149517 - DNA, 675 bp, synthetic construct
  misc_feature 1..675: note = Description of Artificial Sequence: Synthetic coding sequence
  source 1..675: mol_type = other DNA
atggagagcggggcctacggggccgccaaggccggcggcagctttgacctgcggcgcttcctgacccagccccaggtggtggcccgggctgtgtgcctggtgtttgccctgattgtgttcagctgcatctacggggagggctacagcaatgcccacgagagcaagcagatgtactgtgtgttcaacagaaatgaagatgcctgccgctatggcagcgccatcggcgtgctggccttcctggccagcgccttcttcctggtggtggatgcctacttcccccagatcagcaatgccacagacaggaagtacctggtgattggagacctgctcttcagcgccctgtggaccttcctgtggtttgtgggcttctgcttcctgaccaaccagtgggccgtgaccaaccccaaggatgtgctggtgggcgctgacagcgtgcgggccgccatcaccttctccttcttcagcatcttctcctggggcgtgctggccagcctggcctaccagcgctacaaggccggcgtggatgacttcatccagaactacgtggaccccaccccagaccccaacacagcctatgccagctacccaggggcctctgtggacaactaccagcagccccccttcacccagaatgctgagaccacagagggctaccagcccccacctgtgtactag

SEQ ID NO: 149518 - DNA, 1635 bp, synthetic construct
  misc_feature 1..1635: note = Description of Artificial Sequence: Synthetic coding sequence
  source 1..1635: mol_type = other DNA
atgagcggctacagcagtgaccgggaccggggccgggaccggggctttggagcccccaggtttggaggcagccgggccggccccctgagcggcaagaagtttggaaatcctggagagaagctggtgaagaagaagtggaacctggatgagctgcccaagtttgagaagaacttctaccaggagcacccagacctggccaggagaacagcccaggaggtggagacctaccgctacctgctgcctgccatcgtgcacatcaaccaccagcccttcctggagagaggagatggccccatctgcctggtgctggcccccacccgggagctggcccagcaggtgcagcaggtggccgctgagtactgccgggcctgccgcctgaagagcacctgcatctacggcggggcccccaagggcccccagatccgggacctggagcggggcgtggagatctgcatcgccaccccaggccgcctgattgacttcctggagtgtgggaagaccaacctgcggaggaccacctacctggtgctggatgaggccgacaggatgctggacatgggctttgagccccagatcaggaagatcgtggaccagatccggccagaccggcagaccctgatgtggagcgccacctggcccaaggaggtgcggcagctggccgaggacttcctgaaggactacatccacatcaacatcggggccctggagctgagcgccaaccacaacatcctgcagatcgtggatgtgtgccatgatgtggagaaggatgagaagctgatccggctgatggaggagatcatgtctgagaaggagaacaagaccatcgtgtttgtggagaccaagaggcgctgtgatgagctgaccaggaagatgagaagagatggctggccagccatgggcatccacggggacaagagccagcaggagcgggactgggtgctgaatgagttcaagcacggcaaggcccccatcctgattgccacagatgtggccagccggggcctggatgtggaggatgtgaagtttgtgatcaactatgactaccccaacagcagcgaggactacatccacagaattggaagaacagcccggagcaccaagacaggaacagcctacaccttcttcacccccaacaacatcaagcaggtgtctgacctgatctctgtgctgcgggaggccaaccaggccatcaaccccaagctgctgcagctggtggaggaccggggcagcggccgcagccggggccggggcggcatgaaggatgacagaagagaccgctacagcgctgggaagagaggaggcttcaacaccttccgggaccgggagaactatgaccggggctacagcagcctgctgaagagggactttggagccaagacccagaatggagtgtacagcgctgccaactacaccaacggcagctttggcagcaactttgtgtctgctggcatccagaccagcttcagaacaggcaaccccaccggcacctaccagaatggctatgacagcacccagcagtatggcagcaatgtgcccaacatgcacaacggcatgaaccagcaggcctatgcctacccagccacagctgctgcccccatgattggctaccccatgcccaccggctacagccagtag

SEQ ID NO: 149519 - DNA, 1845 bp, synthetic construct
  misc_feature 1..1845: note = Description of Artificial Sequence: Synthetic coding sequence
  source 1..1845: mol_type = other DNA
atgagcggctacagcagtgaccgggaccggggccgggaccggggctttggagcccccaggtttggaggcagccgggccggccccctgagcggcaagaagtttggaaatcctggagagaagctggtgaagaagaagtggaacctggatgagctgcccaagtttgagaagaacttctaccaggagcacccagacctggccaggagaacagcccaggaggtggagacctacagaagaagcaaggagatcaccgtgcggggccacaactgccccaagcctgtgctgaacttctatgaggccaacttccctgccaacgtgatggatgtgattgcccggcagaacttcacagagcccacagccatccaggcccagggctggcctgtggccctgagcggcctggacatggtgggcgtggcccagacaggcagcggcaagaccctgagctacctgctgcctgccatcgtgcacatcaaccaccagcccttcctggagagaggagatggccccatctgcctggtgctggcccccacccgggagctggcccagcaggtgcagcaggtggccgctgagtactgccgggcctgccgcctgaagagcacctgcatctacggcggggcccccaagggcccccagatccgggacctggagcggggcgtggagatctgcatcgccaccccaggccgcctgattgacttcctggagtgtgggaagaccaacctgcggaggaccacctacctggtgctggatgaggccgacaggatgctggacatgggctttgagccccagatcaggaagatcgtggaccagatccggccagaccggcagaccctgatgtggagcgccacctggcccaaggaggtgcggcagctggccgaggacttcctgaaggactacatccacatcaacatcggggccctggagctgagcgccaaccacaacatcctgcagatcgtggatgtgtgccatgatgtggagaaggatgagaagctgatccggctgatggaggagatcatgtctgagaaggagaacaagaccatcgtgtttgtggagaccaagaggcgctgtgatgagctgaccaggaagatgagaagagatggctggccagccatgggcatccacggggacaagagccagcaggagcgggactgggtgctgaatgagttcaagcacggcaaggcccccatcctgattgccacagatgtggccagccggggcctggatgtggaggatgtgaagtttgtgatcaactatgactaccccaacagcagcgaggactacatccacagaattggaagaacagcccggagcaccaagacaggaacagcctacaccttcttcacccccaacaacatcaagcaggtgtctgacctgatctctgtgctgcgggaggccaaccaggccatcaaccccaagctgctgcagctggtggaggaccggggcagcggccgcagccggggccggggcggcatgaaggatgacagaagagaccgctacagcgctgggaagagaggaggcttcaacaccttccgggaccgggagaactatgaccggggctacagcagcctgctgaagagggactttggagccaagacccagaatggagtgtacagcgctgccaactacaccaacggcagctttggcagcaactttgtgtctgctggcatccagaccagcttcagaacaggcaaccccaccggcacctaccagaatggctatgacagcacccagcagtatggcagcaatgtgcccaacatgcacaacggcatgaaccagcaggcctatgcctacccagccacagctgctgcccccatgattggctaccccatgcccaccggctacagccagtag

SEQ ID NO: 149520 - DNA, 1800 bp, synthetic construct
  misc_feature 1..1800: note = Description of Artificial Sequence: Synthetic coding sequence
  source 1..1800: mol_type = other DNA
atggatgtgcatgacctcttccggcggctgggcgctggggccaagtttgacacccggcgcttcagcgcagatgctgcccgcttccagatcggcaagaggaaatatgactttgacagcagcgaggtgctgcagggcctggacttctttggaaacaagaagtctgtgcctggggtgtgtggggccagccagacccaccagaagccccagaatggagagaagaaggaggagagcctgacagagaggaagcgggagcagagcaagaagaagaggaagaccatgaccagcgagatcgccagccaggaggagggcgccaccatccagtggatgagctctgtggaggccaagattgaggacaagaaggtgcagcgggagagcaagctgaccagcggcaagctggagaacctgaggaaggagaagatcaacttcctgaggaacaagcacaagatccacgtgcagggcacagacctgcctgaccccatcgccaccttccagcagctggaccaggagtacaagatcaacagccggctgctgcagaacatcctggatgctggcttccagatgcccacccccatccagatgcaggccatccctgtgatgctgcacggccgggagctgctggccagcgcccccactggaagtggcaagaccctggccttcagcatccccatcctgatgcagctgaagcagcctgccaacaagggcttccgggccctgatcatcagccccacccgggagctggccagccagatccaccgggagctgatcaagatcagcgagggcaccggcttccgcatccacatgatccacaaggctgctgtggccgccaagaagtttggccccaagagcagcaagaagtttgacatcctggtgaccacccccaacagactcatctacctgctgaagcaggaccccccaggcatcgacctggcctctgtggagtggctggtggtggatgaaagtgacaagctgtttgaagatggcaagacaggcttccgggaccagctggccagcatcttcctggcctgcaccagccacaaggtgcggcgggccatgttttctgccacctttgcctatgatgtggagcagtggtgcaagctgaacctggacaacgtcatctctgtgtccatcggggccagaaattctgctgtggagaccgtggagcaggagctgctgtttgtgggcagcgagaccgggaagctgctggccatgagggagctggtgaagaagggcttcaacccccctgtgctggtgtttgtgcagagcattgaaagagccaaggagctgttccacgagctgatctatgagggcatcaacgtggatgtgattcatgctgagaggacccagcagcagagggacaacacagtgcacagcttccgggccggcaagatctgggtgctgatctgcacagccctgctggcccggggcatcgacttcaagggcgtgaacctggtgatcaactatgacttccccaccagctctgtggagtacatccaccgcatcggccgcacaggccgggccggcaacaagggcaaggccatcaccttcttcacagaagatgacaagcccctgctgcggtctgtggccaacgtcatccagcaggccggctgccctgtgcctgagtacatcaagggcttccagaagctgctgagcaagcagaagaagaagatgatcaagaagcccctggagcgggagagcatcagcaccacccccaagtgcttcctggagaaggccaaggacaagcagaagaaggtgacaggccagaacagcaagaagaaggtggccctggaggacaagagctag

SEQ ID NO: 149521 - DNA, 1476 bp, synthetic construct
  misc_feature 1..1476: note = Description of Artificial Sequence: Synthetic coding sequence
  source 1..1476: mol_type = other DNA
atgagctctgtggaggccaagattgaggacaagaaggtgcagcgggagagcaagctgaccagcggcaagctggagaacctgaggaaggagaagatcaacttcctgaggaacaagcacaagatccacgtgcagggcacagacctgcctgaccccatcgccaccttccagcagctggaccaggagtacaagatcaacagccggctgctgcagaacatcctggatgctggcttccagatgcccacccccatccagatgcaggccatccctgtgatgctgcacggccgggagctgctggccagcgcccccactggaagtggcaagaccctggccttcagcatccccatcctgatgcagctgaagcagcctgccaacaagggcttccgggccctgatcatcagccccacccgggagctggccagccagatccaccgggagctgatcaagatcagcgagggcaccggcttccgcatccacatgatccacaaggctgctgtggccgccaagaagtttggccccaagagcagcaagaagtttgacatcctggtgaccacccccaacagactcatctacctgctgaagcaggaccccccaggcatcgacctggcctctgtggagtggctggtggtggatgaaagtgacaagctgtttgaagatggcaagacaggcttccgggaccagctggccagcatcttcctggcctgcaccagccacaaggtgcggcgggccatgttttctgccacctttgcctatgatgtggagcagtggtgcaagctgaacctggacaacgtcatctctgtgtccatcggggccagaaattctgctgtggagaccgtggagcaggagctgctgtttgtgggcagcgagaccgggaagctgctggccatgagggagctggtgaagaagggcttcaacccccctgtgctggtgtttgtgcagagcattgaaagagccaaggagctgttccacgagctgatctatgagggcatcaacgtggatgtgattcatgctgagaggacccagcagcagagggacaacacagtgcacagcttccgggccggcaagatctgggtgctgatctgcacagccctgctggcccggggcatcgacttcaagggcgtgaacctggtgatcaactatgacttccccaccagctctgtggagtacatccaccgcatcggccgcacaggccgggccggcaacaagggcaaggccatcaccttcttcacagaagatgacaagcccctgctgcggtctgtggccaacgtcatccagcaggccggctgccctgtgcctgagtacatcaagggcttccagaagctgctgagcaagcagaagaagaagatgatcaagaagcccctggagcgggagagcatcagcaccacccccaagtgcttcctggagaaggccaaggacaagcagaagaaggtgacaggccagaacagcaagaagaaggtggccctggaggacaagagctag

SEQ ID NO: 149522 - DNA, 2646 bp, synthetic construct
  misc_feature 1..2646: note = Description of Artificial Sequence: Synthetic coding sequence
  source 1..2646: mol_type = other DNA
atggctgctgacaagggccctgctgctggccccaggagcagagctgccatggcccagtggaggaagaagaagggcctgaggaagagaagaggagctgccagccaggcccggggcagtgacagtgaagatggagaatttgagatccaggctgaagatgatgcccgggccaggaagctgggccctggccggcccctgcccaccttccccaccagcgagtgcaccagtgatgtggagccagacacccgggagatggtgcgggcccagaacaagaagaagaagaagagcggcggcttccagagcatgggcctgagctaccctgtgttcaagggcatcatgaagaagggctacaaggtgcccacccccatccagaggaagaccatccctgtgatcctggatggcaaggatgtggtggccatggccaggacaggcagcggcaagacagcctgcttcctgctgcccatgtttgagcggctgaagacccacagcgcccagacaggagcccgggccctgatcctgagccccacccgggagctggccctgcagaccctgaagttcaccaaggagctgggcaagttcaccggcctgaagacagccctgatcctgggcggggacaggatggaggaccagtttgctgccctgcatgaaaatccagacatcatcatcgccaccccaggccgcctggtgcacgtggccgtggagatgagcctgaagctgcagagcgtggagtatgtggtgtttgatgaagctgaccggctgtttgagatgggctttgctgagcagctgcaggagatcatcgcccggctgcccggcggccaccagacagtgctcttcagcgccaccctgcccaagctgctggtggagtttgcccgggccggcctgacagagcctgtgctgatccggctggatgtggacaccaagctgaatgagcagctgaagaccagcttcttcctggtgcgggaggacaccaaggctgctgtgctgctgcacctgctgcacaacgtggtgcggccccaggaccagacagtggtgtttgtggccaccaagcaccacgccgagtacctgacagagctgctgaccacccagagggtgtcctgtgcccacatctacagcgccctggaccccacagccaggaagatcaacctggccaagttcaccctgggcaagtgcagcaccctgattgtgacagacctggccgcccggggcctggacatccccctgctggacaacgtcatcaactacagcttccctgccaagggcaagctgttcctgcaccgggtgggccgggtggcccgggccggccgctctggaacagcctacagcctggtggccccagatgagatcccctacctgctggacctgcacctgttcctgggccgcagcctgaccctggcccggcccctgaaggagcccagcggcgtggccggcgtggatggcatgctgggccgggtgccccagagcgtggtggatgaagaagattctggcctgcagagcaccctggaggccagcctggagctgcggggcctggcccgggtggccgacaatgcccagcagcagtatgtgcgcagcaggcctgcccccagccctgagagcatcaagagggccaaggagatggacctggtgggcctgggcctgcaccccctcttcagcagcagatttgaggaggaggagctgcagaggctgcggctggtggacagcatcaagaactaccgcagccgggccaccatctttgagatcaatgccagcagccgggacctgtgcagccaggtgatgagggccaagaggcagaaggacaggaaggccatcgcccgcttccagcagggccagcagggccggcaggagcagcaggagggccctgtgggccctgcccccagcaggcctgccctgcaggagaagcagcctgagaaggaggaggaggaggaggccggggagagcgtggaggacatcttcagcgaggtggtgggcaggaagaggcagaggagcggccccaacagaggagccaagagaagaagagaggaggcccggcagagggaccaggagttctacatcccctaccggcccaaggactttgattctgagcggggcctgagcatcagcggggagggcggggcctttgagcagcaggccgccggggctgtgctggacctgatgggagatgaggcccagaacctgacccggggccggcagcagctgaagtgggacaggaagaagaagagatttgtgggccagagcggccaggaggacaagaagaagatcaagacagaaagtggccgctacatcagcagcagctacaagagggacctgtaccagaagtggaagcagaagcagaagattgatgaccgggacagtgatgaggagggcgccagtgaccggcggggccctgagaggagaggaggcaagagggaccggggccagggcgccagccggccccacgcccctggcaccccagctggccgggtgcggcctgagctgaagaccaagcagcagatcctgaagcagaggcggcgggcccagaagctgcacttcctgcagagaggaggcctgaagcagctgagcgccaggaacagaagaagagtgcaggagctgcagcagggcgccttcggccgcggggcccggagcaagaagggcaagatgaggaagaggatgtag

SEQ ID NO: 149523 - DNA, 2649 bp, synthetic construct
  misc_feature 1..2649: note = Description of Artificial Sequence: Synthetic coding sequence
  source 1..2649: mol_type = other DNA
atggctgctgacaagggccctgctgctggccccaggagcagagctgccatggcccagtggaggaagaagaagggcctgaggaagagaagaggagctgccagccaggcccggggcagtgacagtgaagatggagaatttgagatccaggctgaagatgatgcccgggccaggaagctgggccctggccggcccctgcccaccttccccaccagcgagtgcaccagtgatgtggagccagacacccgggagatggtgcgggcccagaacaagaagaagaagaagagcggcggcttccagagcatgggcctgagctaccctgtgttcaagggcatcatgaagaagggctacaaggtgcccacccccatccagaggaagaccatccctgtgatcctggatggcaaggatgtggtggccatggccaggacaggcagcggcaagacagcctgcttcctgctgcccatgtttgagcggctgaagacccacagcgcccagacaggagcccgggccctgatcctgagccccacccgggagctggccctgcagaccctgaagttcaccaaggagctgggcaagttcaccggcctgaagacagccctgatcctgggcggggacaggatggaggaccagtttgctgccctgcatgaaaatccagacatcatcatcgccaccccaggccgcctggtgcacgtggccgtggagatgagcctgaagctgcagagcgtggagtatgtggtgtttgatgaagctgaccggctgtttgagatgggctttgctgagcagctgcaggagatcatcgcccggctgcccggcggccaccagacagtgctcttcagcgccaccctgcccaagctgctggtggagtttgcccgggccggcctgacagagcctgtgctgatccggctggatgtggacaccaagctgaatgagcagctgaagaccagcttcttcctggtgcgggaggacaccaaggctgctgtgctgctgcacctgctgcacaacgtggtgcggccccaggaccagacagtggtgtttgtggccaccaagcaccacgccgagtacctgacagagctgctgaccacccagagggtgtcctgtgcccacatctacagcgccctggaccccacagccaggaagatcaacctggccaagttcaccctgggcaagtgcagcaccctgattgtgacagacctggccgcccggggcctggacatccccctgctggacaacgtcatcaactacagcttccctgccaagggcaagctgttcctgcaccgggtgggccgggtggcccgggccggccgctctggaacagcctacagcctggtggccccagatgagatcccctacctgctggacctgcacctgttcctgggccgcagcctgaccctggcccggcccctgaaggagcccagcggcgtggccggcgtggatggcatgctgggccgggtgccccagagcgtggtggatgaagaagattctggcctgcagagcaccctggaggccagcctggagctgcggggcctggcccgggtggccgacaatgcccagcagcagtatgtgcgcagcaggcctgcccccagccctgagagcatcaagagggccaaggagatggacctggtgggcctgggcctgcaccccctcttcagcagcagatttgaggaggaggagctgcagaggctgcggctggtggacagcatcaagaactaccgcagccgggccaccatctttgagatcaatgccagcagccgggacctgtgcagccaggtgatgagggccaagaggcagaaggacaggaaggccatcgcccgcttccagcagggccagcagggccggcaggagcagcaggagggccctgtgggccctgcccccagcaggcctgccctgcaggagaagcagcctgagaaggaggaggaggaggaggccggggagagcgtggaggacatcttcagcgaggtggtgggcaggaagaggcagaggagcggccccaacagaggagccaagagaagaagagaggaggcccggcagagggaccaggagttctacatcccctaccggcccaaggactttgattctgagcggggcctgagcatcagcggggagggcggggcctttgagcagcaggccgccggggctgtgctggacctgatgggagatgaggcccagaacctgacccggggccggcagcagctgaagtgggacaggaagaagaagagatttgtgggccagagcggccaggaggacaagaagaagatcaagacagaaagtggccgctacatcagcagcagctacaagagggacctgtaccagaagtggaagcagaagcagaagattgatgaccgggacagtgatgaggagggcgccagtgaccggcggggccctgagaggagaggaggcaagagggaccggggccaggccggggccagccggccccacgcccctggcaccccagctggccgggtgcggcctgagctgaagaccaagcagcagatcctgaagcagaggagaagagcccagaagctgcacttcctgcagaggggcggcctgaagcagctgagcgccaggaacagaagaagagtgcaggagctgcagcagggcgccttcggccgcggggcccggagcaagaagggcaagatgaggaagaggatgtag

SEQ ID NO: 149524 - DNA, 1452 bp, synthetic construct
  misc_feature 1..1452: note = Description of Artificial Sequence: Synthetic coding sequence
  source 1..1452: mol_type = other DNA
atgagcacagccaggacagaaaatcctgtgatcatgggcctgagcagccagaatggccagctgcggggccctgtgaagcccaccggcggccctgggggcggcggcacccagacccagcagcagatgaaccagctgaagaacaccaacaccatcaacaacggcacccagcagcaggcccagagcatgaccaccaccatcaagccaggagatgactggaagaagaccctgaagctgccccccaaggacctgcgcatcaagaccagtgatgtgaccagcaccaagggaaatgaatttgaggactactgcctgaagcgggagctgctgatgggcatctttgagatgggctgggagaagcccagccccatccaggaggagagcatccccatcgccctgagcggccgggacatcctggcccgggccaagaatggcaccgggaagagcggggcctacctgatccccctgctggagcggctggacctgaagaaggacaacatccaggccatggtgattgtgcccacccgggagctggccctgcaggtgtcccagatctgcatccaggtgtccaagcacatgggcggggccaaggtgatggccaccaccggcggcaccaacctgagagatgacatcatgaggctggatgacacagtgcacgtggtgattgccaccccaggccgcatcctggacctgatcaagaagggcgtggccaaggtggaccacgtgcagatgattgtgctggatgaggccgacaagctgctgagccaggactttgtgcagatcatggaggacatcatcctgaccctgcccaagaaccggcagatcctgctgtacagcgccaccttccccctgtctgtgcagaagttcatgaacagccacctgcagaagccctatgagatcaacctgatggaggagctgaccctgaagggcgtgacccagtactatgcctacgtgacagagcggcagaaggtgcactgcctgaacaccctcttcagccggctgcagatcaaccagagcatcatcttctgcaacagcagccagagggtggagctgctggccaagaagatcagccagctgggctacagctgcttctacatccacgccaagatgaggcaggagcacaggaacagagtcttccatgacttcagaaatggcctgtgcaggaacctggtgtgcacagacctcttcacccggggcatcgacatccaggccgtgaatgtggtgatcaactttgacttccccaagctggccgagacctacctgcaccgcatcggccgcagcggccgcttcggccacctgggcctggccatcaacctgatcacctatgatgaccgcttcaacctgaagagcattgaggagcagctgggcacagagatcaagcccatccccagcaacatcgacaagagcctgtatgtggccgagtaccacagcgagcctgtggaggatgagaagccctag

SEQ ID NO: 149525 - DNA, 1452 bp, synthetic construct; identical to SEQ ID NO: 149524
  misc_feature 1..1452: note = Description of Artificial Sequence: Synthetic coding sequence
  source 1..1452: mol_type = other DNA

SEQ ID NO: 149526 - DNA, 1452 bp, synthetic construct; identical to SEQ ID NO: 149524
  misc_feature 1..1452: note = Description of Artificial Sequence: Synthetic coding sequence
  source 1..1452: mol_type = other DNA

SEQ ID NO: 149527 - DNA, 564 bp, synthetic construct
  misc_feature 1..564: note = Description of Artificial Sequence: Synthetic coding sequence
  source 1..564: mol_type = other DNA
atgagcacagccaggacagaaaatcctgtgatcatgggcctgagcagccagaatggccagctgcggggccctgtgaagcccaccggcggccctgggggcggcggcacccagacccagcagcagatgaaccagctgaagaacaccaacaccatcaacaacggcacccagcagcaggcccagagcatgaccaccaccatcaagccaggagatgactggaagaagaccctgaagctgccccccaaggacctgcgcatcaagaccagtgatgtgaccagcaccaagggaaatgaatttgaggactactgcctgaagcgggagctgctgatgggcatctttgagatgggctgggagaagcccagccccatccaggaggagagcatccccatcgccctgagcggccgggacatcctggcccgggccaagaatggcaccgggaagagcggggcctacctgatccccctgctggagcggctggacctgaagaaggacaacatccaggccatggtgattgtgcccacccgggagctggccctgcaggtgtcccagatctgcaccgtgtgctag

SEQ ID NO: 149528 - DNA, 5139 bp, synthetic construct
  misc_feature 1..5139: note = Description of Artificial Sequence: Synthetic coding sequence
  source 1..5139: mol_type = other DNA
atggagagaaatgtgctgaccaccttcagccaggagatgagccagctgatcctgaatgagatgcccaaggccgagtacagcagcctcttcaatgactttgtggagagcgagttcttcctgattgatggagacagcctgctgatcacctgcatctgtgagatctccttcaagccaggccagaacctgcacttcttctacctggtggagcgctacctggtggacctgatcagcaagggcggccagttcaccatcgtgttcttcaaggatgctgaatatgcctacttcaacttccctgagctgctgagcctgaggacagccctgatcctgcacctgcagaagaacaccaccattgatgtgaggaccaccttcagccgctgcctgagcaaggagtggggcagcttcctggaggagagctacccctacttcctgattgtggctgatgagggcctgaatgacctgcagacccagctgttcaacttcctgatcatccacagctgggccaggaaggtgaatgtggtgctgagcagcggccaggagagtgatgtgctgtgcctgtatgcctacctgctgcccagcatgtaccgccaccagatcttctcctggaagaacaagcagaacatcaaggatgcctacaccaccctgctgaaccagctggagcgcttcaagctgagcgccctggcccccctgtttggcagcctgaagtggaacaacatcacagaggaggcccacaagacagtgtccctgctgacccaggtgtggccagagggcagtgacatccggcgggtcttctgtgtgaccagctgcagcctgagcctgaggatgtaccaccgcttcctgggcaaccgggagcccagcagcggccaggagacagagatccagcaggtgaacagcaactgcctgaccctgcaggagatggaggacctgtgcaagctgcactgcctgactgtggtgttcctgctgcacctgcccctgagccagagggcctgtgcccgggtcatcaccagccactgggccgaggacatgaagcccctgctgcagatgaagaagtggtgtgagtacttcatcctgaggaacatccacacctttgagttctggaacctgaacctgatccacctgagtgacctgaatgatgagctgctgctgaagaacatcgccttctactatgaaaatgaaaatgtgaagggcctgcacctgaacctgggggacaccatcatgaaggactatgagtacctgtggaacacagtgtccaagctggtgcgggactttgaggtgggccagcccttccccctgcggaccaccaaggtgtgcttcctggagaagaagcccagccccatcaaggacagcagcaatgagatggtgcccaacctgggcttcatccccaccagcagctttgtggtggacaagtttgctggggacatcctgaaggacctgcccttcctgaagagtgatgaccccatcgtgaccagcctggtgaagcagaaggagtttgatgagctggtgcactggcacagccacaagcccctgagtgatgattatgacaggagccgctgccagtttgatgagaagagccgggacccccgggtgctgcggtctgtgcagaagtaccacgtgttccagcgcttctacggcaacagcctggagaccgtgagcagcaagatcatcgtgacccagaccatcaagagcaagaaggacttcagcggccccaagagcaagaaggcccacgagaccaaggccgagatcatcgcccgggagaacaagaagaggctgtttgcccgggaggagcagaaggaggagcagaagtggaatgccctgtccttcagcattgaggagcagctgaaggagaacctgcacagcggcatcaagagcctggaggacttcctgaagagctgcaagagcagctgtgtgaagctgcaggtggagatggtgggcctgacagcctgcctgaaggcctggaaggagcactgccgctctgaggagggcaagaccaccaaggacctgagcattgctgtgcaggtgatgaagaggatccacagcctgatggagaagtacagcgagctgctgcaggaggatgaccggcagctgattgcccgctgcctgaagtacctgggctttgatgagctggccagcagcctgcacccagcccaggatgctgaaaatgatgtgaaggtgaagaagaggaacaagtacagcgtgggcatcggccctgcccgcttccagctgcagtacatgggccactacctgatcagagatgagaggaaggaccctgacccccgggtgcaggacttcatcccagacacctggcagcgggagctgctggatgtggtggacaagaatgaatctgctgtgattgtggcccccaccagcagcggcaagacctacgccagctactactgcatggagaaggtgctgaaggagagtgatgatggagtggtggtgtatgtggcccccaccaaggccctggtgaaccaggtggccgccaccgtgcagaaccgcttcaccaagaacctgcccagcggggaggtgctgtgtggggtcttcacccgggagtacagacatgatgccctgaactgccaggtgctgatcaccgtgcctgcctgctttgagatcctgctgctggccccccaccggcagaactgggtgaagaagatccgctacgtgatctttgatgaggtgcactgcctgggcggggagatcggggctgagatctgggagcacctgctggtgatgatccgctgccccttcctggccctgagcgccaccatcagcaaccctgagcacctgacagagtggctgcagagcgtgaagtggtactggaagcaggaggacaagatcatcgagaacaacacagccagcaagagacatgtgggccggcaggccggcttccccaaggactacctgcaggtgaagcagagctacaaggtgcggctggtgctgtatggagagcgctacaatgacctggagaagcacgtgtgcagcatcaagcatggagacatccactttgaccacttccacccctgtgccgccctgaccacagaccacatcgagagatatggcttccccccagacctgaccctgagcccccgggagagcatccagctgtatgatgccatgttccagatctggaagtcctggccccgggcccaggagctgtgcccagagaacttcatccacttcaacaacaagctggtgatcaagaagatggatgccaggaaatatgaggagagcctgaaggccgagctgacctcctggatcaagaatggaaatgtggagcaggccaggatggtgctgcagaacctgagccctgaggccgacctgagccctgagaacatgatcaccatgttccccctgctggtggagaagctgaggaagatggagaagctgcctgccctcttcttcctgttcaagctgggcgctgtggagaatgctgctgagagcgtgtccaccttcctgaagaagaagcaggagaccaagaggcctcccaaggctgacaaggaggcccacgtgatggccaacaagctgaggaaggtgaagaagagcattgagaagcagaagatcattgatgagaagagccagaagaagaccagaaatgtggaccagagcctcatccatgaagctgagcatgacaacctggtgaagtgcctggagaagaacctggagatcccccaggactgcacctatgctgaccagaaggctgtggacacagagaccctgcagaaggtgtttggccgggtgaagtttgagaggaaaggagaggagctgaaggccctggccgagcggggcatcggctaccaccacagcgccatgtccttcaaggagaagcagctggtggagatcctcttcaggaagggctacctgcgggtggtgacagccaccggcaccctggccctgggcgtgaacatgccctgcaagtctgtggtgtttgcccagaacagcgtgtacctggatgccctgaactaccggcagatgagcggccgggccggccggcggggccaggacctgatgggagatgtgtacttctttgacatccccttccccaagattggcaagctgatcaagagcaatgtgcctgagctgcggggccacttccccctgagcatcaccctggtgctgcggctgatgctgctggccagcaaaggagatgatcctgaagatgccaaggccaaggtgctgtctgtgctgaagcacagcctgctgtccttcaagcagccccgggtgatggacatgctgaagctgtacttcctgttcagcctgcagttcctggtgaaggagggctacctggaccaggagggcaaccccatgggctttgctggcctggtgagccacctgcactaccacgagcccagcaacctggtgtttgtgtccttcctggtgaatggcctcttccatgacctgtgccagcccaccaggaagggcagcaagcacttcagccaggatgtgatggagaagctggtgctggtgctggcccacctgtttggaagacgctacttcccccccaagttccaggatgcccactttgagttctaccagagcaaggtgttcctggatgacctgcctgaggacttcagtgatgccctggatgagtacaacatgaagatcatggaggacttcaccaccttcctgcgcatcgtgtccaagctggccgacatgaaccaggagtaccagctgcccctgagcaagatcaagttcaccgggaaggaatgtgaggacagccagctggtgagccacctgatgagctgcaaggagggccgggtggccatcagcccctttgtgtgcctgagcggcaactttgatgatgacctgctgcggctggagacccccaaccacgtgaccctgggcaccatcggcgtgaacagaagccaggcccctgtgctgctgagccagaagtttgacaacagaggaaggaagatgagcctgaatgcctatgccctggacttctacaagcacggcagcctcatcggcctggtgcaggacaacaggatgaatgaaggagatgcctactacctgctgaaggactttgccctgaccatcaagagcatctctgtgtccctgcgggagctgtgtgaaaatgaagatgacaacgtggtgctggcctttgagcagctgagcaccaccttctgggagaagctgaacaaggtgtag

SEQ ID NO: 149529 - DNA, 363 bp, synthetic construct
  misc_feature 1..363: note = Description of Artificial Sequence: Synthetic coding sequence
  source 1..363: mol_type = other DNA
atggagagaaatgtgctgaccaccttcagccaggagatgagccagctgatcctgaatgagatgcccaaggccgagtacagcagcctcttcaatgactttgtggagagcgagttcttcctgattgatggagacagcctgctgatcacctgcatctgtgagatctccttcaagccaggccagaacctgcacttcttctacctggtggagcgctacctggtggacctgatcagcaagggcggccagttcaccatcgtgttcttcaaggatgctgaatatgcctacttcaacttccctgagctgctgagcctgaggacagccctgatcctgcacctgcagaagaacaccaccattgatgtgaggtag

SEQ ID NO: 149530 - DNA, 885 bp, synthetic construct
  misc_feature 1..885: note = Description of Artificial Sequence: Synthetic coding sequence
  source 1..885: mol_type = other DNA
atgatccgctgccccttcctggccctgagcgccaccatcagcaaccctgagcacctgacagagtggctgcagagcgtgaagtggtactggaagcaggaggacaagatcatcgagaacaacacagccagcaagagacatgtgggccggcaggccggcttccccaaggactacctgcaggtgaagcagagctacaaggtgcggctggtgctgtatggagagcgctacaatgacctggagaagcacgtgtgcagcatcaagcatggagacatccactttgaccacttccacccctgtgccgccctgaccacagaccacatcgagagatatggcttccccccagacctgaccctgagcccccgggagagcatccagctgtatgatgccatgttccagatctggaagtcctggccccgggcccaggagctgtgcccagagaacttcatccacttcaacaacaagctggtgatcaagaagatggatgccaggaaatatgaggagagcctgaaggccgagctgacctcctggatcaagaatggaaatgtggagcaggccaggatggtgctgcagaacctgagccctgaggccgacctgagccctgagaacatgatcaccatgttccccctgctggtggagaagctgaggaagatggagaagctgcctgccctcttcttcctgttcaagctgggcgctgtggagaatgctgctgagagcgtgtccaccttcctgaagaagaagcaggagaccaagaggcctcccaaggctgacaaggaggcccacgtgatggccaacaagctgaggaaggtgaagaagagcattgagaagcagaagatcattgatgagaagagccagaagaaccagaagtgtggcagcaagcccaacacctag

SEQ ID NO: 149531 - DNA, 1062 bp, synthetic construct
  misc_feature 1..1062: note = Description of Artificial Sequence: Synthetic coding sequence
  source 1..1062: mol_type = other DNA
atgcagagcaagagggactgtgagctgtggtgtgagcgggtgaaccctgagaacaaggccgccctggaggcctgggtgcgggagaccggcatccggctggtgcaggtgaatggccagaggaaatatggaggccccccacctggctgggtgggcagccccccacctgctggcagcgaggtgttcatcggccgcctgccccaggatgtgtatgagcaccagctgatccccctcttccagagggtgggccgcctgtatgagttccggctgatgatgaccttcagcggcctgaacagaggatttgcctatgcccgctacagcagccggcggggggcccaggccgccatcgccaccctgcacaaccaccccctgcggcccagctgccccctgctggtgtgccgcagcacagagaagtgtgagctgtctgtggatggcctgccccccaacctgaccaggtctgccctgctgctggccctgcagcccctgggccctggcctgcaggaggcccggctgctgcccagccctggccctgcccctggccagatcgccctgctgaagttcagcagccacagagctgctgccatggccaagaaggccctggtggagggccagagccacctgtgtggggagcaggtggccgtggagtggctgaagccagacctgaagcagaggctgcggcagcagctggtgggccccttcctgcggagcccccagcctgagggcagccagctggccctggcccgggacaagctgggcttccagggcgcccgggccaccctgcagctgctgtgccagaggatgaagctgggcagccctgtgttcctgaccaagtgcctgggcatcggccctgctggctggcaccgcttctggtaccaggtggtgattcctggccaccctgtgcccttcagcggcctcatctgggtggtgctgaccctggatggaagagatggccacgaggtggccaaggatgctgtgtctgtgcggctgctgcaggccctgtctgagagcggggccaacctgctgtggagcgctggagctgaggccggcaccatggtgaagcagtag

SEQ ID NO: 149532 - DNA, 1491 bp, synthetic construct
  misc_feature 1..1491: note = Description of Artificial Sequence: Synthetic coding sequence
  source 1..1491: mol_type = other DNA
atgtttgccaaggccaccaggaacttcctgcgggaggtggatgctgatggagacctgattgctgtgagcaacctgaatgacagcgacaagctgcagctgctgagcctggtgaccaagaagaagcgcttctggtgctggcagaggcccaagtaccagttcctgagcctgaccctgggagatgtgctgattgaggaccagttccccagccctgtggtggtggagagtgactttgtgaagtatgagggcaagtttgccaaccacgtgtctggcaccctggagacagccctgggcaaggtgaagctgaacctgggcggcagcagccgggtggagagccagagcagctttggcaccctgaggaagcaggaggtggacctgcagcagctgatccgggacagcgctgagaggaccatcaacctgaggaaccctgtgctgcagcaggtgctggagggcagaaatgaggtgctgtgtgtgctgacccagaagatcaccaccatgcagaagtgtgtgatcagcgagcacatgcaggtggaggagaagtgtggcggcatcgtgggcatccagaccaagacagtgcaggtgtctgccacagaagatggaaatgtgaccaaggacagcaatgtggtgctggagatcccagctgccaccaccatcgcctatggagtcatcgagctgtatgtgaagctggatggccagtttgagttctgcctgctgcggggcaagcagggcggctttgagaacaagaagagaattgacagcgtgtacctggaccccctggtgttccgggagtttgccttcatcgacatgccagatgctgcccacggcatcagcagccaggacggccccctgtctgtgctgaagcaggccaccctgctgctggagaggaacttccacccctttgctgagctgcctgagccccagcagacagccctgagtgacatcttccaggccgtgctgtttgatgatgagctgctgatggtgctggagcctgtgtgtgatgacctggtgtctggcctgagccccaccgtggccgtgctgggggagctgaagccccggcagcagcaggacctggtggccttcctgcagctggtgggctgcagcctgcagggcggctgccccggcccagaagatgctggcagcaagcagctgttcatgacagcctacttcctggtgtctgccctggccgagatgccagattctgctgctgccctgctgggcacctgctgcaagctgcagatcatccccaccctgtgccacctgctgcgggccctgagtgatgatggagtgtctgacctggaggaccccaccctgacccccctgaaggacacagaaagatttggaattgtgcagaggctgtttgccagcgctgacatcagcctggagcggctgaagagctctgtgaaggccgtcatcctgaaggacagcaaggtgttccccctgctgctgtgcatcaccctgaatggcctgtgtgccctgggccgggagcacagctag

SEQ ID NO: 149533 - DNA, 1491 bp, synthetic construct; identical to SEQ ID NO: 149532
  misc_feature 1..1491: note = Description of Artificial Sequence: Synthetic coding sequence
  source 1..1491: mol_type = other DNA

SEQ ID NO: 149534 - DNA, 999 bp, synthetic construct
  misc_feature 1..999: note = Description of Artificial Sequence: Synthetic coding sequence
  source 1..999: mol_type = other DNA
atgcagaagtgtgtgatcagcgagcacatgcaggtggaggagaagtgtggcggcatcgtgggcatccagaccaagacagtgcaggtgtctgccacagaagatggaaatgtgaccaaggacagcaatgtggtgctggagatcccagctgccaccaccatcgcctatggagtcatcgagctgtatgtgaagctggatggccagtttgagttctgcctgctgcggggcaagcagggcggctttgagaacaagaagagaattgacagcgtgtacctggaccccctggtgttccgggagtttgccttcatcgacatgccagatgctgcccacggcatcagcagccaggacggccccctgtctgtgctgaagcaggccaccctgctgctggagaggaacttccacccctttgctgagctgcctgagccccagcagacagccctgagtgacatcttccaggccgtgctgtttgatgatgagctgctgatggtgctggagcctgtgtgtgatgacctggtgtctggcctgagccccaccgtggccgtgctgggggagctgaagccccggcagcagcaggacctggtggccttcctgcagctggtgggctgcagcctgcagggcggctgccccggcccagaagatgctggcagcaagcagctgttcatgacagcctacttcctggtgtctgccctggccgagatgccagattctgctgctgccctgctgggcacctgctgcaagctgcagatcatccccaccctgtgccacctgctgcgggccctgagtgatgatggagtgtctgacctggaggaccccaccctgacccccctgaaggacacagaaagatttggaattgtgcagaggctgtttgccagcgctgacatcagcctggagcggctgaagagctctgtgaaggccgtcatcctgaaggacagcaaggtgttccccctgctgctgtgcatcaccctgaatggcctgtgtgccctgggccgggagcacagctag

SEQ ID NO: 149535 - DNA, 999 bp, synthetic construct; identical to SEQ ID NO: 149534
  misc_feature 1..999: note = Description of Artificial Sequence: Synthetic coding sequence
  source 1..999: mol_type = other DNA

SEQ ID NO: 149536 - DNA, 1575 bp, synthetic construct
  misc_feature 1..1575: note = Description of Artificial Sequence: Synthetic coding sequence
  source 1..1575: mol_type = other DNA
atggccaacagcgctggcttcctgggggacctgaccacagagggcatcaacaagccaggcttctacaagggccctgctggcagccaggtgaccctgagcagcctgggcaaccagaccagggtgctgctggaggagcaggcccggcacctgctgaatgagcaggagcacgccaccatggcctactacctggatgagtaccggggcggctctgtgtctgtggaggccctggtgatggccctcttcaagctgctgaacacccacgccaagttcagcctgctgtctgaggtgcggggcaccatcagcccccaggacctggagagatttgaccacctggtgctgcggcgggagattgaatccatgaaggcccggcagcccccaggccctggggccggggacacctacagcatggtgtcctacagcgacaccggcagcagcacaggcagccacggcaccagcaccaccgtgtcctctgccaggaacaccctggacctggaggagactggagaggccgtgcagggcaacatcaatgccctgcctgatgtgtctgtggatgatgtgcgcagcaccagccagggcctgagcagcttcaagcccctgccccggcccccacccctggcccagggcaatgacctgcccctgggccagcccaggaagctgggccgggaggacctgcagccccccagctccatgcccagctgcagcggcaccgtcttcagcgccccccagaacagaagccccccagctggaacagcccccaccccaggcaccagcagcgcccaggacctgcccagcagccccatctatgcctctgtgtccccagccaaccccagcagcaagaggcccctggatgcccacctggccctggtgaaccagcaccccatcggccccttcccccgggtgcagagccccccccacctgaagagccccagcgctgaggccaccgtggccggcggctgcctgctgccccccagccccagcggccacccagaccagacaggcaccaaccagcactttgtgatggtggaggtgcacaggccagacagcgagccagatgtgaatgaggtgcgggccctgccccagaccaggacagccagcaccctgagccacctgagtgacagcggccagaccctgtctgaagattctggagtggatgctggggaggccgaggccagcgcccctggccggggccggcagagcgtgtccaccaagagccgcagcagcaaggagctgcccagaaatgaaagacccacagatggagccaacaagcccccaggcctgctggagcccaccagcaccctggtgcgggtgaagaagtctgctgccaccctgggcatcgccattgaaggaggagccaacacccggcagcccctgccccgcatcgtgaccatccagaggggcggcagcgcccacaactgtggccagctgaaggtgggccacgtgatcctggaggtgaatggcctgaccctgcggggcaaggagcaccgggaggccgcccgcatcatcgccgaggccttcaagaccaaggaccgggactacatcgacttcctggtgacagagttcaacgtgatgctgtag

SEQ ID NO: 149537 - DNA, 2724 bp, synthetic construct
  misc_feature 1..2724: note = Description of Artificial Sequence: Synthetic coding sequence
  source 1..2724: mol_type = other DNA
atgaatgcccccctggatggcctgtctgtgagcagcagcagcacaggcagcctgggcagcgctgctggggccggcggcggcggcggggccggcctgcggctgctgagcgccaacgtgcggcagctgcaccaggccctgacagccctgctgtctgaggccgagcgggagcagttcacccactgcctgaatgcctaccacgccaggagaaatgtgtttgacctggtgaggaccctgcgggtgctgctggacagccctgtgaagaggcggctgctgcccatgctgcggctggtgatccccaggagtgaccagctgctgtttgaccagtacacagctgagggcctgtacctgcctgccaccaccccctaccggcagcctgcctggggcggccctgacagcgctggccctggagaggtgcggctggtgtccctgcggcgggccaaggcccacgagggcctgggcttcagcatccggggcggcagcgagcacggcgtgggcatctacgtgtccctggtggagcccggcagcctggccgagaaggagggcctgcgggtgggggaccagatcctgcgggtgaatgacaagagcctggcccgggtgacccacgccgaggccgtgaaggccctgaagggcagcaagaagctggtgctgtctgtgtacagcgctggccgcatccctgggggctacgtgaccaaccacatctacacctgggtggacccccagggccgcagcatcagcccccccagcggcctgccccagccccacggcggggccctgcggcagcaggagggggacagaagaagcaccctgcacctgctgcagggcggagatgagaagaaggtgaacctggtgctgggagatggccgcagcctgggcctgaccatccggggcggcgcagaatatggcctgggcatctacatcactggagtggaccccggcagcgaggccgagggcagcggcctgaaggtgggggaccagatcctggaggtgaatggccgctccttcctgaacatcctgcatgatgaggccgtgcggctgctgaagagcagccgccacctgatcctgactgtgaaggatgtgggccgcctgccccgggcccggaccaccgtggatgagaccaagtggatcgccagcagccgcatccgggagaccatggccaacagcgctggcttcctgggggacctgaccacagagggcatcaacaagccaggcttctacaagggccctgctggcagccaggtgaccctgagcagcctgggcaaccagaccagggtgctgctggaggagcaggcccggcacctgctgaatgagcaggagcacgccaccatggcctactacctggatgagtacagaggaggctctgtgtctgtggaggccctggtgatggccctcttcaagctgctgaacacccacgccaagttcagcctgctgtctgaggtgcggggcaccatcagcccccaggacctggagagatttgaccacctggtgctgcggcgggagattgagagcatgaaggcccggcagcccccaggccctggagctggggacacctacagcatggtgtcctacagcgacaccggcagcagcacaggcagccacggcaccagcaccaccgtgagcagcgccaggaacaccctggacctggaggagaccggggaggccgtgcagggcaacatcaatgccctgcctgatgtgtctgtggatgatgtgcgcagcaccagccagggcctgagcagcttcaagcccctgccccggcccccacccctggcccagggcaatgacctgcccctgggccagcccaggaagctgggccgggaggacctgcagccccccagctccatgcccagctgcagcggcaccgtcttcagcgccccccagaacagaagccccccagctggaacagcccccaccccaggcaccagcagcgcccaggacctgcccagcagccccatctatgcctctgtgtccccagccaaccccagcagcaagaggcccctggatgcccacctggccctggtgaaccagcaccccatcggccccttcccccgggtgcagagccccccccacctgaagagccccagcgctgaggccaccgtggccggcggctgcctgctgccccccagccccagcggccacccagaccagacaggcaccaaccagcactttgtgatggtggaggtgcacaggccagattctgagccagatgtgaatgaggtgcgggccctgccccagaccaggacagccagcaccctgagccacctgagtgacagcggccagaccctgtctgaggacagcggcgtggatgctggggaggccgaggccagcgcccctggccggggccggcagagcgtgtccaccaagagccgcagcagcaaggagctgcccagaaatgaaagacccacagatggagccaacaagcccccaggcctgctggagcccaccagcaccctggtgcgggtgaagaagtctgctgccaccctgggcatcgccatcgagggcggggccaacacccggcagcccctgcccagaattgtgaccatccagagaggaggcagcgcccacaactgtggccagctgaaggtgggccacgtgatcctggaggtgaatggcctgaccctgcggggcaaggagcaccgggaggccgcccgcatcatcgccgaggccttcaagaccaaggaccgggactacatcgacttcctggtgacagagttcaacgtgatgctgtag

SEQ ID NO: 149538 - DNA, 1038 bp, synthetic construct
  misc_feature 1..1038: note = Description of Artificial Sequence: Synthetic coding sequence
  source 1..1038: mol_type = other DNA
atgaatgcccccctggatggcctgtctgtgagcagcagcagcacaggcagcctgggcagcgctgctggggccggcggcggcggcggggccggcctgcggctgctgagcgccaacgtgcggcagctgcaccaggccctgacagccctgctgtctgaggccgagcgggagcagttcacccactgcctgaatgcctaccacgccaggagaaatgtgtttgacctggtgaggaccctgcgggtgctgctggacagccctgtgaagaggcggctgctgcccatgctgcggctggtgatccccaggagtgaccagctgctgtttgaccagtacacagctgagggcctgtacctgcctgccaccaccccctaccggcagcctgcctggggcggccctgacagcgctggccctggagaggtgcggctggtgtccctgcggcgggccaaggcccacgagggcctgggcttcagcatccggggcggcagcgagcacggcgtgggcatctacgtgtccctggtggagcccggcagcctggccgagaaggagggcctgcgggtgggggaccagatcctgcgggtgaatgacaagagcctggcccgggtgacccacgccgaggccgtgaaggccctgaagggcagcaagaagctggtgctgtctgtgtacagcgctggccgcatccctgggggctacgtgaccaaccacatctacacctgggtggacccccagggccgcagcatcagcccccccagcggcctgccccagccccacggcggggccctgcggcagcaggagggggacagaagaagcaccctgcacctgctgcagggcggagatgagaagaaggtgtctggagtgggcaaaggaggccagcccctgcggcaccgcatcctgccccccaaccctgagcagcagagctgcctggaggccgcccggcggggctggttctgccccggctctgtgttcccccaggtgtgcacagagggctggtgcttcttctttgccttcctgtttgacctgtgcagcgtgtgctacaacacaggatag

SEQ ID NO: 149539 - DNA, 1671 bp, synthetic construct
  misc_feature 1..1671: note = Description of Artificial Sequence: Synthetic coding sequence
  source 1..1671: mol_type = other DNA
atgcacggcagcctggaggccctgctcttcctgccccaggtgaccctgagcctggcccacgcccacctgatctgcagcaatgcccagctggagatgtgtgtgttcccccaccgcttcctgggggacctgaccacagagggcatcaacaagccaggcttctacaagggccctgctggcagccaggtgaccctgagcagcctgggcaaccagaccagggtgctgctggaggagcaggcccggcacctgctgaatgagcaggagcacgccaccatggcctactacctggatgagtaccggggcggctctgtgtctgtggaggccctggtgatggccctcttcaagctgctgaacacccacgccaagttcagcctgctgtctgaggtgcggggcaccatcagcccccaggacctggagagatttgaccacctggtgctgcggcgggagattgaatccatgaaggcccggcagcccccaggccctggggccggggacacctacagcatggtgtcctacagcgacaccggcagcagcacaggcagccacggcaccagcaccaccgtgtcctctgccaggaacaccctggacctggaggagactggagaggccgtgcagggcaacatcaatgccctgcctgatgtgtctgtggatgatgtgcgcagcaccagccagggcctgagcagcttcaagcccctgccccggcccccacccctggcccagggcaatgacctgcccctgggccagcccaggaagctgggccgggaggacctgcagccccccagctccatgcccagctgcagcggcaccgtcttcagcgccccccagaacagaagccccccagctggaacagcccccaccccaggcaccagcagcgcccaggacctgcccagcagccccatctatgcctctgtgtccccagccaaccccagcagcaagaggcccctggatgcccacctggccctggtgaaccagcaccccatcggccccttcccccgggtgcagagccccccccacctgaagagccccagcgctgaggccaccgtggccggcggctgcctgctgccccccagccccagcggccacccagaccagacaggcaccaaccagcactttgtgatggtggaggtgcacaggccagacagcgagccagatgtgaatgaggtgcgggccctgccccagaccaggacagccagcaccctgagccacctgagtgacagcggccagaccctgtctgaagattctggagtggatgctggggaggccgaggccagcgcccctggccggggccggcagagcgtgtccaccaagagccgcagcagcaaggagctgcccagaaatgaaagacccacagatggagccaacaagcccccaggcctgctggagcccaccagcaccctggtgcgggtgaagaagtctgctgccaccctgggcatcgccattgaaggaggagccaacacccggcagcccctgccccgcatcgtgaccatccagaggggcggcagcgcccacaactgtggccagctgaaggtgggccacgtgatcctggaggtgaatggcctgaccctgcggggcaaggagcaccgggaggccgcccgcatcatcgccgaggccttcaagaccaaggaccgggactacatcgacttcctggtgacagagttcaacgtgatgctgtag

SEQ ID NO: 149540 - DNA, 1059 bp, synthetic construct
  misc_feature 1..1059: note = Description of Artificial Sequence: Synthetic coding sequence
  source 1..1059: mol_type = other DNA
atgtttgctgctgccaccaagagctttgtgaagcaggtgggagatggcggccgcctggtgcctgtgcccagcctgtctgaggccgacaagtaccagcccctgagcctggtggtgaagaagaagcgctgcttcctgttcccccgctacaagttcaccagcacccccttcaccctgaaggacatcctgctgggggaccgggagatctctgctggcatcagcagctaccagctgctgaactatgaagatgaaagtgatgtgtccctgtatggaagaagaggcaaccacatcgtgaatgatgtgggcatcaacgtggccggcagtgacagcattgctgtgaaggccagctttggcatcgtgaccaagcatgaggtggaggtgtccaccctgctgaaggagatcaccaccaggaagatcaactttgaccacagcctcatccggcagagccgcagcagcaggaaggctgtgctgtgtgtggtgatggagagcatccgcaccacccggcagtgcagcctgtctgtgcatgctggcatccggggggaggccatgaggttccacttcatggatgagcagaaccccaagggccgggacaaggccatcgtgtttcctgcccacaccaccatcgccttctctgtgtttgagctgttcatctacctggatggagcctttgacctgtgtgtgacctctgtgtccaaaggaggctttgagcgggaggagacagccacctttgccctgctgtaccgcctgaggaacatcctgtttgaaagaaacagaagagtgatggatgtgatcagccgcagccagctgtacctggatgacctcttcagtgactactatgacaagcccctgtccatgacagacatcagcctgaaggagggcacccacatccgggtgaacctgctgaaccacaacatccccaagggcccctgcatcctgtgtggcatgggcaacttcaagcgggagaccgtgtatggctgcttccagtgcagcgtggatggccagaagtatgtgcggctgcatgctgtgccctgctttgacatctggcacaagaggatgaagtag

SEQ ID NO: 149541 - DNA, 1059 bp, synthetic construct; identical to SEQ ID NO: 149540
  misc_feature 1..1059: note = Description of Artificial Sequence: Synthetic coding sequence
  source 1..1059: mol_type = other DNA

SEQ ID NO: 149542 - DNA, 2388 bp, synthetic construct
  misc_feature 1..2388: note = Description of Artificial Sequence: Synthetic coding sequence
  source 1..2388: mol_type = other DNA
atgagcaagaggcaccggctggacctgggggaggactaccccagcggcaagaagagagctggaacagatggcaaggaccgggaccgggaccgggaccgggaggacaggagcaaggaccgggaccgggagcgggacagaggagaccgggagcgggagcgggagaaggagaaggagaaggagctgcgggccagcaccaatgccatgctgatctctgctggcctgccccccctgaaggccagccacagcgcccacagcacccacagcgcccacagcacccacagcacccacagcgcccacagcacccatgctggccacgccggccacaccagcctgccccagtgcatcaaccccttcaccaacctgccccacaccccccgctactatgacatcctgaagaagaggctgcagctgcctgtgtgggagtacaaggaccgcttcacagacatcctggtgcgccaccagagctttgtgctggtgggggagaccggcagcggcaagaccacccagatcccccagtggtgtgtggagtacatgaggagcctgcccggccccaagaggggcgtggcctgcacccagccccggcgggtggccgccatgtctgtggcccagagggtggctgatgagatggatgtgatgctgggccaggaggtgggctacagcatccgctttgaggactgcagcagcgccaagaccatcctgaagtacatgacagatggcatgctgctgcgggaggccatgaatgaccccctgctggagagatatggagtcatcatcctggatgaggcccacgagaggaccctggccacagacatcctgatgggcgtgctgaaggaggtggtgcggcagaggagtgacctgaaggtgattgtgatgtctgccaccctggatgctgggaagttccagatctactttgacaactgccccctgctgaccatccctggccgcacccaccctgtggagatcttctacaccccagagcctgagcgggactacctggaggccgccatccgcaccgtcatccagatccacatgtgtgaggaggaggagggggacctgctgctcttcctgaccggccaggaggagattgatgaggcctgcaagaggatcaagcgggaggtggatgacctgggccctgaggtgggggacatcaagatcatccccctgtacagcaccctgcccccccagcagcagcagaggatctttgagcccccaccacccaagaagcagaatggagccatcggcaggaaggtggtggtgtccaccaacattgctgagaccagcctgaccattgatggagtggtgtttgtgattgatcctggctttgccaagcagaaggtgtacaacccccgcatccgggtggagagcctgctggtgacagccatcagcaaggccagcgcccagcagagagctggccgggccggccgcaccaggcctgggaagtgcttccggctgtacacagagaaggcctacaagacagagatgcaggacaacacctacccagagatcctgcggagcaacctgggctctgtggtgctgcagctgaagaagctgggcattgatgacctggtgcactttgacttcatggaccccccagcccctgagaccctgatgagggccctggagctgctgaactacctggccgccctgaatgatgatggagacctgacagagctgggctccatgatggccgagttccccctggacccccagctggccaagatggtgattgccagctgtgactacaactgcagcaatgaggtgctgagcatcacagccatgctgtctgtgccccagtgctttgtgcggcccacagaggccaagaaggccgcagatgaggccaagatgagatttgcccacattgatggagaccacctgaccctgctgaatgtgtaccacgccttcaagcagaaccacgagagcgtgcagtggtgctatgacaacttcatcaactaccgcagcctgatgtctgctgacaacgtgcggcagcagctgagccgcatcatggaccgcttcaacctgcccaggaggagcacagacttcaccagccgggactactacatcaacatcaggaaggccctggtgacaggctacttcatgcaggtggcccacctggagaggacaggccactacctgactgtgaaggacaaccaggtggtgcagctgcaccccagcacagtgctggaccacaagccagagtgggtgctgtacaatgaatttgtgctgaccaccaagaactacatccgcacctgcacagacatcaagccagagtggctggtgaagatcgccccccagtactatgacatgagcaacttcccccagtgtgaggccaagaggcagctggaccgcatcatcgccaagctgcagagcaaggagtacagccagtactag

SEQ ID NO: 149543 - DNA, 2355 bp, synthetic construct
  misc_feature 1..2355: note = Description of Artificial Sequence: Synthetic coding sequence
  source 1..2355: mol_type = other DNA
atgagcaagaggcaccggctggacctgggggaggactaccccagcggcaagaagagagctggaacagatggcaaggaccgggaccgggaccgggagcgggacagaggagaccgggagcgggagcgggagaaggagaaggagaaggagctgcgggccagcaccaatgccatgctgatctctgctggcctgccccccctgaaggccagccacagcgcccacagcacccacagcgcccacagcacccacagcacccacagcgcccacagcacccacgccggccatgctggccacaccagcctgccccagtgcatcaaccccttcaccaacctgccccacaccccccgctactatgacatcctgaagaagaggctgcagctgcctgtgtgggagtacaaggaccgcttcacagacatcctggtgcgccaccagagctttgtgctggtgggggagactggaagtggcaagaccacccagatcccccagtggtgtgtggagtacatgaggagcctgcccggccccaagaggggcgtggcctgcacccagcccaggagagtggccgccatgtctgtggcccagagggtggctgatgagatggatgtgatgctgggccaggaggtgggctacagcatccgctttgaggactgcagcagcgccaagaccatcctgaagtacatgacagatggcatgctgctgcgggaggccatgaatgaccccctgctggagagatatggagtcatcatcctggatgaggcccacgagaggaccctggccacagacatcctgatgggcgtgctgaaggaggtggtgcggcagaggagtgacctgaaggtgattgtgatgtctgccaccctggatgctgggaagttccagatctactttgacaactgccccctgctgaccatccctggccgcacccaccctgtggagatcttctacaccccagagcctgagcgggactacctggaggccgccatcagaactgtcatccagatccacatgtgtgaggaggaggagggggacctgctgctcttcctgaccggccaggaggagattgatgaggcctgcaagaggatcaagcgggaggtggatgacctgggccctgaggtgggggacatcaagatcatccccctgtacagcaccctgcccccccagcagcagcagaggatctttgagcccccaccacccaagaagcagaatggagccatcggcaggaaggtggtggtgtccaccaacattgctgagaccagcctgaccattgatggagtggtgtttgtgattgaccccggctttgccaagcagaaggtgtacaacccccgcatccgggtggagagcctgctggtgacagccatcagcaaggccagcgcccagcagagagctggccgggccggccgcaccaggcctgggaagtgcttccggctgtacacagagaaggcctacaagacagagatgcaggacaacacctacccagagatcctgcggagcaacctgggctctgtggtgctgcagctgaagaagctgggcattgatgacctggtgcactttgacttcatggaccccccagcccctgagaccctgatgagggccctggagctgctgaactacctggccgccctgaatgatgatggagacctgacagagctgggctccatgatggccgagttccccctggacccccagctggccaagatggtgattgccagctgtgactacaactgcagcaatgaggtgctgagcatcacagccatgctgtctgtgccccagtgctttgtgcggcccacagaggccaagaaggctgctgatgaggccaagatgagatttgcccacattgatggagaccacctgaccctgctgaatgtgtaccacgccttcaagcagaaccatgaatctgtgcagtggtgctatgacaacttcatcaactaccgcagcctgatgtctgctgacaacgtgcggcagcagctgagccgcatcatggaccgcttcaacctgccccggcgcagcacagacttcaccagccgggactactacatcaacatcaggaaggccctggtgacaggctacttcatgcaggtggcccacctggagaggacaggccactacctgactgtgaaggacaaccaggtggtgcagctgcaccccagcacagtgctggaccacaagccagagtgggtgctgtacaatgaatttgtgctgaccaccaagaactacatccgcacctgcacagacatcaagccagagtggctggtgaagatcgccccccagtactatgacatgagcaacttcccccagtgtgaggccaagaggcagctggaccgcatcatcgccaagctgcagagcaaggagtacagccagtactag

SEQ ID NO: 149544 - DNA, 1683 bp, synthetic construct
  misc_feature 1..1683: note = Description of Artificial Sequence: Synthetic coding sequence
  source 1..1683: mol_type = other DNA
atggagagccagcctgcccaggagtgcctgatgcagatgttcctgcccattgaaccagcctgctttgtggagtggctgggcaccagccccagccagctgggcgtggtgatggtggatgaggcccacgagaggaccctgcacacagacatcctgtttggcctcatcaaggatgtggcccgcttccggcctgagctgaaggtgctggtggccagcgccaccatggacacagcccgcttcagcaccttctttgatgatgcccctgtgttccgcatccctggccgccgcttccctgtggacatcttctacaccaaggcccctgaggccgactacctggaggcctgtgtggtgtctgtgctgcagatccacgtgacccagcccccaggggacatcctggtgttcctgaccggccaggaggagattgaggccgcctgtgagatgctgcaggaccgctgccggcggctgggcagcaagatccgggagctgctggtgctgcccatctatgccaacctgcccagcgacatgcaggcccgcatcttccagcccaccccacctggggccaggaaggtggtggtggccaccaacattgctgagaccagcctgaccatcgagggcatcatctacgtgctggaccccggcttctgcaagcagaagagctacaaccccaggacaggcatggagagcctgactgtgaccccctgcagcaaggccagcgccaaccagagagctggccgggccggccgggtggccgccggcaagtgcttccggctgtacacagcctgggcctaccagcacgagctggaggagaccaccgtgcctgagatccagaggaccagcctgggcaatgtggtgctgctgctgaagagcctgggcatccatgacctgatgcactttgacttcctggaccccccaccctatgagaccctgctgctggccctggagcagctgtatgccctgggcgccctgaaccacctgggggagctgaccaccagcggcaggaagatggccgagctgcctgtggaccccatgctgagcaagatgatcctggccagcgagaagtacagctgcagcgaggagatcctgactgtggccgccatgctgtctgtgaacaacagcatcttctaccggcccaaggacaaggtggtgcatgctgacaatgcccgggtgaacttcttcctgcctggaggagaccacctggtgctgctgaatgtgtacacccagtgggccgagagcggctacagcagccagtggtgctatgaaaattttgtgcagttccgctccatgaggcgggccagagatgtgcgggagcagctggagggcctgctggagcgggtggaggtgggcctgagcagctgccagggcgactacatccgggtgaggaaggccatcacagctggctacttctaccacacagcccggctgaccaggagcggctacagaacagtgaagcagcagcagaccgtcttcatccaccccaacagcagcctgtttgagcagcagccccgctggctgctgtaccacgagctggtgctgaccaccaaggagttcatgaggcaggtgctggagattgagagctcctggctgctggaggtggccccccactactacaaggccaaggagctggaggacccccacgccaagaagatgcccaagaagattggcaagacccgggaggagctgggctag

SEQ ID NO: 149545 - DNA, 3126 bp, synthetic construct
  misc_feature 1..3126: note = Description of Artificial Sequence: Synthetic coding sequence
  source 1..3126: mol_type = other DNA
atggccaccccagctggcctggagcgctgggtgcaggatgagctgcacagcgtgctgggcctgtctgaaagacatgtggcccagttcctgattggaacagcccagcgctgcaccagcgctgaggagtttgtgcagaggctgcgggacacagacaccctggacctgagcggccctgcccgggactttgccctgcggctgtggaacaaggtgcccaggaaggctgtggtggagaagccagcccgggctgctgagcgggaggcccgggccctgctggagaagaacagaagctaccgcctgctggaggacagcgaggagagcagcgaggagaccgtgtcccgggccggcagcagcctgcagaagaagaggaagaagaggaagcacctgaggaagaagcgggaggaggaggaggaggaggaggccagcgagaagggcaagaagaagacaggaggcagcaagcagcagacagagaagccagagagtgaagatgagtgggagaggacagagcgggagcggctgcaggacctggaggagagagatgcctttgctgagcgggtgcggcagagggacaaggacaggaccagaaatgtgctggagaggagtgacaagaaggcctatgaggaggcccagaagaggctgaagatggccgaggaggacaggaaggccatggtgcctgagctgaggaagaagagcagaagagagtacctggccaagcgggagcgggagaagctggaggacctggaggccgagctggctgatgaggagttcctgtttggagatgtggagctgagcagacatgagcggcaggagctgaagtacaagagaagagtgcgggacctggcccgggagtacagagctgctggggagcaggagaagctggaggccaccaaccgctaccacatgcccaaggagacccggggccagcctgcccgggctgtggacctggtggaggaggagagcggggcccctggagaggagcagaggcgctgggaggaggcccggctgggcgccgccagcctgaagtttggagccagagatgctgccagccaggagcccaagtaccagctggtgctggaggaggaggagaccattgaatttgtgcgggccacccagctgcagggagatgaggagcccagcgccccacccaccagcacccaggcccagcagaaggagagcatccaggccgtgcggcgcagcctgcccgtcttccccttccgggaggagctgctggccgccatcgccaaccaccaggtgctgatcatcgagggggagaccggcagcggcaagaccacccagatcccccagtacctgtttgaggagggctacaccaacaagggcatgaagatcgcctgcacccagccccggcgggtggccgccatgtctgtggccgcccgggtggcccgggagatgggcgtgaagctgggcaatgaggtgggctacagcatccgctttgaggactgcaccagcgagaggacagtgctgcgctacatgacagatggcatgctgctgcgggagttcctgtctgagccagacctggccagctacagcgtggtgatggtggatgaggcccacgagaggaccctgcacacagacatcctgtttggcctcatcaaggatgtggcccgcttccggcctgagctgaaggtgctggtggccagcgccaccatggacacagcccgcttcagcaccttctttgatgatgcccctgtgttccgcatccctggaagacgcttccctgtggacatcttctacaccaaggcccctgaggccgactacctggaggcctgtgtggtgtctgtgctgcagatccacgtgacccagcccccaggggacatcctggtgttcctgaccggccaggaggagattgaagctgcctgtgagatgctgcaggaccgctgccggcggctgggcagcaagatccgggagctgctggtgctgcccatctatgccaacctgcccagcgacatgcaggcccgcatcttccagcccaccccacctggggccaggaaggtggtggtggccaccaacattgctgagaccagcctgaccatcgagggcatcatctacgtgctggaccccggcttctgcaagcagaagagctacaaccccaggacaggcatggagagcctgactgtgaccccctgcagcaaggccagcgccaaccagagagctggccgggccggccgggtggccgccggcaagtgcttccggctgtacacagcctgggcctaccagcacgagctggaggagaccaccgtgcctgagatccagaggaccagcctgggcaatgtggtgctgctgctgaagagcctgggcatccatgacctgatgcactttgacttcctggaccccccaccctatgagaccctgctgctggccctggagcagctgtatgccctgggcgccctgaaccacctgggggagctgaccaccagcggcaggaagatggccgagctgcctgtggaccccatgctgagcaagatgatcctggccagcgagaagtacagctgcagcgaggagatcctgactgtggccgccatgctgtctgtgaacaacagcatcttctaccggcccaaggacaaggtggtgcacgccgacaatgcccgggtgaacttcttcctgcccggcggggaccacctggtgctgctgaatgtgtacacccagtgggccgagagcggctacagcagccagtggtgctatgagaactttgtgcagttccgctccatgagaagagccagagatgtgcgggagcagctggagggcctgctggagcgggtggaggtgggcctgagcagctgccagggcgactacatccgggtgaggaaggccatcacagctggctacttctaccacacagcccggctgaccaggagcggctacagaacagtgaagcagcagcagacagtgttcatccaccccaacagcagcctgtttgagcagcagccccgctggctgctgtaccacgagctggtgctgaccaccaaggagttcatgaggcaggtgctggagattgagagctcctggctgctggaggtggccccccactactacaaggccaaggagctggaggacccccacgccaagaagatgcccaagaagattggcaagacccgggaggagctgggctag

SEQ ID NO: 149546 - DNA, 1683 bp, synthetic construct
  misc_feature 1..1683: note = Description of Artificial Sequence: Synthetic coding sequence
  source 1..1683: mol_type = other DNA
atggagagccagcctgcccaggagtgcctgatgcagatgttcctgcccattgaaccagcctgctttgtggagtggctgggcaccagccccagccagctgggcgtggtgatggtggatgaggcccacgagaggaccctgcacacagacatcctgtttggcctcatcaaggatgtggcccgcttccggcctgagctgaaggtgctggtggccagcgccaccatggacacagcccgcttcagcaccttctttgatggagcccctgtgttccgcatccctggccgccgcttccctgtggacatcttctacaccaaggcccctgaggccgactacctggaggcctgtgtggtgtctgtgctgcagatccacgtgacccagcccccaggggacatcctggtgttcctgaccggccaggaggagattgaggccgcctgtgagatgctgcaggaccgctgccggcggctgggcagcaagatccgggagctgctggtgctgcccatctatgccaacctgcccagcgacatgcaggcccgcatcttccagcccaccccacctggggccaggaaggtggtggtggccaccaacattgctgagaccagcctgaccatcgagggcatcatctacgtgctggaccccggcttctgcaagcagaagagctacaaccccaggacaggcatggagagcctgactgtgaccccctgcagcaaggccagcgccaaccagagagctggccgggccggccgggtggccgccggcaagtgcttccggctgtacacagcctgggcctaccagcacgagctggaggagaccaccgtgcctgagatccagaggaccagcctgggcaatgtggtgctgctgctgaagagcctgggcatccatgacctgatgcactttgacttcctggaccccccaccctatgagaccctgctgctggccctggagcagctgtatgccctgggcgccctgaaccacctgggggagctgaccaccagcggcaggaagatggccgagctgcctgtggaccccatgctgagcaagatgatcctggccagcgagaagtacagctgcagcgaggagatcctgactgtggccgccatgctgtctgtgaacaacagcatcttctaccggcccaaggacaaggtggtgcatgctgacaatgcccgggtgaacttcttcctgcctggaggagaccacctggtgctgctgaatgtgtacacccagtgggccgagagcggctacagcagccagtggtgctatgaaaattttgtgcagttccgctccatgaggcgggccagagatgtgcgggagcagctggagggcctgctggagcgggtggaggtgggcctgagcagctgccagggcgactacatccgggtgaggaaggccatcacagctggctacttctaccacacagcccggctgaccaggagcggctacagaacagtgaagcagcagcagaccgtcttcatccaccccaacagcagcctgtttgagcagcagccccgctggctgctgtaccacgagctggtgctgaccaccaaggagttcatgaggcaggtgctggagattgagagctcctggctgctggaggtggccccccactactacaaggccaaggagctggaggacccccacgccaagaagatgcccaagaagattggcaagacccgggaggagctgggctag

SEQ ID NO: 149547 - DNA, 3126 bp, synthetic construct
  misc_feature 1..3126: note = Description of Artificial Sequence: Synthetic coding sequence
  source 1..3126: mol_type = other DNA
atggccaccccagctggcctggagcgctgggtgcaggatgagctgcacagcgtgctgggcctgtctgaaagacatgtggcccagttcctgattggaacagcccagcgctgcaccagcgctgaggagtttgtgcagaggctgcgggacacagacaccctggacctgagcggccctgcccgggactttgccctgcggctgtggaacaaggtgcccaggaaggctgtggtggagaagccagcccgggctgctgagcgggaggcccgggccctgctggagaagaacagaagctaccgcctgctggaggacagcgaggagagcagcgaggagaccgtgtcccgggccggcagcagcctgcagaagaagaggaagaagaggaagcacctgaggaagaagcgggaggaggaggaggaggaggaggccagcgagaagggcaagaagaagacaggaggcagcaagcagcagacagagaagccagagagtgaagatgagtgggagaggacagagcgggagcggctgcaggacctggaggagagagatgcctttgctgagcgggtgcggcagagggacaaggacaggaccagaaatgtgctggagaggagtgacaagaaggcctatgaggaggcccagaagaggctgaagatggccgaggaggacaggaaggccatggtgcctgagctgaggaagaagagcagaagagagtacctggccaagcgggagcgggagaagctggaggacctggaggccgagctggctgatgaggagttcctgtttggagatgtggagctgagcagacatgagcggcaggagctgaagtacaagagaagagtgcgggacctggcccgggagtacagagctgctggggagcaggagaagctggaggccaccaaccgctaccacatgcccaaggagacccggggccagcctgcccgggctgtggacctggtggaggaggagagcggggcccctggagaggagcagaggcgctgggaggaggcccggctgggcgccgccagcctgaagtttggagccagagatgctgccagccaggagcccaagtaccagctggtgctggaggaggaggagaccattgaatttgtgcgggccacccagctgcagggagatgaggagcccagcgccccacccaccagcacccaggcccagcagaaggagagcatccaggccgtgcggcgcagcctgcccgtcttccccttccgggaggagctgctggccgccatcgccaaccaccaggtgctgatcatcgagggggagaccggcagcggcaagaccacccagatcccccagtacctgtttgaggagggctacaccaacaagggcatgaagatcgcctgcacccagccccggcgggtggccgccatgtctgtggccgcccgggtggcccgggagatgggcgtgaagctgggcaatgaggtgggctacagcatccgctttgaggactgcaccagcgagaggacagtgctgcgctacatgacagatggcatgctgctgcgggagttcctgtctgagccagacctggccagctacagcgtggtgatggtggatgaggcccacgagaggaccctgcacacagacatcctgtttggcctcatcaaggatgtggcccgcttccggcctgagctgaaggtgctggtggccagcgccaccatggacacagcccgcttcagcaccttctttgatggagcccctgtgttccgcatccctggaagacgcttccctgtggacatcttctacaccaaggcccctgaggccgactacctggaggcctgtgtggtgtctgtgctgcagatccacgtgacccagcccccaggggacatcctggtgttcctgaccggccaggaggagattgaagctgcctgtgagatgctgcaggaccgctgccggcggctgggcagcaagatccgggagctgctggtgctgcccatctatgccaacctgcccagcgacatgcaggcccgcatcttccagcccaccccacctggggccaggaaggtggtggtggccaccaacattgctgagaccagcctgaccatcgagggcatcatctacgtgctggaccccggcttctgcaagcagaagagctacaaccccaggacaggcatggagagcctgactgtgaccccctgcagcaaggccagcgccaaccagagagctggccgggccggccgggtggccgccggcaagtgcttccggctgtacacagcctgggcctaccagcacgagctggaggagaccaccgtgcctgagatccagaggaccagcctgggcaatgtggtgctgctgctgaagagcctgggcatccatgacctgatgcactttgacttcctggaccccccaccctatgagaccctgctgctggccctggagcagctgtatgccctgggcgccctgaaccacctgggggagctgaccaccagcggcaggaagatggccgagctgcctgtggaccccatgctgagcaagatgatcctggccagcgagaagtacagctgcagcgaggagatcctgactgtggccgccatgctgtctgtgaacaacagcatcttctaccggcccaaggacaaggtggtgcacgccgacaatgcccgggtgaacttcttcctgcccggcggggaccacctggtgctgctgaatgtgtacacccagtgggccgagagcggctacagcagccagtggtgctatgagaactttgtgcagttccgctccatgagaagagccagagatgtgcgggagcagctggagggcctgctggagcgggtggaggtgggcctgagcagctgccagggcgactacatccgggtgaggaaggccatcacagctggctacttctaccacacagcccggctgaccaggagcggctacagaacagtgaagcagcagcagacagtgttcatccaccccaacagcagcctgtttgagcagcagccccgctggctgctgtaccacgagctggtgctgaccaccaaggagttcatgaggcaggtgctggagattgagagctcctggctgctggaggtggccccccactactacaaggccaaggagctggaggacccccacgccaagaagatgcccaagaagattggcaagacccgggaggagctgggctag

SEQ ID NO: 149548 - DNA, 1683 bp, synthetic construct; identical to SEQ ID NO: 149544
  misc_feature 1..1683: note = Description of Artificial Sequence: Synthetic coding sequence
  source 1..1683: mol_type = other DNA

SEQ ID NO: 149549 - DNA, 888 bp, synthetic construct
  misc_feature 1..888: note = Description of Artificial Sequence: Synthetic coding sequence
  source 1..888: mol_type = other DNA
atgtctgaggacccccggggccccaaggtgcccaggaaggctgtggtggagaagccagcccgggctgctgagcgggaggcccgggccctgctggagaagaacagaagctaccgcctgctggaggacagcgaggagagcagcgaggagaccgtgtcccgggccggcagcagcctgcagaagaagaggaagaagaggaagcacctgaggaagaagcgggaggaggaggaggaggaggaggccagcgagaagggcaagaagaagacaggaggcagcaagcagcagacagagaagccagagagtgaagatgagtgggagaggacagagcgggagcggctgcaggacctggaggagagagatgcctttgctgagcgggtgcggcagagggacaaggacaggaccagaaatgtgctggagaggagtgacaagaaggcctatgaggaggcccagaagaggctgaagatggccgaggaggacaggaaggccatggtgcctgagctgaggaagaagagcagaagagagtacctggccaagcgggagcgggagaagctggaggacctggaggccgagctggctgatgaggagttcctgtttggagatgtggagctgagcagacatgagcggcaggagctgaagtacaagagaagagtgcgggacctggcccgggagtacagagctgctggggagcaggagaagctggaggccaccaaccgctaccacatgcccaaggagacccggggccagcctgcccgggctgtggacctggtggaggaggagagcggggcccctggagaggagcagaggcgctgggaggaggcccggctgggcgccgccagcctgaagtttggagccagagatgctgccagccaggagcccaagtaccagctgtag

SEQ ID NO: 149550 - DNA, 3126 bp, synthetic construct; identical to SEQ ID NO: 149545
  misc_feature 1..3126: note = Description of Artificial Sequence: Synthetic coding sequence
  source 1..3126: mol_type = other DNA

SEQ ID NO: 149551 - DNA, 3126 bp, synthetic construct; identical to SEQ ID NO: 149545
  misc_feature 1..3126: note = Description of Artificial Sequence: Synthetic coding sequence
  source 1..3126: mol_type = other DNA

SEQ ID NO: 149552 - DNA, 3126 bp, synthetic construct; identical to SEQ ID NO: 149545
  misc_feature 1..3126: note = Description of Artificial Sequence: Synthetic coding sequence
  source 1..3126: mol_type = other DNA

SEQ ID NO: 149553 - DNA, 888 bp, synthetic construct; identical to SEQ ID NO: 149549
  misc_feature 1..888: note = Description of Artificial Sequence: Synthetic coding sequence
  source 1..888: mol_type = other DNA

SEQ ID NO: 149554 - DNA, 888 bp, synthetic construct; identical to SEQ ID NO: 149549
  misc_feature 1..888: note = Description of Artificial Sequence: Synthetic coding sequence
  source 1..888: mol_type = other DNA

SEQ ID NO: 149555 - DNA, 1683 bp, synthetic construct; identical to SEQ ID NO: 149544
  misc_feature 1..1683: note = Description of Artificial Sequence: Synthetic coding sequence
  source 1..1683: mol_type = other DNA

SEQ ID NO: 149556 - DNA, 888 bp, synthetic construct; identical to SEQ ID NO: 149549
  misc_feature 1..888: note = Description of Artificial Sequence: Synthetic coding sequence
  source 1..888: mol_type = other DNA

SEQ ID NO: 149557 - DNA, 888 bp, synthetic construct; identical to SEQ ID NO: 149549
  misc_feature 1..888: note = Description of Artificial Sequence: Synthetic coding sequence
  source 1..888: mol_type = other DNA

SEQ ID NO: 149558 - DNA, 888 bp, synthetic construct; identical to SEQ ID NO: 149549
  misc_feature 1..888: note = Description of Artificial Sequence: Synthetic coding sequence
  source 1..888: mol_type = other DNA

SEQ ID NO: 149559 - DNA, 888 bp, synthetic construct; identical to SEQ ID NO: 149549
  misc_feature 1..888: note = Description of Artificial Sequence: Synthetic coding sequence
  source 1..888: mol_type = other DNA

SEQ ID NO: 149560 - DNA, 1683 bp, synthetic construct; identical to SEQ ID NO: 149544
  misc_feature 1..1683: note = Description of Artificial Sequence: Synthetic coding sequence
  source 1..1683: mol_type = other DNA

SEQ ID NO: 149561 - DNA, 888 bp, synthetic construct; identical to SEQ ID NO: 149549
  misc_feature 1..888: note = Description of Artificial Sequence: Synthetic coding sequence
  source 1..888: mol_type = other DNA

SEQ ID NO: 149562 - DNA, 2010 bp, synthetic construct
  misc_feature 1..2010: note = Description of Artificial Sequence: Synthetic coding sequence
  source 1..2010: mol_type = other DNA
atggccaccccagctggcctggagcgctgggtgcaggatgagctgcacagcgtgctgggcctgtctgaaagacatgtggcccagttcctgattggaacagcccagcgctgcaccagcgctgaggagtttgtgcagaggctgcgggacacagacaccctggacctgagcggccctgcccgggactttgccctgcggctgtggaacaaggtgcccaggaaggctgtggtggagaagccagcccgggctgctgagcgggaggcccgggccctgctggagaagaacagaagctaccgcctgctggaggacagcgaggagagcagcgaggagaccgtgtcccgggccggcagcagcctgcagaagaagaggaagaagaggaagcacctgaggaagaagcgggaggaggaggaggaggaggaggccagcgagaagggcaagaagaagacaggaggcagcaagcagcagacagagaagccagagagtgaagatgagtgggagaggacagagcgggagcggctgcaggacctggaggagagagatgcctttgctgagcgggtgcggcagagggacaaggacaggaccagaaatgtgctggagaggagtgacaagaaggcctatgaggaggcccagaagaggctgaagatggccgaggaggacaggaaggccatggtgcctgagctgaggaagaagagcagaagagagtacctggccaagcgggagcgggagaagctggaggacctggaggccgagctggctgatgaggagttcctgtttggagatgtggagctgagcagacatgagcggcaggagctgaagtacaagagaagagtgcgggacctggcccgggagtacagagctgctggggagcaggagaagctggaggccaccaaccgctaccacatgcccaaggagacccggggccagcctgcccgggctgtggacctggtggaggaggagagcggggcccctggagaggagcagaggcgctgggaggaggcccggctgggcgccgccagcctgaagtttggagccagagatgctgccagccaggagcccaagtaccagctggtgctggaggaggaggagaccattgaatttgtgcgggccacccagctgcagggagatgaggagcccagcgccccacccaccagcacccaggcccagcagaaggagagcatccaggccgtgcggcgcagcctgcccgtcttccccttccgggaggagctgctggccgccatcgccaaccaccaggtgctgatcatcgagggggagaccggcagcggcaagaccacccagatcccccagtacctgtttgaggagggctacaccaacaagggcatgaagatcgcctgcacccagccccggcgggtggccgccatgtctgtggccgcccgggtggcccgggagatgggcgtgaagctgggcaatgaggtgggctacagcatccgctttgaggactgcaccagcgagaggacagtgctgcgctacatgacagatggcatgctgctgcgggagttcctgtctgagccagacctggccagctacagcgtggtgatggtggatgaggcccacgagaggaccctgcacacagacatcctgtttggcctcatcaaggatgtggcccgcttccggcctgagctgaaggtgctggtggccagcgccaccatggacacagcccgcttcagcaccttctttgatgatgcccctgtgttccgcatccctggaagacgcttccctgtggacatcttctacaccaaggcccctgaggccgactacctggaggcctgtgtggtgtctgtgctgcagatccacgtgacccagcccccaggggacatcctggtgttcctgaccggccaggaggagattgaagctgcctgtgagatgctgcaggaccgctgccggcggctgggcagcaagatccgggagctgctggtgctgcccatctatgccaacctgcccagcgacatgcaggcccgcatcttccagcccaccccacctggggccaggaagtag

SEQ ID NO: 149563 - DNA, 3126 bp, synthetic construct; identical to SEQ ID NO: 149545
  misc_feature 1..3126: note = Description of Artificial Sequence: Synthetic coding sequence
  source 1..3126: mol_type = other DNA

SEQ ID NO: 149564 - DNA, 1683 bp, synthetic construct; identical to SEQ ID NO: 149544
  misc_feature 1..1683: note = Description of Artificial Sequence: Synthetic coding sequence
  source 1..1683: mol_type = other DNA

SEQ ID NO: 149565 - DNA, 1683 bp, synthetic construct; identical to SEQ ID NO: 149544
  misc_feature 1..1683: note = Description of Artificial Sequence: Synthetic coding sequence
  source 1..1683: mol_type = other DNA

SEQ ID NO: 149566 - DNA, 567 bp, synthetic construct
  misc_feature 1..567: note = Description of Artificial Sequence: Synthetic coding sequence
  source 1..567: mol_type = other DNA
atggagagccagcctgcccaggagtgcctgatgcagatgttcctgcccattgaaccagcctgctttgtggagtggctgggcaccagccccagccagctgggcgtggtgatggtggatgaggcccacgagaggaccctgcacacagacatcctgtttggcctcatcaaggatgtggcccgcttccggcctgagctgaaggtgctggtggccagcgccaccatggacacagcccgcttcagcaccttctttgatgatgcccctgtgttccgcatccctggccgccgcttccctgtggacatcttctacaccaaggcccctgaggccgactacctggaggcctgtgtggtgtctgtgctgcagatccacgtgacccagcccccaggggacatcctggtgttcctgaccggccaggaggagattgaggccgcctgtgagatgctgcaggaccgctgccggcggctgggcagcaagatccgggagctgctggtgctgcccatctatgccaacctgcccagcgacatgcaggcccgcatcttccagcccaccccacctggggccaggaagtag

SEQ ID NO: 149567 - DNA, 3126 bp, synthetic construct; identical to SEQ ID NO: 149545
  misc_feature 1..3126: note = Description of Artificial Sequence: Synthetic coding sequence
  source 1..3126: mol_type = other DNA

SEQ ID NO: 149568 - DNA, 444 bp, synthetic construct
  misc_feature 1..444: note = Description of Artificial Sequence: Synthetic coding sequence
  source 1..444: mol_type = other DNA
atggccaccccagctggcctggagcgctgggtgcaggatgagctgcacagcgtgctgggcctgtctgaaagacatgtggcccagttcctgattggaacagcccagcgctgcaccagcgctgaggagtttgtgcagaggctgcgggacacagacaccctggacctgagcggccctgcccgggactttgccctgcggctgtggaacaaggtgcccaggaaggctgtggtggagaagccagcccgggctgctgagcgggaggcccgggccctgctggagaagaacagaagctaccgcctgctggaggacagcgaggagagcagcgaggagaccgtgtcccgggccggcagcagcctgcagaagaagaggaagaagaggaagcacctgaggaagaagcgggaggaggaggaggaggaggaggccagcgagaagggcaagaagaagtag

SEQ ID NO: 149569 - DNA, 4110 bp, synthetic construct
  misc_feature 1..4110: note = Description of Artificial Sequence: Synthetic coding sequence
  source 1..4110: mol_type = other DNA
atgggcggcaagaacaagaagcacaaggccccagctgctgctgtggtgcgggctgctgtgtctgccagccgggccaagtctgctgaggccggcattgctggggaggcccagagcaagaagcctgtgtccaggcctgccacagctgctgctgctgctgctggcagccgggagccccgggtgaagcagggccccaagatctacagcttcaacagcaccaatgacagcagcggccctgccaacctggacaagagcatcctgaaggtggtgatcaacaacaagctggagcagaggatcattggagtcatcaatgagcacaagaagcagaacaatgacaagggcatgatcagcggccgcctgacagccaagaagctgcaggacctgtacatggccctgcaggccttctccttcaagaccaaggacattgaagatgccatgaccaacaccctgctgtatggaggagacctgcacagcgccctggactggctgtgcctgaacctgagtgatgatgccctgcctgagggcttcagccaggagtttgaggagcagcagcccaagagccggcccaagttccagagcccccagatccaggccaccatcagcccccccctgcagcccaagaccaagacctatgaggaggaccccaagagcaagcccaagaaggaggagaagaacatggaggtgaacatgaaggagtggatcctgcgctatgcagagcagcagaatgaggaggagaagaatgaaaacagcaagagcctggaggaggaggagaagtttgaccccaatgaaagatacctgcacctggccgccaagctgctggatgccaaggagcaggccgccaccttcaagctggagaagaacaagcagggccagaaggaggcccaggagaagatcaggaagttccagcgggagatggagaccctggaggaccaccctgtgttcaacccagccatgaagatcagccaccagcagaatgaaaggaagaagccccctgtggccacagaaggagagagcgccctgaacttcaacctgtttgagaagtctgctgctgccacagaggaggagaaggacaagaagaaggagccccatgatgtgaggaactttgactacacagcccgctcctggacaggcaagagccccaagcagttcctgattgactgggtgaggaagaacctgcccaagagccccaaccccagctttgagaaggtgcctgtgggccgctactggaagtgccgggtgcgggtcatcaagtcagaagatgatgtgctggtggtgtgccccaccatcctgacagaagatggcatgcaggcccagcacctgggcgccaccctggccctgtaccgcctggtgaagggccagagcgtgcaccagctgctgccccccacctacagagatgtgtggctggagtggagcgatgctgagaagaagcgggaggagctgaacaagatggagaccaacaagccccgggacctcttcatcgccaagctgctgaacaagctgaagcagcagcagcagcagcagcagcagcacagcgagaacaagagagaaaattctgaggaccctgaggagagctgggagaacctggtgtctgatgaggacttcagcgccctgagcctggagagcgccaacgtggaggacctggagcctgtgaggaacctcttcaggaagctgcagagcacccccaagtaccagaagctgctgaaggagcggcagcagctgcctgtgttcaagcaccgggacagcatcgtggagaccctgaagaggcaccgggtggtggtggtggccggggagactggaagtggcaagagcacccaggtgccccacttcctgctggaggacctgctgctgaatgagtgggaggccagcaagtgcaacatcgtgtgcacccagccccggcgcatctctgctgtgtccctggccaacagagtgtgtgatgagctgggctgtgaaaatggacctgggggcaggaacagcctgtgtggctaccagatccgcatggagagccgggcctgtgagagcacccggctgctgtactgcaccaccggggtgctgctgaggaagctgcaggaggatggcctgctgagcaatgtgagccacgtgattgtggatgaggtgcatgagaggtctgtgcagagcgacttcctgctgatcatcctgaaggagatcctgcagaagagaagtgacctgcacctgatcctgatgtctgccaccgtggacagcgagaagttcagcacctacttcacccactgccccatcctgcgcatcagcggccgcagctaccctgtggaggtgttccacctggaggacatcatcgaggagactggatttgtgctggagaaggacagcgagtactgccagaagttcctggaggaggaggaggaggtgaccatcaacgtgaccagcaaggccggcggcatcaagaagtaccaggagtacatccctgtgcagacaggagcccacgccgacctgaaccccttctaccagaagtacagcagcaggacccagcacgccatcctgtacatgaacccccacaagatcaacctggacctgatcctggagctgctggcctacctggacaagagcccccagttcaggaacatcgagggcgctgtgctgatcttcctgcccggcctggcccacatccagcagctgtatgacctgctgagcaatgaccggcgcttctacagcgagcgctacaaggtgattgccctgcacagcatcctgagcacccaggaccaggccgccgccttcaccctgcccccacctggggtgaggaagatcgtgctggccaccaacattgctgagaccggcatcaccatcccagatgtggtgtttgtgattgacaccggccgcaccaaggagaacaagtaccacgagagcagccagatgagcagcctggtggagacctttgtgtccaaggccagcgccctgcagaggcagggccgggccggccgggtgagagatggcttctgcttcaggatgtacacccgggagagatttgagggcttcatggactacagcgtgcctgagatcctgcgggtgcccctggaggagctgtgcctgcacatcatgaagtgcaacctgggcagccctgaggacttcctgagcaaggccctggaccccccccagctgcaggtgatcagcaatgccatgaacctgctgaggaagatcggggcctgtgagctgaatgagcccaagctgacccccctgggccagcacctggccgccctgcctgtgaatgtgaagattggcaagatgctgatctttggagccatcttcggctgcctggaccctgtggccaccctggccgctgtgatgacagagaagagccccttcaccacccccatcggcaggaaggatgaagctgacctggccaagagcgccctggccatggctgacagcgaccacctgaccatctacaatgcctacctgggctggaagaaggcccggcaggagggcggctacagaagtgagatcacctactgcagaagaaacttcctgaacagaaccagcctgctgaccctggaggatgtgaagcaggagctgatcaagctggtgaaggccgccggcttcagcagcagcaccaccagcacctcctgggagggcaacagagccagccagaccctgtccttccaggagatcgccctgctgaaggctgtgctggtggccggcctgtatgacaacgtgggcaagatcatctacaccaagtctgtggatgtgacagagaagctggcctgcatcgtggagacagcccagggcaaggcccaggtgcaccccagctctgtgaacagagacctgcagacccacggctggctgctgtaccaggagaagatccgctatgcccgggtgtacctgcgggagaccaccctcatcacccccttccctgtgctgctgtttggaggagacatcgaggtgcagcaccgggagcggctgctgagcattgatggctggatctacttccaggcccctgtgaagattgctgtgatcttcaagcagctgcgggtgctgattgacagcgtgctgaggaagaagctggagaaccccaagatgagcctggagaatgacaagatcctgcagatcatcacagagctgatcaagacagagaacaactag

SEQ ID NO: 149570 - DNA, 1989 bp, synthetic construct
  misc_feature 1..1989: note = Description of Artificial Sequence: Synthetic coding sequence
  source 1..1989: mol_type = other DNA
atggaggaggagggcctggagtgccccaacagcagcagcgagaagcgctacttccctgagagcctggacagcagtgatggagatgaggaggaggtgctggcctgtgaggacctggagctgaacccctttgatggcctgccctacagcagccgctactacaagctgctgaaggagcgggaggacctgcccatctggaaggagaagtacagcttcatggagaacctgctgcagaaccagatcgtcatcgtgtctggagatgccaagtgtgggaagagcgcccaggtgccccagtggtgtgccgagtactgcctgagcatccactaccagcacggcggcgtcatctgcacccaggtgcacaagcagacagtggtgcagctggccctgcgggtggctgatgagatggatgtgaacatcggccacgaggtgggctacgtgatcccctttgagaactgctgcaccaatgagaccatcctgcgctactgcacagatgacatgctgcagcgggagatgatgagcaaccccttcctgggcagctatggagtcatcatcctggatgacatccacgagaggagcatcgccacagatgtgctgctgggcctgctgaaggatgtgctgctggcccggcctgagctgaagctgatcatcaacagcagcccccacctgatcagcaagctgaacagctactatggaaatgtgcctgtgattgaggtgaagaacaagcaccctgtggaggtggtgtacctgtctgaggcccagaaggacagctttgagagcatcctgcggctcatctttgagatccaccacagcggggagaagggggacatcgtggtgttcctggcctgtgagcaggtgtacaacccccgcatccgggccaacagcctggtgatgcagcccatcagccagagccaggccgagatcaggaagcagatcctgggcagcagcagcagcggcaagttcttctgcctgtacacagaggagtttgccagcaaggacatgacccccctgaagccagctgagatgcaggaggccaacctgacctccatggtgctcttcatgaagagaattgatattgctggcctgggccactgtgacttcatgaacagacctgcccctgagagcctgatgcaggccctggaggacctggactacctggccgccctggacaatgatggcaacctgtctgaatttggcatcatcatgtctgagttccccctggacccccagctgagcaagagcatcctggccagctgtgaatttgactgtgtggatgaggtgctgaccatcgccgccatggtgacagcccccaactgcttcagccacgtgccccatggagctgaggaggccgccctgacctgctggaagaccttcctgcaccctgagggggaccacttcaccctcatcagcatctacaaggcctaccaggacaccaccctgaacagcagcagcgagtactgtgtggagaagtggtgccgggactacttcctgaactgcagcgccctgaggatggctgatgtgatccgggcagagctgctggagatcatcaagagaattgagctgccctatgcagagcccgccttcggcagcaaggagaacaccctgaacatcaagaaggccctgctgagcggctacttcatgcagatcgccagagatgtggatggcagcggcaactacctgatgctgacccacaagcaggtggcccagctgcaccccctgagcggctacagcatcaccaagaagatgcctgagtgggtgctcttccacaagttcagcatcagcgagaacaactacatccgcatcaccagcgagatcagccctgagctgttcatgcagctggtgccccagtactacttcagcaacctgcccccatctgagagcaaggacatcctgcagcaggtggtggaccacctgagccctgtgtccaccatgaacaaggagcagcagatgtgtgagacctgcccagagacagagcagcgctgcaccctgcagtag

SEQ ID NO: 149571 - DNA, 2232 bp, synthetic construct
  misc_feature 1..2232: note = Description of Artificial Sequence: Synthetic coding sequence
  source 1..2232: mol_type = other DNA
atggaggaggagggcctggagtgccccaacagcagcagcgagaagcgctacttccctgagagcctggacagcagtgatggagatgaggaggaggtgctggcctgtgaggacctggagctgaacccctttgatggcctgccctacagcagccgctactacaagctgctgaaggagcgggaggacctgcccatctggaaggagaagtacagcttcatggagaacctgctgcagaaccagatcgtcatcgtgtctggagatgccaagtgtgggaagagcgcccaggtgccccagtggtgtgccgagtactgcctgagcatccactaccagcacggcggcgtcatctgcacccaggtgcacaagcagacagtggtgcagctggccctgcgggtggctgatgagatggatgtgaacatcggccacgaggtgggctacgtgatcccctttgagaactgctgcaccaatgagaccatcctgcgctactgcacagatgacatgctgcagcgggagatgatgagcaaccccttcctgggcagctatggagtcatcatcctggatgacatccacgagaggagcatcgccacagatgtgctgctgggcctgctgaaggatgtgctgctggcccggcctgagctgaagctgatcatcaacagcagcccccacctgatcagcaagctgaacagctactatggaaatgtgcctgtgattgaggtgaagaacaagcaccctgtggaggtggtgtacctgtctgaggcccagaaggacagctttgagagcatcctgcggctcatctttgagatccaccacagcggggagaagggggacatcgtggtgttcctggcctgtgagcaggacatcgagaaggtgtgtgaaacagtgtaccagggcagcaacctgaacccagacctgggggagctggtggtggtgcccctgtaccccaaggagaagtgcagcctcttcaagcccctggatgaaacagagaagcgctgccaggtgtaccagaggagagtggtgctgaccaccagcagcggggagttcctgatctggagcaacagcgtgcgctttgtgattgatgtgggcgtggagaggaggaaggtgtacaacccccgcatccgggccaacagcctggtgatgcagcccatcagccagagccaggccgagatcaggaagcagatcctgggcagcagcagcagcggcaagttcttctgcctgtacacagaggagtttgccagcaaggacatgacccccctgaagccagctgagatgcaggaggccaacctgacctccatggtgctcttcatgaagagaattgatattgctggcctgggccactgtgacttcatgaacagacctgcccctgagagcctgatgcaggccctggaggacctggactacctggccgccctggacaatgatggcaacctgtctgaatttggcatcatcatgtctgagttccccctggacccccagctgagcaagagcatcctggccagctgtgaatttgactgtgtggatgaggtgctgaccatcgccgccatggtgacagcccccaactgcttcagccacgtgccccacggggctgaggaggccgccctgacctgctggaagaccttcctgcaccctgagggggaccacttcaccctcatcagcatctacaaggcctaccaggacaccaccctgaacagcagcagcgagtactgtgtggagaagtggtgccgggactacttcctgaactgcagcgccctgaggatggctgatgtgatccgggcagagctgctggagatcatcaagagaattgagctgccctatgcagagcccgccttcggcagcaaagaaaacaccctgaacatcaagaaggccctgctgagcggctacttcatgcagatcgccagagatgtggatggcagcggcaactacctgatgctgacccacaagcaggtggcccagctgcaccccctgagcggctacagcatcaccaagaagatgcctgagtgggtgctcttccacaagttcagcatcagcgagaacaactacatccgcatcaccagcgagatcagccctgagctgttcatgcagctggtgccccagtactacttcagcaacctgccccccagcgagagcaaggacatcctgcagcaggtggtggaccacctgagccctgtgtccaccatgaacaaggagcagcagatgtgtgagacctgcccagagacagagcagcgctgcaccctgcagtag

SEQ ID NO: 149572 - DNA, 1104 bp, synthetic construct
  misc_feature 1..1104: note = Description of Artificial Sequence: Synthetic coding sequence
  source 1..1104: mol_type = other DNA
atgcagcccatcagccagagccaggccgagatcaggaagcagatcctgggcagcagcagcagcggcaagttcttctgcctgtacacagaggagtttgccagcaaggacatgacccccctgaagccagctgagatgcaggaggccaacctgacctccatggtgctcttcatgaagagaattgatattgctggcctgggccactgtgacttcatgaacagacctgcccctgagagcctgatgcaggccctggaggacctggactacctggccgccctggacaatgatggcaacctgtctgaatttggcatcatcatgtctgagttccccctggacccccagctgagcaagagcatcctggccagctgtgaatttgactgtgtggatgaggtgctgaccatcgccgccatggtgacagcccccaactgcttcagccacgtgccccacggggctgaggaggccgccctgacctgctggaagaccttcctgcaccctgagggggaccacttcaccctcatcagcatctacaaggcctaccaggacaccaccctgaacagcagcagcgagtactgtgtggagaagtggtgccgggactacttcctgaactgcagcgccctgaggatggctgatgtgatccgggcagagctgctggagatcatcaagagaattgagctgccctatgcagagcccgccttcggcagcaaagaaaacaccctgaacatcaagaaggccctgctgagcggctacttcatgcagatcgccagagatgtggatggcagcggcaactacctgatgctgacccacaagcaggtggcccagctgcaccccctgagcggctacagcatcaccaagaagatgcctgagtgggtgctcttccacaagttcagcatcagcgagaacaactacatccgcatcaccagcgagatcagccctgagctgttcatgcagctggtgccccagtactacttcagcaacctgccccccagcgagagcaaggacatcctgcagcaggtggtggaccacctgagccctgtgtccaccatgaacaaggagcagcagatgtgtgagacctgcccagagacagagcagcgctgcaccctgcagtag

SEQ ID NO: 149573 - DNA, 339 bp, synthetic construct
  misc_feature 1..339: note = Description of Artificial Sequence: Synthetic coding sequence
  source 1..339: mol_type = other DNA
atggaggaggagggcctggagtgccccaacagcagcagcgagaagcgctacttccctgagagcctggacagcagtgatggagatgaggaggaggtgctggcctgtgaggacctggagctgaacccctttgatggcctgccctacagcagccgctactacaagctgctgaaggagcgggaggacctgcccatctggaaggagaagtacagcttcatggagaacctgctgcagaaccagatcgtcatcgtgtctggagatgccaagtgtgggaagagcgcccaggtgccccagtggtgtgccgagtactgcctgagcatccactaccagcacggcggctag

SEQ ID NO: 149574 - DNA, 1935 bp, synthetic construct
  misc_feature 1..1935: note = Description of Artificial Sequence: Synthetic coding sequence
  source 1..1935: mol_type = other DNA
atgaccattgaaattgacttcctgcagaagaagagcattgacagcaacccctatgacacagacaagatggctgctgagttcatccagcagttcaacaaccaggccttctctgtgggccagcagctggtgttctccttcaatgagaagctgtttggcctgctggtgaaggacatcgaggccatggaccccagcatcctgaagggggagcccgccaccgggaagaggcagaagattgaggtgggcctggtggtgggcaacagccaggtggcctttgagaaggccgagaacagcagcctgaacctgattggcaaggccaagaccaaggaaaatcggcagagcatcatcaacccagactggaactttgagaagatgggcatcggcggcctggacaaggagttcagtgacatcttccggcgggcctttgccagcagggtcttccccccagagatcgtggagcagatgggctgcaagcacgtgaagggcatcctgctgtatggccccccaggctgtgggaagaccctgctggcccggcagatcggcaagatgctgaatgcccgggagcccaaggtggtgaatggacctgagatcctgaacaagtatgtgggggagagcgaggccaacatcaggaagctgtttgctgatgctgaggaggagcagaggcggctgggcgccaacagcggcctgcacatcatcatctttgatgaaattgatgccatctgcaagcagaggggctccatggccggcagcactggagtgcatgacacagtggtgaaccagctgctgagcaagattgatggagtggagcagctgaacaacatcctggtgattggcatgaccaacagaccagacctgattgatgaggccctgctgcggcccggccgcctggaggtgaagatggagatcggcctgcctgatgagaagggccgcctgcagatcctgcacatccacacagccaggatgaggggccaccagctgctgtctgcagatgtggacatcaaggagctggccgtggagaccaagaacttctctggagctgagctggagggcctggtgcgggccgcccagagcacagccatgaacagacacatcaaggccagcaccaaggtggaggtggacatggagaaggccgagagcctgcaggtgaccaggggggacttcctggccagcctggagaatgacatcaagccagccttcggcaccaaccaggaggactatgccagctacatcatgaatggcatcatcaagtggggagaccctgtgaccagggtgctggatgatggagagctgctggtgcagcagaccaagaacagcgacaggacccccctggtgtctgtgctgctggagggccccccccacagcggcaagacagccctggccgccaagattgctgaggagagcaacttccccttcatcaagatctgcagcccagacaagatgattggcttcagcgagacagccaagtgccaggccatgaagaagatctttgatgatgcctacaagagccagctgagctgtgtggtggtggatgacatcgagcggctgctggactatgtgcccatcggcccccgcttcagcaacctggtgctgcaggccctgctggtgctgctgaagaaggccccaccccagggcaggaagctgctgatcatcggcaccaccagcaggaaggatgtgctgcaggagatggagatgctgaatgccttcagcaccaccatccacgtgcccaacatcgccaccggggagcagctgctggaggccctggagctgctgggcaacttcaaggacaaggagaggaccaccatcgcccagcaggtgaagggcaagaaggtgtggattggcatcaagaagctgctgatgctgattgagatgagcctgcagatggaccctgagtacagagtgaggaagttcctggccctgctgcgggaggagggcgcctag

SEQ ID NO: 149575 - DNA, 1452 bp, synthetic construct
  misc_feature 1..1452: note = Description of Artificial Sequence: Synthetic coding sequence
  source 1..1452: mol_type = other DNA
atgcctgaggaggccggcttccccccagccaagcgcttccggcccggcagcggcccccccagcagagctggcagcttccccccaggccggcaggtggtgatgctgctgacagctggcagcggcggccggggcggcggcggcggccggcggcagcagccccccctggcccagcccagcgccagcccctacccagaggccgtggagctgcagaggaggagcctgcccatcttccaggcccggggccagctgctggcccagctgaggaacctggacaatgctgtgctgattggcagccccttcttcaccggccaccctggggtgccccactgggccggcggggacaggagccatgagcaggatgtgcccaggcactgcaaggccccaccccggcggctgccctgtgatgctggccccagctctgtgcggctgcctgccctgtgcacagctgcccccagcctgccccggggccccaaggacagcggcctggaggtgctggccgtgcagagggtgtccaagacccaggcctggcagaggacaggccgggccggcagagaagattctggcatctgctaccgcctgtacacagaagatgaatttgagaagtttgacaagatgacagtgcctgagatccagcgctgcaacctggcctctgtgatgctgcagctgctggccatgaaggtgcccaacgtgctgacctttgacttcatgagcaagcccagcccagaccacatccaggccgccatcgcccagctggacctgctgggcgccctggagcacaaggatgaccagctgaccctgacccccatgggcaggaagatggccgccttccccctggagcccaagtttgccaagaccatcctgatgagccccaagttccactgcacagaggagatcctgaccatcgtgtccctgctgtctgtggacagcgtgctgcacaacccccccagcagaagagaggaggtgcagggcgtgaggaagaagttcatcagcagcgagggggaccacatgaccctgctgaacatctaccgcaccttcaagaacctgggcggcaacaaggactggtgcaaggaaaattttgtgaacagcaagaacatgaccctggtggccgaggtgcgggcccagctgcgggacatctgcctgaagatgtccatgcccatcgccagcagcagaggagatgtggagagcgtgcggcgctgcctggcccacagcctcttcatgagcacagctgagctgcagccagatggcacctacgccaccacagacacccaccagcctgtggccatccaccccagctctgtgctcttccactgcaagccagcctgtgtggtgtacacagagctgctgtacaccaacaagtgctacatgagggacctgtgtgtgattgatgcccagtggctgtatgaagctgcccctgagtacttccggaggaagctgaggacagccaggaactag

SEQ ID NO: 149576 - DNA, 2940 bp, synthetic construct
  misc_feature 1..2940: note = Description of Artificial Sequence: Synthetic coding sequence
  source 1..2940: mol_type = other DNA
atgtcctatgactaccaccagaactggggcagagatggcggccccaggagcagcggcggcggctacggcggcggccctgctgggggccacggcggcaacagaggcagcggcggcggcggcggcggcggcggcggcggccggggcggccggggccgccaccctggccacctgaagggccgggagatcggcatgtggtacgccaagaagcagggccagaagaacaaggaggccgagcggcaggagagagctgtggtgcacatggatgagcggcgggaggagcagatcgtgcagctgctgaacagcgtgcaggccaagaatgacaaggagagcgaggcccagatctcctggtttgcccctgaggaccacggctacggcacagaggtgtccaccaagaacaccccctgcagcgagaacaagctggacatccaggagaagaagctgatcaaccaggagaagaagatgttccgcatccggaacagaagctacatcgaccgggacagcgagtacctgctgcaggagaatgaaccagatggcaccctggaccagaagctgctggaggacctgcagaagaagaagaatgacctgcgctacatcgagatgcagcacttccgggagaagctgcccagctatggcatgcagaaggagctggtgaacctgattgacaaccaccaggtgaccgtcatctctggagagaccggctgtgggaagaccacccaggtgacccagttcatcctggacaactacatcgagcggggcaaaggaagtgcctgcagaattgtgtgcacccagccccggcgcatcagcgccatctctgtggccgagcgggtggccgctgagagagctgagagctgtggcagcggcaacagcacaggctaccagatccggctgcagagccggctgcccaggaagcagggcagcatcctgtactgcaccaccggcatcatcctgcagtggctgcagagcgacccctacctgagctctgtgagccacatcgtgctggatgagatccatgaaagaaacctgcagagtgatgtgctgatgacagtggtgaaggacctgctgaacttcagaagtgacctgaaggtgatcctgatgtctgccaccctgaatgctgagaagttcagcgagtacttcggcaactgccccatgatccacatccctggcttcaccttccctgtggtggagtacctgctggaggatgtgattgagaagatccgctacgtgcctgagcagaaggagcacaggagccagttcaagaggggcttcatgcagggccacgtgaaccggcaggagaaggaggagaaggaggccatctacaaggagcgctggccagactatgtgcgggagctgcggcggcgctacagcgccagcacagtggatgtgattgagatgatggaggatgacaaggtggacctgaacctgattgtggccctgatccgctacatcgtgctggaggaggaggatggagccatcctggtgttcctgcccggctgggacaacatcagcaccctgcatgacctgctgatgagccaggtgatgttcaagagtgacaagttcctgatcatccccctgcacagcctgatgcccaccgtgaaccagacccaggtgttcaagaggaccccacctggggtgaggaagatcgtgattgccaccaacattgctgagaccagcatcaccattgatgatgtggtgtatgtgattgatggcggcaagatcaaggagacccactttgacacccagaacaacatcagcaccatgtctgctgagtgggtgtccaaggccaatgccaagcagaggaagggccgggccggccgggtgcagcccggccactgctaccacctgtacaacggcctgcgggccagcctgctggatgactaccagctgcctgagatcctgcggacccccctggaggagctgtgcctgcagatcaagatcctgcggctgggcggcatcgcctacttcctgagccggctgatggacccccccagcaatgaggccgtgctgctgagcatccgccacctgatggagctgaatgccctggacaagcaggaggagctgacccccctgggcgtgcacctggcccggctgcctgtggagccccacatcggcaagatgatcctgtttggagccctcttctgctgcctggaccctgtgctgaccatcgccgccagcctgtccttcaaggacccctttgtgatccccctgggctgggaggaggcccggcggcggggcttccgctatgagaaggactactgctgggagtacttcctgagcagcaacaccctgcagatgctgcacaacatgaagggccagtttgctgagcacctgctgggcgccggctttgtgagcagcaggaaccccaaggaccctgagagcaacatcaacagcgacaatgagaagatcatcaaggccgtcatctgtgccggcctgtaccccaaggtggccaagatccggctgaacctgggcaagaagaggaagatggtgaaggtgtacaccaagacagatggcctggtggccgtgcaccccaagtctgtgaatgtggagcagacagacttccactacaactggctgatctaccacctgaagatgaggaccagcagcatctacctgtatgactgcacagaggtgagcccctactgcctgctcttcttcggcggggacatcagcatccagaaggacaatgaccaggagaccatcgctgtggatgagtggatcgtgttccagagccctgccagaattgcccacctggtgaaggagctgaggaaggagctggacatcctgctgcaggagaagattgagagcccccaccctgtggactggaatgacaccaagagccgggactgtgctgtgctgagcgccatcatcgacctgatcaagacccaggagaaggccaccccaagaaacttccccccacgcttccaggacggctactacagctag

SEQ ID NO: 149577 - DNA, 2985 bp, synthetic construct
  misc_feature 1..2985: note = Description of Artificial Sequence: Synthetic coding sequence
  source 1..2985: mol_type = other DNA
atgtcctatgactaccaccagaactggggcagagatggcggccccaggagcagcggcggcggctacggcggcggccctgctgggggccacggcggcaacagaggcagcggcggcggcggcggcggcggcggcggcggccggggcggccggggccgccaccctggccacctgaagggccgggagatcggcatgtggtacgccaagaagcagggccagaagaacaaggaggccgagcggcaggagagagctgtggtgcacatggatgagcggcgggaggagcagatcgtgcagctgctgaacagcgtgcaggccaagaatgacaaggagagcgaggcccagatctcctggtttgcccctgaggaccacggctacggcacagaggtgtccaccaagaacaccccctgcagcgagaacaagctggacatccaggagaagaagctgatcaaccaggagaagaagatgttccgcatccggaacagaagctacatcgaccgggacagcgagtacctgctgcaggagaatgaaccagatggcaccctggaccagaagctgctggaggacctgcagaagaagaagaatgacctgcgctacatcgagatgcagcacttccgggagaagctgcccagctatggcatgcagaaggagctggtgaacctgattgacaaccaccaggtgaccgtcatctctggagagaccggctgtgggaagaccacccaggtgacccagttcatcctggacaactacatcgagcggggcaaaggaagtgcctgcagaattgtgtgcacccagccccggcgcatcagcgccatctctgtggccgagcgggtggccgctgagagagctgagagctgtggcagcggcaacagcacaggctaccagatccggctgcagagccggctgcccaggaagcagggcagcatcctgtactgcaccaccggcatcatcctgcagtggctgcagagcgacccctacctgagctctgtgagccacatcgtgctggatgagatccatgaaagaaacctgcagagtgatgtgctgatgacagtggtgaaggacctgctgaacttcagaagtgacctgaaggtgatcctgatgtctgccaccctgaatgctgagaagttcagcgagtacttcggcaactgccccatgatccacatccctggcttcaccttccctgtggtggagtacctgctggaggatgtgattgagaagatccgctacgtgcctgagcagaaggagcacaggagccagttcaagaggggcttcatgcagggccacgtgaaccggcaggagaaggaggagaaggaggccatctacaaggagcgctggccagactatgtgcgggagctgcggcggcgctacagcgccagcacagtggatgtgattgagatgatggaggatgacaaggtggacctgaacctgattgtggccctgatccgctacatcgtgctggaggaggaggatggagccatcctggtgttcctgcccggctgggacaacatcagcaccctgcatgacctgctgatgagccaggtgatgttcaagtctgtgaaccagacccaggtgttcaagaggaccccacctggggtgaggaagatcgtgattgccaccaacattgctgagaccagcatcaccattgatgatgtggtgtatgtgattgatggcggcaagatcaaggagacccactttgacacccagaacaacatcagcaccatgtctgctgagtgggtgtccaaggccaatgccaagcagaggaagggccgggccggccgggtgcagcccggccactgctaccacctgtacaacggcctgcgggccagcctgctggatgactaccagctgcctgagatcctgcggacccccctggaggagctgtgcctgcagatcaagatcctgcggctgggcggcatcgcctacttcctgagccggctgatggacccccccagcaatgaggccgtgctgctgagcatccgccacctgatggagctgaatgccctggacaagcaggaggagctgacccccctgggcgtgcacctggcccggctgcctgtggagccccacatcggcaagatgatcctgtttggagccctcttctgctgcctggaccctgtgctgaccatcgccgccagcctgtccttcaaggacccctttgtgatccccctgggcaaggagaagattgctgatgcccggaggaaggagctggccaaggacaccaggagtgaccacctgactgtggtgaatgcctttgagggctgggaggaggccaggagaagaggcttccgctatgagaaggactactgctgggagtacttcctgagcagcaacaccctgcagatgctgcacaacatgaagggccagtttgctgagcacctgctgggcgccggctttgtgagcagcaggaaccccaaggaccctgagagcaacatcaacagcgacaatgagaagatcatcaaggctgtgatctgtgccggcctgtaccccaaggtggccaagatccggctgaacctgggcaagaagaggaagatggtgaaggtgtacaccaagacagatggcctggtggccgtgcaccccaagtctgtgaatgtggagcagacagacttccactacaactggctgatctaccacctgaagatgaggaccagcagcatctacctgtatgactgcacagaggtgagcccctactgcctgctcttctttggaggagacatcagcatccagaaggacaatgaccaggagaccatcgctgtggatgagtggatcgtgttccagagccctgcccgcatcgcccacctggtgaaggagctgaggaaggagctggacatcctgctgcaggagaagattgagagcccccaccctgtggactggaatgacaccaagagccgggactgtgctgtgctgagcgccatcatcgacctgatcaagacccaggagaaggccacccccaggaacttccccccacgcttccaggacggctactacagctag

SEQ ID NO: 149578 - DNA, 3027 bp, synthetic construct
  misc_feature 1..3027: note = Description of Artificial Sequence: Synthetic coding sequence
  source 1..3027: mol_type = other DNA
atgtcctatgactaccaccagaactggggcagagatggcggccccaggagcagcggcggcggctacggcggcggccctgctgggggccacggcggcaacagaggcagcggcggcggcggcggcggcggcggcggcggccggggcggccggggccgccaccctggccacctgaagggccgggagatcggcatgtggtacgccaagaagcagggccagaagaacaaggaggccgagcggcaggagagagctgtggtgcacatggatgagcggcgggaggagcagatcgtgcagctgctgaacagcgtgcaggccaagaatgacaaggagagcgaggcccagatctcctggtttgcccctgaggaccacggctacggcacagaggtgtccaccaagaacaccccctgcagcgagaacaagctggacatccaggagaagaagctgatcaaccaggagaagaagatgttccgcatccggaacagaagctacatcgaccgggacagcgagtacctgctgcaggagaatgaaccagatggcaccctggaccagaagctgctggaggacctgcagaagaagaagaatgacctgcgctacatcgagatgcagcacttccgggagaagctgcccagctatggcatgcagaaggagctggtgaacctgattgacaaccaccaggtgaccgtcatctctggagagaccggctgtgggaagaccacccaggtgacccagttcatcctggacaactacatcgagcggggcaaaggaagtgcctgcagaattgtgtgcacccagccccggcgcatcagcgccatctctgtggccgagcgggtggccgctgagagagctgagagctgtggcagcggcaacagcacaggctaccagatccggctgcagagccggctgcccaggaagcagggcagcatcctgtactgcaccaccggcatcatcctgcagtggctgcagagcgacccctacctgagctctgtgagccacatcgtgctggatgagatccatgaaagaaacctgcagagtgatgtgctgatgacagtggtgaaggacctgctgaacttcagaagtgacctgaaggtgatcctgatgtctgccaccctgaatgctgagaagttcagcgagtacttcggcaactgccccatgatccacatccctggcttcaccttccctgtggtggagtacctgctggaggatgtgattgagaagatccgctacgtgcctgagcagaaggagcacaggagccagttcaagaggggcttcatgcagggccacgtgaaccggcaggagaaggaggagaaggaggccatctacaaggagcgctggccagactatgtgcgggagctgcggcggcgctacagcgccagcacagtggatgtgattgagatgatggaggatgacaaggtggacctgaacctgattgtggccctgatccgctacatcgtgctggaggaggaggatggagccatcctggtgttcctgcccggctgggacaacatcagcaccctgcatgacctgctgatgagccaggtgatgttcaagagtgacaagttcctgatcatccccctgcacagcctgatgcccaccgtgaaccagacccaggtgttcaagaggaccccacctggggtgaggaagatcgtgattgccaccaacattgctgagaccagcatcaccattgatgatgtggtgtatgtgattgatggcggcaagatcaaggagacccactttgacacccagaacaacatcagcaccatgtctgctgagtgggtgtccaaggccaatgccaagcagaggaagggccgggccggccgggtgcagcccggccactgctaccacctgtacaacggcctgcgggccagcctgctggatgactaccagctgcctgagatcctgcggacccccctggaggagctgtgcctgcagatcaagatcctgcggctgggcggcatcgcctacttcctgagccggctgatggacccccccagcaatgaggccgtgctgctgagcatccgccacctgatggagctgaatgccctggacaagcaggaggagctgacccccctgggcgtgcacctggcccggctgcctgtggagccccacatcggcaagatgatcctgtttggagccctcttctgctgcctggaccctgtgctgaccatcgccgccagcctgtccttcaaggacccctttgtgatccccctgggcaaggagaagattgctgatgcccggaggaaggagctggccaaggacaccaggagtgaccacctgactgtggtgaatgcctttgagggctgggaggaggccaggagaagaggcttccgctatgagaaggactactgctgggagtacttcctgagcagcaacaccctgcagatgctgcacaacatgaagggccagtttgctgagcacctgctgggcgccggctttgtgagcagcaggaaccccaaggaccctgagagcaacatcaacagcgacaatgagaagatcatcaaggctgtgatctgtgccggcctgtaccccaaggtggccaagatccggctgaacctgggcaagaagaggaagatggtgaaggtgtacaccaagacagatggcctggtggccgtgcaccccaagtctgtgaatgtggagcagacagacttccactacaactggctgatctaccacctgaagatgaggaccagcagcatctacctgtatgactgcacagaggtgagcccctactgcctgctcttctttggaggagacatcagcatccagaaggacaatgaccaggagaccatcgctgtggatgagtggatcgtgttccagagccctgcccgcatcgcccacctggtgaaggagctgaggaaggagctggacatcctgctgcaggagaagattgagagcccccaccctgtggactggaatgacaccaagagccgggactgtgctgtgctgagcgccatcatcgacctgatcaagacccaggagaaggccacccccaggaacttccccccacgcttccaggacggctactacagctag

SEQ ID NO: 149579 - DNA, 2985 bp, synthetic construct
  misc_feature 1..2985: note = Description of Artificial Sequence: Synthetic coding sequence
  source 1..2985: mol_type = other DNA
atgtcctatgactaccaccagaactggggcagagatggcggccccaggagcagcggcggcggctacggcggcggccctgctgggggccacggcggcaacagaggcagcggcggcggcggcggcggcggcggcggcggccggggcggccggggccgccaccctggccacctgaagggccgggagatcggcatgtggtacgccaagaagcagggccagaagaacaaggaggccgagcggcaggagagagctgtggtgcacatggatgagcggcgggaggagcagatcgtgcagctgctgaacagcgtgcaggccaagaatgacaaggagagcgaggcccagatctcctggtttgcccctgaggaccacggctacggcacagaggtgtccaccaagaacaccccctgcagcgagaacaagctggacatccaggagaagaagctgatcaaccaggagaagaagatgttccgcatccggaacagaagctacatcgaccgggacagcgagtacctgctgcaggagaatgaaccagatggcaccctggaccagaagctgctggaggacctgcagaagaagaagaatgacctgcgctacatcgagatgcagcacttccgggagaagctgcccagctatggcatgcagaaggagctggtgaacctgattgacaaccaccaggtgaccgtcatctctggagagaccggctgtgggaagaccacccaggtgacccagttcatcctggacaactacatcgagcggggcaaaggaagtgcctgcagaattgtgtgcacccagccccggcgcatcagcgccatctctgtggccgagcgggtggccgctgagagagctgagagctgtggcagcggcaacagcacaggctaccagatccggctgcagagccggctgcccaggaagcagggcagcatcctgtactgcaccaccggcatcatcctgcagtggctgcagagcgacccctacctgagctctgtgagccacatcgtgctggatgagatccatgaaagaaacctgcagagtgatgtgctgatgacagtggtgaaggacctgctgaacttcagaagtgacctgaaggtgatcctgatgtctgccaccctgaatgctgagaagttcagcgagtacttcggcaactgccccatgatccacatccctggcttcaccttccctgtggtggagtacctgctggaggatgtgattgagaagatccgctacgtgcctgagcagaaggagcacaggagccagttcaagaggggcttcatgcagggccacgtgaaccggcaggagaaggaggagaaggaggccatctacaaggagcgctggccagactatgtgcgggagctgcggcggcgctacagcgccagcacagtggatgtgattgagatgatggaggatgacaaggtggacctgaacctgattgtggccctgatccgctacatcgtgctggaggaggaggatggagccatcctggtgttcctgcccggctgggacaacatcagcaccctgcatgacctgctgatgagccaggtgatgttcaagagcggcaccatgagccaggtgttcaagaggaccccacctggggtgaggaagatcgtgattgccaccaacattgctgagaccagcatcaccattgatgatgtggtgtatgtgattgatggcggcaagatcaaggagacccactttgacacccagaacaacatcagcaccatgtctgctgagtgggtgtccaaggccaatgccaagcagaggaagggccgggccggccgggtgcagcccggccactgctaccacctgtacaacggcctgcgggccagcctgctggatgactaccagctgcctgagatcctgcggacccccctggaggagctgtgcctgcagatcaagatcctgcggctgggcggcatcgcctacttcctgagccggctgatggacccccccagcaatgaggccgtgctgctgagcatccgccacctgatggagctgaatgccctggacaagcaggaggagctgacccccctgggcgtgcacctggcccggctgcctgtggagccccacatcggcaagatgatcctgtttggagccctcttctgctgcctggaccctgtgctgaccatcgccgccagcctgtccttcaaggacccctttgtgatccccctgggcaaggagaagattgctgatgcccggaggaaggagctggccaaggacaccaggagtgaccacctgactgtggtgaatgcctttgagggctgggaggaggccaggagaagaggcttccgctatgagaaggactactgctgggagtacttcctgagcagcaacaccctgcagatgctgcacaacatgaagggccagtttgctgagcacctgctgggcgccggctttgtgagcagcaggaaccccaaggaccctgagagcaacatcaacagcgacaatgagaagatcatcaaggctgtgatctgtgccggcctgtaccccaaggtggccaagatccggctgaacctgggcaagaagaggaagatggtgaaggtgtacaccaagacagatggcctggtggccgtgcaccccaagtctgtgaatgtggagcagacagacttccactacaactggctgatctaccacctgaagatgaggaccagcagcatctacctgtatgactgcacagaggtgagcccctactgcctgctcttctttggaggagacatcagcatccagaaggacaatgaccaggagaccatcgctgtggatgagtggatcgtgttccagagccctgcccgcatcgcccacctggtgaaggagctgaggaaggagctggacatcctgctgcaggagaagattgagagcccccaccctgtggactggaatgacaccaagagccgggactgtgctgtgctgagcgccatcatcgacctgatcaagacccaggagaaggccacccccaggaacttccccccacgcttccaggacggctactacagctag

SEQ ID NO: 149580 - DNA, 3684 bp, synthetic construct
  misc_feature 1..3684: note = Description of Artificial Sequence: Synthetic coding sequence
  source 1..3684: mol_type = other DNA
atgggagacaccagtgaagatgccagcatccaccggctggagggcacagacctggactgccaggtgggcggcctcatctgcaagagcaagtctgctgccagcgagcagcacgtgttcaaggccccagccccccggcccagcctgctgggcctggacctgctggccagcctgaagagaagagagcgggaggagaaggatgatggagaggacaagaagaagagcaaggtgagcagctacaaggactgggaggagagcaaggatgaccagaaggatgctgaggaggagggcggggaccaggccggccagaacatcaggaaggacagacactaccgcagcgcccgggtggagacccccagccaccctggaggagtgtctgaggagttctgggagaggagccggcagcgggagcgggagcggcgggagcacggcgtgtatgccagcagcaaggaggagaaggactggaagaaggagaagagccgggaccgggactatgacaggaagagggacagagatgagcgggacaggagccgccacagcagccgctcagaaagagatggcggcagcgagaggagcagcagaagaaatgaacctgagagccccaggcaccggcccaaggatgctgccacccccagccgcagcacctgggaggaggaggacagcggctacggcagcagccgccgcagccagtgggagagccccagccccacccccagctacagagacagcgagaggagccaccggctgagcacccgggaccgggacagatctgtgcggggcaagtacagtgatgacacccccctgcccacccccagctacaagtacaatgagtgggcagatgacagaagacacctgggcagcaccccccggctgagccggggccggggccggcgggaggagggggaggagggcatcagctttgacacagaggaggagcggcagcagtgggaggatgaccagaggcaggccgaccgggactggtacatgatggatgagggctatgatgagttccacaaccccctggcctacagcagtgaagattatgtgagaagaagagagcagcacctgcacaagcagaagcagaagaggatcagcgcccagaggcggcagatcaatgaagataatgaacgctgggagaccaacaggatgctgaccagcggcgtggtgcaccggctggaggtggatgaagattttgaagaagataatgctgccaaggtgcacctgatggtgcacaacctggtgccccccttcctggatggaagaattgtgttcaccaagcagcctgagcctgtgattcctgtgaaggatgccaccagtgacctggccatcatcgccaggaagggcagccagacagtgaggaagcaccgggagcagaaggagaggaagaaggcccagcacaagcactgggagctggccggcaccaagctgggggacatcatgggcgtgaagaaggaggaggagccagacaaggctgtgacagaagatggcaaggtggactacagaacagagcagaagtttgctgaccacatgaagaggaagtctgaggccagcagcgagtttgccaagaagaagagcatcctggagcagaggcagtacctgcccatctttgctgtgcagcaggagctgctgaccatcatccgggacaacagcatcgtcatcgtggtgggggagactggaagtggcaagaccacccagctgacccagtacctgcatgaagatggctacacagattatggcatgattggctgcacccagccccggcgggtggccgccatgtctgtggccaagagggtgtctgaggagatgggcggcaacctgggggaggaggtgggctacgccatccgctttgaggactgcaccagcgagaacaccctcatcaagtacatgacagatggcatcctgctgcgggagagcctgcgggaggccgacctggaccactacagcgccatcatcatggatgaggcccacgagaggagcctgaacacagatgtgctgtttggcctgctgcgggaggtggtggcccggcggagtgacctgaagctgattgtgaccagcgccaccatggatgctgagaagtttgctgccttctttggaaatgtgcccatcttccacatccctggccgcaccttccctgtggacatcctcttcagcaagaccccccaggaggactatgtggaggccgctgtgaagcagagcctgcaggtgcacctgagcggggcccctggggacatcctgatcttcatgcctggccaggaggacatcgaggtgaccagtgaccagatcgtggagcacctggaggagctggagaatgccccagccctggccgtgctgcccatctacagccagctgcccagcgacctgcaggccaagatcttccagaaggccccagatggagtgaggaagtgcatcgtggccaccaacattgctgagaccagcctgactgtggatggcatcatgtttgtgattgattctggctactgcaagctgaaggtgttcaaccccagaattggcatggatgccctgcagatctaccccatcagccaggccaatgccaaccagaggagcggccgggccggccgcacaggccctggccagtgcttccggctgtacacccagagcgcctacaagaatgagctgctgaccaccaccgtgcctgagatccagaggaccaacctggccaacgtggtgctgctgctgaagagcctgggcgtgcaggacctgctgcagttccacttcatggaccccccacctgaggacaacatgctgaacagcatgtaccagctgtggatcctgggcgccctggacaacacaggaggcctgaccagcacaggccgcctgatggtggagttccccctggaccctgccctgagcaagatgctgattgtgtcctgtgacatgggctgcagcagcgagatcctgctgattgtgtccatgctgtctgtgcctgccatcttctaccggcccaagggccgggaggaggagagtgaccagatccgggagaagtttgctgtgcctgagagtgaccacctgacctacctgaatgtgtacctgcagtggaagaacaacaactacagcaccatctggtgcaatgaccacttcatccacgccaaggccatgaggaaggtgcgggaggtgcgggcccagctgaaggacatcatggtgcagcagaggatgagcctggccagctgtggcacagactgggacatcgtgaggaagtgcatctgtgccgcctacttccaccaggccgccaagctgaagggcattggagaatatgtgaacatcagaacaggcatgccctgccacctgcaccccaccagcagcctgtttggcatgggctacaccccagactacatcgtgtaccacgagctggtgatgaccaccaaggagtacatgcagtgtgtgacagctgtggatggagagtggctggccgagctgggccccatgttctacagcgtgaagcaggccggcaagagccggcaggagaacagaagaagagccaaggaggaggccagcgccatggaggaggagatggccctggccgaggagcagctgcgggcccggcggcaggagcaggagaagaggagccccctgggctctgtgcgcagcaccaagatctacaccccaggcaggaaggagcagggcgagcccatgacccccaggaggaccccagccaggtttggcctgtag

SEQ ID NO: 149581 - DNA, 1620 bp, synthetic construct
  misc_feature 1..1620: note = Description of Artificial Sequence: Synthetic coding sequence
  source 1..1620: mol_type = other DNA
atgggagacaccagtgaagatgccagcatccaccggctggagggcacagacctggactgccaggtgggcggcctcatctgcaagagcaagtctgctgccagcgagcagcacgtgttcaaggccccagccccccggcccagcctgctgggcctggacctgctggccagcctgaagagaagagagcgggaggagaaggatgatggagaggacaagaagaagagcaaggtgagcagctacaaggactgggaggagagcaaggatgaccagaaggatgctgaggaggagggcggggaccaggccaagatcttccagaaggccccagatggagtgaggaagtgcatcgtggccaccaacattgctgagaccagcctgactgtggatggcatcatgtttgtgattgattctggctactgcaagctgaaggtgttcaaccccagaattggcatggatgccctgcagatctaccccatcagccaggccaatgccaaccagaggagcggccgggccggccgcacaggccctggccagtgcttccggctgtacacccagagcgcctacaagaatgagctgctgaccaccaccgtgcctgagatccagaggaccaacctggccaacgtggtgctgctgctgaagagcctgggcgtgcaggacctgctgcagttccacttcatggaccccccacctgaggacaacatgctgaacagcatgtaccagctgtggatcctgggcgccctggacaacacaggaggcctgaccagcacaggccgcctgatggtggagttccccctggaccctgccctgagcaagatgctgattgtgtcctgtgacatgggctgcagcagcgagatcctgctgattgtgtccatgctgtctgtgcctgccatcttctaccggcccaagggccgggaggaggagagtgaccagatccgggagaagtttgctgtgcctgagagtgaccacctgacctacctgaatgtgtacctgcagtggaagaacaacaactacagcaccatctggtgcaatgaccacttcatccacgccaaggccatgaggaaggtgcgggaggtgcgggcccagctgaaggacatcatggtgcagcagaggatgagcctggccagctgtggcacagactgggacatcgtgaggaagtgcatctgtgccgcctacttccaccaggccgccaagctgaagggcattggagaatatgtgaacatcagaacaggcatgccctgccacctgcaccccaccagcagcctgtttggcatgggctacaccccagactacatcgtgtaccacgagctggtgatgaccaccaaggagtacatgcagtgtgtgacagctgtggatggagagtggctggccgagctgggccccatgttctacagcgtgaagcaggccggcaagagccggcaggagaacagaagaagagccaaggaggaggccagcgccatggaggaggagatggccctggccgaggagcagctgcgggcccggcggcaggagcaggagaagaggagccccctgggctctgtgcgcagcaccaagatctacaccccaggcaggaaggagcagggcgagcccatgacccccaggaggaccccagccaggtttggcctgtag

SEQ ID NO: 149582 - DNA, 2340 bp, synthetic construct
  misc_feature 1..2340: note = Description of Artificial Sequence: Synthetic coding sequence
  source 1..2340: mol_type = other DNA
atgagccgcttccctgctgtggccggccgggccccccggcggcaggaggagggggagaggagccgggacctgcaggaggagcggctgtctgctgtgtgcatcgctgaccgggaggagaagggctgcaccagccaggagggcggcaccacccccaccttccccatccagaagcagaggaagaagatcatccaggccgtgcgggacaacagcttcctgattgtgactggaaacacaggcagcggcaagaccacccagctgcccaagtacctgtatgaagctggcttcagccagcacggcatgattggagtgacccagcccaggaaggtggccgccatctctgtggcccagagggtggccgaggagatgaagtgcaccctgggcagcaaggtgggctaccaggtgcgctttgatgactgcagcagcaaggagacagccatcaagtacatgacagatggctgcctgctgaagcacatcctgggggaccccaacctgaccaagttcagcgtcatcatcctggatgaggcccacgagaggaccctgaccacagacatcctgtttggcctgctgaagaagctgttccaggagaagagccccaacaggaaggagcacctgaaggtggtggtgatgtctgccaccatggagctggccaagctgagcgccttcttcggcaactgccccatctttgacatccctggccgcctgtaccctgtgcgggagaagttctgcaacctgattggcccccgggacagagaaaatacagcctacatccaggccatcgtgaaggtgaccatggacatccacctgaatgagatggccggggacatcctggtgttcctgaccggccagtttgaaattgagaagagctgtgagctgctcttccagatggccgagagcgtggactatgactatgatgtgcaggacaccaccctggatggcctgctgatcctgccctgctacggctccatgaccacagaccagcagaggcgcatcttcctgcccccacctcctggcatcagaaaatgtgtgatcagcaccaacatcagcgccaccagcctgaccattgatggcatccgctacgtggtggatggcggctttgtgaagcagctgaaccacaacccccggctgggcctggacatcctggaggtggtgcccatcagcaagtctgaggccctgcagaggagcggccgggccggccgcaccagcagcggcaagtgcttccgcatctacagcaaggacttctggaaccagtgcatgccagaccacgtgattcctgagatcaagaggaccagcctgacctctgtggtgctgaccctgaagtgcctggccatccatgatgtgatccgcttcccctacctggaccccccaaatgaaagactcatcctggaggccctgaagcagctgtaccagtgtgatgccatcgacaggagcggccacgtgacccggctgggcctgtccatggtggagttccccctgcccccccacctgacctgtgccgtcatcaaggccgccagcctggactgtgaggacctgctgctgcccatcgccgccatgctgtctgtggagaatgtgttcatccggcctgtggaccctgagtaccagaaggaggccgagcagaggcaccgggagctggccgccaaggccggcggcttcaatgactttgccaccctggccgtcatctttgagcagtgcaagagcagcggggccccagcctcctggtgccagaagcactggatccactggcgctgcctcttcagcgccttccgggtggaggcccagctgcgggagctgatcaggaagctgaagcagcagagcgacttccccaaggagacctttgagggccccaagcatgaggtgctgcggcgctgcctgtgtgccggctacttcaagaatgtggccaggagatctgtgggccgcaccttctgcaccatggatggccggggcagccctgtgcacatccaccccagcagcgccctgcacgagcaggagaccaagctggagtggatcatcttccacgaggtgctggtgaccaccaaggtgtatgccagaattgtgtgccccatccgctatgagtgggtgcgggacctgctgcccaagctgcacgagttcaatgcccatgacctgagctctgtggcccggcgggaggtgagagaagatgcccggcggcgctggaccaacaaggaaaatgtgaagcagctgaaggatggcatcagcaaggatgtgctgaagaagatgcagaggagaaatgatgacaagagcatcagtgatgcccgggcccgcttcctggagaggaagcagcagaggacccaggaccacagcgacaccaggaaggagaccggctag

SEQ ID NO: 149583 - DNA, 2169 bp, synthetic construct
  misc_feature 1..2169: note = Description of Artificial Sequence: Synthetic coding sequence
  source 1..2169: mol_type = other DNA
atgagccgcttccctgctgtggccggccgggccccccggcggcaggaggagggggagaggagccgggacctgcaggaggagcggctgtctgctgtgtgcatcgctgaccgggaggagaagggctgcaccagccaggagggcggcaccacccccaccttccccatccagaagcagaggaagaagatcatccaggccgtgcgggacaacagcttcctgattgtgactggaaacacaggcagcggcaagaccacccagctgcccaagtacctgtatgaagctggcttcagccagcacggcatgattggagtgacccagcccaggaaggtggccgccatctctgtggcccagagggtggccgaggagatgaagtgcaccctgggcagcaaggtgggctaccaggtgcgctttgatgactgcagcagcaaggagacagccatcaagtacatgacagatggctgcctgctgaagcacatcctgggggaccccaacctgaccaagttcagcgtcatcatcctggatgaggcccacgagaggaccctgaccacagacatcctgtttggcctgctgaagaagctgttccaggagaagagccccaacaggaaggagcacctgaaggtggtggtgatgtctgccaccatggagctggccaagctgagcgccttcttcggcaactgccccatctttgacatccctggccgcctgtaccctgtgcgggagaagttctgcaacctgattggcccccgggacagagaaaatacagcctacatccaggccatcgtgaaggtgaccatggacatccacctgaatgagatggccggggacatcctggtgttcctgaccggccagtttgaaattgagaagagctgtgagctgctcttccagatggccgagagcgtggactatgactatgatgtgcaggacaccaccctggatggcctgctgatcctgccctgctacggctccatgaccacagaccagcagaggcgcatcttcctgcccccacctcctggcatcagaaaatgtgtgatcagcaccaacatcagcgccaccagcctgaccattgatggcatccgctacgtggtggatggcggctttgtgaagcagctgaaccacaacccccggctgggcctggacatcctggaggtggtgcccatcagcaagtctgaggccctgcagaggagcggccgggccggccgcaccagcagcggcaagtgcttccgcatctacagcaaggacttctggaaccagtgcatgccagaccacgtgattcctgagatcaagaggaccagcctgacctctgtggtgctgaccctgaagtgcctggccatccatgatgtgatccgcttcccctacctggaccccccaaatgaaagactcatcctggaggccctgaagcagctgtaccagtgtgatgccatcgacaggagcggccacgtgacccggctgggcctgtccatggtggagttccccctgcccccccacctgacctgtgccgtcatcaaggccgccagcctggactgtgaggacctgctgctgcccatcgccgccatgctgtctgtggagaatgtgttcatccggcctgtggaccctgagtaccagaaggaggccgagcagaggcaccgggagctggccgccaaggccggcggcttcaatgactttgccaccctggccgtcatctttgagcagtgcaagagcagcggggccccagcctcctggtgccagaagcactggatccactggcgctgcctcttcagcgccttccgggtggaggcccagctgcgggagctgatcaggaagctgaagcagcagagcgacttccccaaggagacctttgagggccccaagcatgaggtgctgcggcgctgcctgtgtgccggctacttcaagaatgtggccaggagatctgtgggccgcaccttctgcaccatggatggccggggcagccctgtgcacatccaccccagcagcgccctgcacgagcaggagaccaagctggagtggatcatcttccacgaggtgctggtgaccaccaaggtgtatgccagaattgtgtgccccatccgctatgagtgggtgcgggacctgctgcccaagctgcacgagttcaatgcccatgacctgagctctgtggcccggcgggaggtgtccaagatcaagctgttccagtag

SEQ ID NO: 149584 - DNA, 2196 bp, synthetic construct
  misc_feature 1..2196: note = Description of Artificial Sequence: Synthetic coding sequence
  source 1..2196: mol_type = other DNA
atgattggagtgacccagcccaggaaggtggccgccatctctgtggcccagagggtggccgaggagatgaagtgcaccctgggcagcaaggtgggctaccaggtgcgctttgatgactgcagcagcaaggagacagccatcaagtacatgacagatggctgcctgctgaagcacatcctgggggaccccaacctgaccaagttcagcgtcatcatcctggatgaggcccacgagaggaccctgaccacagacatcctgtttggcctgctgaagaagctgttccaggagaagagccccaacaggaaggagcacctgaaggtggtggtgatgtctgccaccatggagctggccaagctgagcgccttctttggaaactgccccatctttgacatccctggccgcctgtaccctgtgcgggagaagttctgcaacctgattggcccccgggaccgggagaacacagcctacatccaggccatcgtgaaggtgaccatggacatccacctgaatgagatggccggggacatcctggtgttcctgaccggccagtttgaaattgagaagagctgtgagctgctcttccagatggccgagagcgtggactatgactatgatgtgcaggacaccaccctggatggcctgctgatcctgccctgctacggctccatgaccaccgtgtcccagaccagcctgacctttgtgacccacatccagatcatgaagcagatcagcgagaaccagcacagcctgaccggcctgaccatcgccggcatcactggagtgagccaccacgcccggcccaggaacatgacctgcaatgagaagctgaaccagcagaggcgcatcttcctgcccccacctcctggcatcagaaaatgtgtgatcagcaccaacatcagcgccaccagcctgaccattgatggcatccgctacgtggtggatggcggctttgtgaagcagctgaaccacaacccccggctgggcctggacatcctggaggtggtgcccatcagcaagtctgaggccctgcagaggagcggccgggccggccgcaccagcagcggcaagtgcttccgcatctacagcaaggacttctggaaccagtgcatgccagaccacgtgattcctgagatcaagaggaccagcctgacctctgtggtgctgaccctgaagtgcctggccatccatgatgtgatccgcttcccctacctggaccccccaaatgaaagactcatcctggaggccctgaagcagctgtaccagtgtgatgccatcgacaggagcggccacgtgacccggctgggcctgtccatggtggagttccccctgcccccccacctgacctgtgccgtcatcaaggccgccagcctggactgtgaggacctgctgctgcccatcgccgccatgctgtctgtggagaatgtgttcatccggcctgtggaccctgagtaccagaaggaggccgagcagaggcaccgggagctggccgccaaggccggcggcttcaatgactttgccaccctggccgtcatctttgagcagtgcaagagcagcggggccccagcctcctggtgccagaagcactggatccactggcgctgcctcttcagcgccttccgggtggaggcccagctgcgggagctgatcaggaagctgaagcagcagagcgacttccccaaggagacctttgagggccccaagcatgaggtgctgcggcgctgcctgtgtgccggctacttcaagaatgtggccaggagatctgtgggccgcaccttctgcaccatggatggccggggcagccctgtgcacatccaccccagcagcgccctgcacgagcaggagaccaagctggagtggatcatcttccacgaggtgctggtgaccaccaaggtgtatgccagaattgtgtgccccatccgctatgagtgggtgcgggacctgctgcccaagctgcacgagttcaatgcccatgacctgagctctgtggcccggcgggaggtgagagaagatgcccggcggcgctggaccaacaaggaaaatgtgaagcagctgaaggatggcatcagcaaggatgtgctgaagaagatgcagaggagaaatgatgacaagagcatcagtgatgcccgggcccgcttcctggagaggaagcagcagaggacccaggaccacagcgacaccaggaaggagaccggctag

SEQ ID NO: 149585 - DNA, 2109 bp, synthetic construct
  misc_feature 1..2109: note = Description of Artificial Sequence: Synthetic coding sequence
  source 1..2109: mol_type = other DNA
atgagccgcttccctgctgtggccggccgggccccccggcggcaggaggagggggagaggagccgggacctgcaggaggagcggctgtctgctgtgtgcatcgctgaccgggaggagaagggctgcaccagccaggagggcggcaccacccccaccttccccatccagaagcagaggaagaagatcatccaggccgagacagccatcaagtacatgacagatggctgcctgctgaagcacatcctgggggaccccaacctgaccaagttcagcgtcatcatcctggatgaggcccacgagaggaccctgaccacagacatcctgtttggcctgctgaagaagctgttccaggagaagagccccaacaggaaggagcacctgaaggtggtggtgatgtctgccaccatggagctggccaagctgagcgccttctttggaaactgccccatctttgacatccctggccgcctgtaccctgtgcgggagaagttctgcaacctgattggcccccgggaccgggagaacacagcctacatccaggccatcgtgaaggtgaccatggacatccacctgaatgagatggccggggacatcctggtgttcctgaccggccagtttgaaattgagaagagctgtgagctgctcttccagatggccgagagcgtggactatgactatgatgtgcaggacaccaccctggatggcctgctgatcctgccctgctacggctccatgaccacagaccagcagaggcgcatcttcctgcccccacctcctggcatcagaaaatgtgtgatcagcaccaacatcagcgccaccagcctgaccattgatggcatccgctacgtggtggatggcggctttgtgaagcagctgaaccacaacccccggctgggcctggacatcctggaggtggtgcccatcagcaagtctgaggccctgcagaggagcggccgggccggccgcaccagcagcggcaagtgcttccgcatctacagcaaggacttctggaaccagtgcatgccagaccacgtgattcctgagatcaagaggaccagcctgacctctgtggtgctgaccctgaagtgcctggccatccatgatgtgatccgcttcccctacctggaccccccaaatgaaagactcatcctggaggccctgaagcagctgtaccagtgtgatgccatcgacagaagtggccacgtgacccggctgggcctgtccatggtggagttccccctgcccccccacctgacctgtgctgtgatcaaggccgccagcctggactgtgaggacctgctgctgcccatcgccgccatgctgtctgtggagaatgtgttcatccggcctgtggaccctgagtaccagaaggaggccgagcagaggcaccgggagctggccgccaaggccggcggcttcaatgactttgccaccctggccgtcatctttgagcagtgcaagagcagcggggccccagcctcctggtgccagaagcactggatccactggcgctgcctcttcagcgccttccgggtggaggcccagctgcgggagctgatcaggaagctgaagcagcagagcgacttccccaaggagacctttgagggccccaagcatgaggtgctgcggcgctgcctgtgtgccggctacttcaagaatgtggcccggcgctctgtgggccgcaccttctgcaccatggatggccggggcagccctgtgcacatccaccccagcagcgccctgcacgagcaggagaccaagctggagtggatcatcttccacgaggtgctggtgaccaccaaggtgtatgcccgcatcgtgtgccccatccgctatgagtgggtgcgggacctgctgcccaagctgcacgagttcaatgcccatgacctgagctctgtggcccggcgggaggtgcgggaggatgcccggcggcgctggaccaacaaggaaaatgtgaagcagctgaaggatggcatcagcaaggatgtgctgaagaagatgcagaggagaaatgatgacaagagcatcagtgatgcccgggcccgcttcctggagaggaagcagcagaggacccaggaccacagcgacaccaggaaggagactggatag

SEQ ID NO: 149586 - DNA, 3663 bp, synthetic construct
  misc_feature 1..3663: note = Description of Artificial Sequence: Synthetic coding sequence
  source 1..3663: mol_type = other DNA
atggctgtggccgtggccatggccggggccctgattggcagcgagcccggccctgctgaggagctggccaagctggagtacctgagcctggtgtccaaggtgtgcacagagctggacaaccacctgggcatcaatgacaaggacctggccgagtttgtgatcagcctggccgagaagaacaccacctttgacaccttcaaggccagcctggtgaagaatggagctgagttcacagacagcctcatcagcaacctgctgcggctcatccagaccatgaggcccccagccaagcccagcaccagcaaggaccctgtggtgaagcccaagacagagaaggagaagctgaaggagctgtttcctgtgctgtgccagcctgacaaccccagcgtgaggaccatgctggatgaagatgatgtgaaggtggccgtggatgtgctgaaggagctggaggccctgatgcccagcgctgctggccaggagaagcagagagatgctgagcaccgggacaggaccaagaagaagaagaggagccgcagccgggacaggaacagagaccgggaccgggaccgggagaggaacagagaccgggaccacaagaggaggcacaggagccgcagccgcagccgcagcaggacccgggagaggaacaaggtgaagagccgctaccgcagccgcagccgcagccagagcccccccaaggacaggaaggaccgggacaagtatggagagaggaacctggaccgctggagggacaagcacgtggacaggcctcctcctgaggagcccaccatcggggacatctacaacgggaaggtgaccagcatcatgcagtttggctgctttgtgcagctggagggcctgaggaagcgctgggagggcctggtgcacatcagcgagctgcggcgggagggccgggtggccaacgtggctgatgtggtgtccaagggccagagggtgaaggtgaaggtgctgtccttcaccggcaccaagaccagcctgtccatgaaggatgtggaccaggagaccggggaggacctgaaccccaacagaagaagaaacctggtgggggagaccaatgaggagacctccatgagaaatccagaccggcccacccacctgagcctggtgtctgcccctgaggtggaggatgacagcctggagaggaagaggctgacccgcatcagtgaccctgagaagtgggagatcaagcagatgattgctgccaacgtgctgagcaaggaggagttcccagactttgatgaggagaccggcatcctgcccaaggtggatgatgaagaagatgaggacctggagattgagctggtggaggaggagccccccttcctgcggggccacaccaagcagagcatggacatgagccccatcaagatcgtgaagaacccagatggcagcctgagccaggccgccatgatgcagagcgccctggccaaggagcggcgggagctgaagcaggcccagcgggaggccgagatggacagcatccccatgggcctgaacaagcactgggtggaccccctgcctgatgctgagggccggcagattgctgccaacatgaggggcatcggcatgatgcccaatgacatccctgagtggaagaagcacgcctttggaggcaacaaggccagctatggcaagaagacccagatgagcatcctggagcagcgggagagcctgcccatctacaagctgaaggagcagctggtgcaggccgtgcatgacaaccagatcctgattgtgattggagagaccggcagcggcaagaccacccagatcacccagtacctggccgaggccggctacaccagccggggcaagattggctgcacccagcccaggagagtggccgccatgtctgtggccaagagggtgtctgaggagtttggctgctgcctgggccaggaggtgggctacaccatccgctttgaggactgcaccagccctgagaccgtcatcaagtacatgacagatggcatgctgctgagagaatgtctgattgatcctgacctgacccagtatgccatcatcatgctggatgaggcccacgagaggaccatccacacagatgtgctgtttggcctgctgaagaagacagtgcagaagaggcaggacatgaagctgattgtgaccagcgccaccctggatgctgtgaagttcagccagtacttctatgaggcccccatcttcaccatccctggccgcacctaccctgtggagatcctgtacaccaaggagcctgagacagactacctggatgccagcctcatcaccgtgatgcagatccacctgacagagcccccaggggacatcctggtgttcctgaccggccaggaggagattgacacagcctgtgagatcctgtatgaaagaatgaagagcctgggcccagatgtgcctgagctgatcatcctgcctgtgtacagcgccctgcccagcgagatgcagacccgcatctttgatcctgcccctcctggcagcaggaaggtggtgattgccaccaacattgctgagaccagcctgaccattgatggcatctactacgtggtggaccccggctttgtgaagcagaaggtgtacaacagcaagacaggaattgaccagctggtggtgacccccatcagccaggcccaggccaagcagagagctggccgggccggccgcacaggccctgggaagtgctaccgcctgtacacagagcgggcctacagagatgagatgctgaccaccaacgtgcctgagatccagaggaccaacctggccagcacagtgctgagcctgaaggccatgggcatcaatgacctgctgagctttgacttcatggatgccccacccatggagaccctcatcacagccatggagcagctgtacaccctgggcgccctggatgatgagggcctgctgacccggctgggccgcaggatggccgagttccccctggagcccatgctgtgcaagatgctgatcatgtctgtgcacctgggctgcagcgaggagatgctgaccatcgtgtccatgctgtctgtgcagaatgtgttctaccggcccaaggacaagcaggccctggccgaccagaagaaggccaagttccaccagacagaaggagaccacctgaccctgctggccgtgtacaacagctggaagaacaacaagttcagcaacccctggtgctatgagaacttcatccaggcccggagcctgcggcgggcccaggacatcaggaagcagatgctgggcatcatggacagacacaagctggatgtggtgtcctgtgggaagagcacagtgcgggtgcagaaggccatctgcagcggcttcttcagaaatgctgccaagaaggacccccaggagggctaccgcaccctgattgaccagcaggtggtgtacatccaccccagcagcgccctcttcaaccggcagcctgagtgggtggtgtaccacgagctggtgctgaccaccaaggagtacatgagggaggtgaccaccatcgacccccgctggctggtggagtttgccccagccttcttcaaggtgtctgaccccaccaagctgagcaagcagaagaagcagcagaggctggagcccctgtacaacagatatgaggagcccaatgcctggaggatcagccgggccttcagaagaagatag

SEQ ID NO: 149587 - DNA, 3546 bp, synthetic construct
  misc_feature 1..3546: note = Description of Artificial Sequence: Synthetic coding sequence
  source 1..3546: mol_type = other DNA
atggctgtggccgtggccatggccggggccctgattggcagcgagcccggccctgctgaggagctggccaagctggagtacctgagcctggtgtccaaggtgtgcacagagctggacaaccacctgggcatcaatgacaaggacctggccgagtttgtgatcagcctggccgagaagaacaccacctttgacaccttcaaggccagcctggtgaagaatggagctgagttcacagacagcctcatcagcaacctgctgcggctcatccagaccatgaggcccccagccaagcccagcaccagcaaggaccctgtggtgaagcccaagacagagaaggagaagctgaaggagctgtttcctgtgctgtgccagcctgacaaccccagcgtgaggaccatgctggatgaagatgatgtgaaggtggccgtggatgtgctgaaggagctggaggccctgatgcccagcgctgctggccaggagaagcagagagatgctgagcaccgggacaggaccaagaagaagaagaggagccgcagccgggacaggaacagagaccgggaccgggaccgggagaggaacagagaccgggaccacaagaggaggcacaggagccgcagccgcagccgcagcaggacccgggagaggaacaaggtgaagagccgctaccgcagccgcagccgcagccagagcccccccaaggacaggaaggaccgggacaagtatggagagaggaacctggaccgctggagggacaagcacgtggacaggcctcctcctgaggagcccaccatcggggacatctacaacgggaaggtgaccagcatcatgcagtttggctgctttgtgcagctggagggcctgaggaagcgctgggagggcctggtgcacatcagcgagctgcggcgggagggccgggtggccaacgtggctgatgtggtgtccaagggccagagggtgaaggtgaaggtgctgtccttcaccggcaccaagaccagcctgtccatgaaggatgtggaccaggagaccggggaggacctgaaccccaacagaagaagaaacctggtgggggagaccaatgaggagacctccatgagaaatccagaccggcccacccacctgagcctggtgtctgcccctgaggtggaggatgacagcctggagaggaagaggctgacccgcatcagtgaccctgagaagtgggagatcaagcagatgattgctgccaacgtgctgagcaaggaggagttcccagactttgatgaggagaccggcatcctgcccaaggtggatgatgaagaagatgaggacctggagattgagctggtggaggaggagccccccttcctgcggggccacaccaagcagagcatggacatgagccccatcaagatcgtgaagaacccagatggcagcctgagccaggccgccatgatgcagagcgccctggccaaggagcggcgggagctgaagcaggcccagcgggaggccgagatggacagcatccccatgggcctgaacaagcactgggtggaccccctgcctgatgctgagggccggcagattgctgccaacatgaggggcatcggcatgatgcccaatgacatccctgagtggaagaagcacgcctttggaggcaacaaggccagctatggcaagaagacccagatgagcatcctggagcagcgggagagcctgcccatctacaagctgaaggagcagctggtgcaggccgtgcatgacaaccagatcctgattgtgattggagagaccggcagcggcaagaccacccagatcacccagtacctggccgaggccggctacaccagccggggcaagattggctgcacccagcccaggagagtggccgccatgtctgtggccaagagggtgtctgaggagtttggctgctgcctgggccaggaggtgggctacaccatccgctttgaggactgcaccagccctgagaccgtcatcaagtacatgacagatggcatgctgctgagagaatgtctgattgatcctgacctgacccagtatgccatcatcatgctggatgaggcccacgagaggaccatccacacagatgtgctgtttggcctgctgaagaagacagtgcagaagaggcaggacatgaagctgattgtgaccagcgccaccctggatgctgtgaagttcagccagtacttctatgaggcccccatcttcaccatccctggccgcacctaccctgtggagatcctgtacaccaaggagcctgagacagactacctggatgccagcctcatcaccgtgatgcagatccacctgacagagcccccaggggacatcctggtgttcctgaccggccaggaggagattgacacagcctgtgagatcctgtatgaaagaatgaagagcctgggcccagatgtgcctgagctgatcatcctgcctgtgtacagcgccctgcccagcgagatgcagacccgcatctttgatcctgcccctcctggcagcaggaaggtggtgattgccaccaacattgctgagaccagcctgaccattgatggcatctactacgtggtggaccccggctttgtgaagcagaaggtgtacaacagcaagacaggaattgaccagctggtggtgacccccatcagccaggcccaggccaagcagagagctggccgggccggccgcacaggccctgggaagtgctaccgcctgtacacagagcgggcctacagagatgagatgctgaccaccaacgtgcctgagatccagaggaccaacctggccagcacagtgctgagcctgaaggccatgggcatcaatgacctgctgagctttgacttcatggatgccccacccatggagaccctcatcacagccatggagcagctgtacaccctgggcgccctggatgatgagggcctgctgacccggctgggccgcaggatggccgagttccccctggagcccatgctgtgcaagatgctgatcatgtctgtgcacctgggctgcagcgaggagatgctgaccatcgtgtccatgctgtctgtgcagaatgtgttctaccggcccaaggacaagcaggccctggccgaccagaagaaggccaagttccaccagacagaaggagaccacctgaccctgctggccgtgtacaacagctggaagaacaacaagttcagcaacccctggtgctatgagaacttcatccaggcccggagcctgcggcgggcccaggacatcaggaagcagatgctgggcatcatggacagacacaagctggatgtggtgtcctgtgggaagagcacagtgcgggtgcagaaggccatctgcagcggcttcttcagaaatgctgccaagaaggacccccaggagggctaccgcaccctgattgaccagcaggtggtgtacatccaccccagcagcgccctcttcaaccggcagccagaatgtcccaagcacttcctgcctgtggtggccgtggccgtgtccctggagcagtgcctgagcaagtttgaggacctgaacaaggagctgggcctggtgacctgctag

SEQ ID NO: 149588 - DNA, 3813 bp, synthetic construct
  misc_feature 1..3813: note = Description of Artificial Sequence: Synthetic coding sequence
  source 1..3813: mol_type = other DNA
atgggagatgtgaagaacttcctgtatgcctggtgtgggaagaggaagatgacccccagctatgagatccgggctgtgggcaacaagaaccggcagaagttcatgtgtgaggtgcaggtggagggctacaactacacaggcatgggcaacagcaccaacaagaaggatgcccagagcaatgctgcccgggactttgtgaactacctggtgcgcatcaatgagatcaagtctgaggaggtgcctgcctttggagtggccagccccccacccctgacagacaccccagacaccacagccaatgctgagggggacctgcccaccaccatgggcggccccctgcccccccacctggccctgaaggccgagaacaacagcgaggtgggcgccagcggctacggcgtgcccggccccacctgggacagaggagccaacctgaaggactactacagcaggaaggaggagcaggaggtgcaggccaccctggagagcgaggaggtggacctgaatgccggcctgcacggcaactggaccctggagaatgccaaggcccggctgaaccagtacttccagaaggagaagatccagggcgagtacaagtacacccaggtgggccctgaccacaacagaagcttcatcgccgagatgaccatctacatcaagcagctgggccgccgcatctttgcccgggagcacggcagcaacaagaagctggccgcccagagctgtgccctgagcctggtgcggcagctgtaccacctgggcgtggtggaggcctacagcggcctgaccaagaagaaggagggggagaccgtggagccctacaaggtgaacctgagccaggacctggagcaccagctgcagaacatcatccaggagctgaacctggagatcctgcccccacctgaggaccccagcgtgcctgtggccctgaacatcggcaagctggcccagtttgagcccagccagaggcagaaccaggtgggcgtggtgccctggagccccccccagagcaactggaacccctggaccagcagcaacattgatgagggccccctggcctttgccaccccagagcagatctccatggacctgaagaatgagctgatgtaccagctggagcaggaccatgacctgcaggccatcctgcaggagcgggagctgctgcctgtgaagaagtttgaaagtgagatcctggaggccatcagccagaacagcgtggtgatcatccggggggccaccggctgcggcaagaccacccaggtgccccagttcatcctggatgacttcatccagaatgacagagctgctgagtgcaacatcgtggtgacccagccccggcgcatctctgctgtgtctgtggccgagcgggtggcctttgagcggggggaggagcccgggaagagctgtggctacagcgtgcgctttgagagcatcctgccccggccccacgccagcatcatgttctgcaccgtgggcgtgctgctgaggaagctggaggccggcatccggggcatcagccacgtgattgtggatgagatccacgagcgggacatcaacacagacttcctgctggtggtgctgagagatgtggtgcaggcctacccagaggtgagaattgtgctgatgtctgccaccatcgacacctccatgttctgtgagtacttcttcaactgccccatcatcgaggtgtatggccgcacctaccctgtgcaggagtacttcctggaggactgcatccagatgacccactttgtgcccccacccaaggacaagaagaagaaggacaaggatgatgatggaggagaagatgatgatgccaactgcaacctgatctgtggagatgaatatggccctgagacccggctgtccatgagccagctgaatgagaaggagaccccatttgagctgattgaggccctgctgaagtacatcgagaccctgaatgtgcctggagctgtgctggtgttcctgcccggctggaacctgatctacaccatgcagaagcacctggagatgaacccccacttcggcagccaccgctaccagatcctgcccctgcacagccagatcccccgggaggagcagaggaaggtgtttgatcctgtgcctgtgggcgtgaccaaggtgatcctgagcaccaacattgctgagaccagcatcaccatcaatgatgtggtgtatgtgattgacagctgcaagcagaaggtgaagctgttcaccgcccacaacaacatgaccaactatgccaccgtgtgggccagcaagaccaacctggagcagaggaagggccgggccggccgggtgcggcccggcttctgcttccacctgtgcagccgggccaggtttgagcggctggagacccacatgaccccagagatgttccgcacccccctgcatgaaattgccctgagcatcaagctgctgcggctgggcggcatcggccagttcctggccaaggccatcgagcccccacccctggatgctgtgattgaggccgagcacaccctgcgggagctggatgccctggatgccaatgatgagctgacccccctgggccgcatcctggccaagctgcccatcgagcccaggtttgggaagatgatgatcatgggctgcatcttctacgtgggagatgccatctgcaccatcgctgctgccacctgcttccctgagcccttcatcaatgaaggcaagaggctgggctacatccacaggaactttgctggcaaccgcttcagtgaccacgtggccctgctgagcgtcttccaggcctgggatgatgccaggatgggcggggaggaggccgagatccgcttctgtgagcacaagaggctgaacatggccaccctgaggatgacctgggaggccaaggtgcagctgaaggagatcctgatcaacagcggcttccctgaggactgcctgctgacccaggtgttcaccaacacaggccctgacaacaacctggatgtggtgatcagcctgctggcctttggagtgtaccccaacgtgtgctaccacaaggagaagaggaagatcctgaccacagagggcagaaatgccctgatccacaagagctctgtgaactgccccttcagcagccaggacatgaagtaccccagccccttctttgtgtttggagagaagatccgcacccgggccatcagcgccaagggcatgaccctggtgacccccctgcagctgctgctgtttgccagcaagaaggtgcagagtgatggccagatcgtgctggtggatgactggatcaagctgcagatcagccatgaggccgccgcctgcatcaccggcctgcgggccgccatggaggccctggtggtggaggtgaccaagcagcctgccatcatcagccagctggaccctgtgaatgaaagaatgctgaacatgatccggcagatcagccggcccagcgctgctggcatcaacctgatgattggcagcaccaggtatggagatggccccaggcctcccaagatggcccgctatgacaatggaagtggctaccgccggggcggcagcagctacagcggcggcggctatggaggcggctacagcagcggcggctacggcagcggcggctatggaggcagcgccaacagcttccgggccggctacggggccggcgtgggcggcggctaccggggcgtgtcccggggcggcttccggggcaacagcggcggggactaccggggccccagcggcggctaccggggcagcggcggcttccagaggggcggcggccgcggggcctacggcaccggctacttcggccagggccggggcggcggcggctactag

SEQ ID NO: 149589 - DNA, 1800 bp, synthetic construct
  misc_feature 1..1800: note = Description of Artificial Sequence: Synthetic coding sequence
  source 1..1800: mol_type = other DNA
atgggagatgtgaagaacttcctgtatgcctggtgtgggaagaggaagatgacccccagctatgagatccgggctgtgggcaacaagaaccggcagaagttcatgtgtgaggtgcaggtggagggctacaactacacaggcatgggcaacagcaccaacaagaaggatgcccagagcaatgctgcccgggactttgtgaactacctggtgcgcatcaatgagatcaagtctgaggaggtgcctgcctttggagtggccagccccccacccctgacagacaccccagacaccacagccaatgctgagggggacctgcccaccaccatgggcggccccctgcccccccacctggccctgaaggccgagaacaacagcgaggtgggcgccagcggctacggcgtgcccggccccacctgggacagaggagccaacctgaaggactactacagcaggaaggaggagcaggaggtgcaggccaccctggagagcgaggaggtggacctgaatgccggcctgcacggcaactggaccctggagaatgccaaggcccggctgaaccagtacttccagaaggagaagatccagggcgagtacaagtacacccaggtgggccctgaccacaacagaagcttcatcgccgagatgaccatctacatcaagcagctgggccgccgcatctttgcccgggagcacggcagcaacaagaagctggccgcccagagctgtgccctgagcctggtgcggcagctgtaccacctgggcgtggtggaggcctacagcggcctgaccaagaagaaggagggggagaccgtggagccctacaaggtgaacctgagccaggacctggagcaccagctgcagaacatcatccaggagctgaacctggagatcctgcccccacctgaggaccccagcgtgcctgtggccctgaacatcggcaagctggcccagtttgagcccagccagaggcagaaccaggtgggcgtggtgccctggagccccccccagagcaactggaacccctggaccagcagcaacattgatgagggccccctggcctttgccaccccagagcagatctccatggacctgaagaatgagctgatgtaccagctggagcaggaccatgacctgcaggccatcctgcaggagcgggagctgctgcctgtgaagaagtttgaaagtgagatcctggaggccatcagccagaacagcgtggtgatcatccggggggccaccggctgcggcaagaccacccaggtgccccagttcatcctggatgacttcatccagaatgacagagctgctgagtgcaacatcgtggtgacccagccccggcgcatctctgctgtgtctgtggccgagcgggtggcctttgagcggggggaggagcccgggaagagctgtggctacagcgtgcgctttgagagcatcctgccccggccccacgccagcatcatgttctgcaccgtgggcgtgctgctgaggaagctggaggccggcatccggggcatcagccacgtgattgtggatgagatccacgagcgggacatcaacacagacttcctgctggtggtgctgagagatgtggtgcaggcctacccagaggtgagaattgtgctgatgtctgccaccatcgacacctccatgttctgtgagtacttcttcaactgccccatcatcgaggtgtatggccgcacctaccctgtgcaggagtacttcctggaggactgcatccagatgacccactttgtgcccccacccaaggacaagaagaagaaggacaagaagaagaagtag

SEQ ID NO: 149590 - DNA, 1197 bp, synthetic construct
  misc_feature 1..1197: note = Description of Artificial Sequence: Synthetic coding sequence
  source 1..1197: mol_type = other DNA
atgatgctgaagggcatcaccaggctcatcagccgcatccacaagctggaccccggccgcttcctgcacatgggcacccaggcccggcagagcattgctgcccacctggacaaccaggtgcctgtggagagcccccgggccatcagcaggaccaatgaaaatgaccctgccaagcatggagaccagcacgagggccagcactacaacatcagcccccaggacctggagaccgtcttcccccacggcctgccccccaggtttgtgatgcaggtgaagaccttcagcgaggcctgcctgatggtgaggaagccagccctggagctgctgcactacctgaagaacaccagctttgcctacccagccatccgctacctgctgtatggagagaagggcaccgggaagaccctgagcctgtgccacgtgatccacttctgtgccaagcaggactggctgatcctgcacatcccagatgcccacctgtgggtgaagaactgccgggacctgctgcagagcagctacaacaagcagagatttgaccagcccctggaggccagcacctggctgaagaacttcaagaccaccaatgaacgcttcctgaaccagatcaaggtgcaggagaagtatgtgtggaacaagcgggagagcacagagaagggcagccccctgggggaggtggtggagcagggcatcaccagggtgagaaatgccacagatgctgtgggcatcgtgctgaaggagctgaagaggcagagcagcctgggcatgttccacctgctggtggccgtggatggcatcaatgccctgtggggccgcaccaccctgaagcgggaggacaagagccccatcgcccctgaggagctggccctggtgcacaacctgaggaagatgatgaagaatgactggcacggcggggccatcgtgtctgccctgagccagacaggcagcctcttcaagcccaggaaggcctacctgccccaggagctgctgggcaaggagggctttgatgccctggaccccttcatccccatcctggtgagcaactacaaccccaaggagtttgagagctgcatccagtactacctggagaacaactggctgcagcacgagaaggcccccacagaggagggcaagaaggagctgctcttcctgagcaatgccaaccccagcctgctggagcggcactgtgcctacctgtag

SEQ ID NO: 149591 - DNA, 1197 bp, synthetic construct; identical to SEQ ID NO: 149590
  misc_feature 1..1197: note = Description of Artificial Sequence: Synthetic coding sequence
  source 1..1197: mol_type = other DNA

SEQ ID NO: 149592 - DNA, 1095 bp, synthetic construct
  misc_feature 1..1095: note = Description of Artificial Sequence: Synthetic coding sequence
  source 1..1095: mol_type = other DNA
atgatgctgaagggcatcaccaggctcatcagccgcatccacaagctggaccccggccgcttcctgcacatgggcacccaggcccggcagagcattgctgcccacctggacaaccaggtgcctgtggagagcccccgggccatcagcaggaccaatgaaaatgaccctgtgaagaccttcagcgaggcctgcctgatggtgaggaagccagccctggagctgctgcactacctgaagaacaccagctttgcctacccagccatccgctacctgctgtatggagagaagggcaccgggaagaccctgagcctgtgccacgtgatccacttctgtgccaagcaggactggctgatcctgcacatcccagatgcccacctgtgggtgaagaactgccgggacctgctgcagagcagctacaacaagcagagatttgaccagcccctggaggccagcacctggctgaagaacttcaagaccaccaatgaacgcttcctgaaccagatcaaggtgcaggagaagtatgtgtggaacaagcgggagagcacagagaagggcagccccctgggggaggtggtggagcagggcatcaccagggtgagaaatgccacagatgctgtgggcatcgtgctgaaggagctgaagaggcagagcagcctgggcatgttccacctgctggtggccgtggatggcatcaatgccctgtggggccgcaccaccctgaagcgggaggacaagagccccatcgcccctgaggagctggccctggtgcacaacctgaggaagatgatgaagaatgactggcacggcggggccatcgtgtctgccctgagccagacaggcagcctcttcaagcccaggaaggcctacctgccccaggagctgctgggcaaggagggctttgatgccctggaccccttcatccccatcctggtgagcaactacaaccccaaggagtttgagagctgcatccagtactacctggagaacaactggctgcagcacgagaaggcccccacagaggagggcaagaaggagctgctcttcctgagcaatgccaaccccagcctgctggagcggcactgtgcctacctgtag

SEQ ID NO: 149593 - DNA, 1074 bp, synthetic construct
  misc_feature 1..1074: note = Description of Artificial Sequence: Synthetic coding sequence
  source 1..1074: mol_type = other DNA
atgatgctgaagggcatcaccaggctcatcagccgcatccacaaggccaagcacggggaccagcacgagggccagcactacaacatcagcccccaggacctggagaccgtcttcccccacggcctgcccccaagatttgtgatgcaggtgaagaccttcagcgaggcctgcctgatggtgaggaagccagccctggagctgctgcactacctgaagaacaccagctttgcctacccagccatccgctacctgctgtatggagagaagggcaccgggaagaccctgagcctgtgccacgtgatccacttctgtgccaagcaggactggctgatcctgcacatcccagatgcccacctgtgggtgaagaactgccgggacctgctgcagagcagctacaacaagcagagatttgaccagcccctggaggccagcacctggctgaagaacttcaagaccaccaatgaacgcttcctgaaccagatcaaggtgcaggagaagtatgtgtggaacaagcgggagagcacagagaagggcagccccctgggggaggtggtggagcagggcatcaccagggtgagaaatgccacagatgctgtgggcatcgtgctgaaggagctgaagaggcagagcagcctgggcatgttccacctgctggtggccgtggatggcatcaatgccctgtggggccgcaccaccctgaagcgggaggacaagagccccatcgcccctgaggagctggccctggtgcacaacctgaggaagatgatgaagaatgactggcatggaggagccatcgtgtctgccctgagccagacaggcagcctcttcaagcccaggaaggcctacctgccccaggagctgctgggcaaggagggctttgatgccctggaccccttcatccccatcctggtgagcaactacaaccccaaggagtttgagagctgcatccagtactacctggagaacaactggctgcagcacgagaaggcccccacagaggagggcaagaaggagctgctcttcctgagcaatgccaaccccagcctgctggagcggcactgtgcctacctgtag

SEQ ID NO: 149594 - DNA, 1047 bp, synthetic construct
  misc_feature 1..1047: note = Description of Artificial Sequence: Synthetic coding sequence
  source 1..1047: mol_type = other DNA
atggccggcctgaagaggcgggccagccaggtgtggccagaggagcacggggagcaggagcacggcctgtacagcctgcacaggatgtttgacatcgtgggcacccacctgacccacagagatgtgcgggtgctgtccttcctgtttgtggatgtgattgatgaccacgagcggggcctcatcagaaatggccgggacttcctgctggccctggagcggcagggccgctgtgatgagagcaacttccggcaggtgctgcagctgctgcgcatcatcaccaggcatgacctgctgccctacgtgaccctgaagagaagaagagctgtgtgcccagacctggtggacaagtacctggaggagaccagcatccgctacgtgaccccccgggccctgagtgaccctgagccccggcccccccagcccagcaagacagtgcccccccactaccctgtggtgtgctgccccaccagcggcccccagatgtgcagcaagaggcctgcccggggccgggccaccctgggcagccagaggaagaggaggaagtctgtgaccccagaccccaaggagaagcagacctgtggggaggaggtgcagggcttccagcgctggagccggctggagggggagtacaaggagctgctgggccactgggccgtgtatgccatccagtacatccggctgcgggtgcgggcagagtactgccagcacgagacagccctgcagggcaatgtgttcagcaacaagcaggaccccctggagcggcagtttgagcgcttcaaccaggccaacaccatcctgaagagccgggacctgggcagcatcatctgtgacatcaagttcagcgagctgacctacctggatgccttctggagggactacatcaatggcagcctgctggaggccctgaagggcgtcttcatcacagacagcctgaagcaggccgtgggccacgaggccatcaagctgctggtgaatgtggatgaagaagattatgagctgggccggcagaagctgctgaggaacctgatgctgcaggccctgccctag

SEQ ID NO: 149595 - DNA, 957 bp, synthetic construct
  misc_feature 1..957: note = Description of Artificial Sequence: Synthetic coding sequence
  source 1..957: mol_type = other DNA
atggccggcctgaagaggcgggccagccaggtgtggccagaggagcacggggagcaggagcacggcctgtacagcctgcacaggatgtttgacatcgtgggcacccacctgacccacagagatgtgcgggtgctgtccttcctgtttgtggatgtgattgatgaccacgagcggggcctcatcagaaatggccgggacttcctgctggccctggagcggcagggccgctgtgatgagagcaacttccggcaggtgctgcagctgctgcgcatcatcaccaggcatgacctgctgccctacgtgaccctgaagagaagaagagctgtgtgcccagacctggtggacaagtacctggaggagaccagcatccgctacgtgaccccccgggccctgagtgaccctgagccccggcccccccagcccagcaagacagtgcccccccactaccctgtggtgtgctgccccaccagcggcccccagatgtgcagcaagaggcctgcccggggccgggccaccctgggcagccagaggaagaggaggaagtctgtgaccccagaccccaaggagaagcagacctgtgacatccggctgcgggtgcgggcagagtactgccagcacgagacagccctgcagggcaatgtgttcagcaacaagcaggaccccctggagcggcagtttgagcgcttcaaccaggccaacaccatcctgaagagccgggacctgggcagcatcatctgtgacatcaagttcagcgagctgacctacctggatgccttctggagggactacatcaatggcagcctgctggaggccctgaagggcgtcttcatcacagacagcctgaagcaggccgtgggccacgaggccatcaagctgctggtgaatgtggatgaagaagattatgagctgggccggcagaagctgctgaggaacctgatgctgcaggccctgccctag

SEQ ID NO: 149596 - DNA, 1047 bp, synthetic construct; identical to SEQ ID NO: 149594
  misc_feature 1..1047: note = Description of Artificial Sequence: Synthetic coding sequence
  source 1..1047: mol_type = other DNA

SEQ ID NO: 149597 - DNA, 957 bp, synthetic construct; identical to SEQ ID NO: 149595
  misc_feature 1..957: note = Description of Artificial Sequence: Synthetic coding sequence
  source 1..957: mol_type = other DNA

SEQ ID NO: 149598 - DNA, 828 bp, synthetic construct
  misc_feature 1..828: note = Description of Artificial Sequence: Synthetic coding sequence
  source 1..828: mol_type = other DNA
atggccggcctgaagaggcgggccagccaggtgtggccagaggagcacggggagcaggagcacggcctgtacagcctgcacaggatgtttgacatcgtgggcacccacctgacccacagagatgtgctgcagctgctgcgcatcatcaccaggcatgacctgctgccctacgtgaccctgaagagaagaagagctgtgtgcccagacctggtggacaagtacctggaggagaccagcatccgctacgtgaccccccgggccctgagtgaccctgagcccaggcctccccagcccagcaagacagtgcccccccactaccctgtggtgtgctgccccaccagcggcccccagatgtgcagcaagaggcctgcccggggccgggccaccctgggcagccagaggaagaggaggaagtctgtgaccccagaccccaaggagaagcagacctgtgacatccggctgcgggtgcgggcagagtactgccagcatgaaacagccctgcagggcaatgtgttcagcaacaagcaggaccccctggagcggcagtttgagcgcttcaaccaggccaacaccatcctgaagagccgggacctgggcagcatcatctgtgacatcaagttcagcgagctgacctacctggatgccttctggagggactacatcaatggcagcctgctggaggccctgaagggcgtcttcatcacagacagcctgaagcaggccgtgggccacgaggccatcaagctgctggtgaatgtggatgaggaggactatgagctgggccggcagaagctgctgaggaacctgatgctgcaggccctgccctag

SEQ ID NO: 149599 - DNA, 957 bp, synthetic construct; identical to SEQ ID NO: 149595
  misc_feature 1..957: note = Description of Artificial Sequence: Synthetic coding sequence
  source 1..957: mol_type = other DNA

SEQ ID NO: 149600 - DNA, 957 bp, synthetic construct; identical to SEQ ID NO: 149595
  misc_feature 1..957: note = Description of Artificial Sequence: Synthetic coding sequence
  source 1..957: mol_type = other DNA

SEQ ID NO: 149601 - DNA, 1917 bp, synthetic construct
  misc_feature 1..1917: note = Description of Artificial Sequence: Synthetic coding sequence
  source 1..1917: mol_type = other DNA
atggacctgtggcagctgctgctgaccctggccctggccggcagcagtgatgccttcagcggcagcgaggccacagctgccatcctgagccgggccccctggagcctgcagagcgtgaaccctggcctgaagaccaacagcagcaaggagcccaagttcaccaagtgccgcagccctgagcgggagaccttcagctgccactggacagatgaggtgcaccacggcaccaagaacctgggccccatccagctgttctacaccaggaggaacacccaggagtggacccaggagtggaaggagtgcccagactatgtgtctgctggggagaacagctgctacttcaacagcagcttcaccagcatctggatcccctactgcatcaagctgaccagcaatggaggcaccgtggatgagaagtgcttctctgtggatgagatcgtgcagcctgacccccccatcgccctgaactggaccctgctgaatgtgtccctgaccggcatccatgctgacatccaggtgcgctgggaggcccccagaaatgctgacatccagaagggctggatggtgctggagtatgagctgcagtacaaggaggtgaatgagaccaagtggaagatgatggaccccatcctgaccacctctgtgcctgtgtacagcctgaaggtggacaaggagtatgaggtgcgggtgcgcagcaagcagagaaattctggcaactacggggagttcagcgaggtgctgtatgtgaccctgccccagatgagccagttcacctgtgaggaggacttctacttcccctggctgctgatcatcatcttcggcatcttcggcctgactgtgatgctgtttgtgttcctgttcagcaagcagcagaggatcaagatgctgatcctgccccctgtgcctgtgcccaagatcaagggcattgatcctgacctgctgaaggagggcaagctggaggaggtgaacaccatcctggccatccatgacagctacaagccagagttccacagtgatgacagctgggtggagttcatcgagctggacattgatgagccagatgagaagacagaggagagtgacacagaccggctgctgagcagtgaccacgagaagagccacagcaacctgggcgtgaaggatggagacagcggccgcaccagctgctgtgagccagacatcctggagacagacttcaatgccaatgacatccacgagggcaccagcgaggtggcccagccccagaggctgaagggggaggccgacctgctgtgcctggaccagaagaaccagaacaacagcccctaccatgatgcctgcccagccacccagcagcccagcgtcatccaggccgagaagaacaagccccagcccctgcccacagaaggagctgagagcacccaccaggccgcccacatccagctgagcaaccccagcagcctgagcaacatcgacttctacgcccaggtgtctgacatcaccccagctggctctgtggtgctgagccctggccagaagaacaaggccggcatgagccagtgtgacatgcaccctgagatggtgtccctgtgccaggagaacttcctgatggacaatgcctacttctgtgaggctgatgccaagaagtgcatccctgtggccccccacatcaaggtggagagccacatccagcccagcctgaaccaggaggacatctacatcaccacagagagcctgaccacagctgctggccggcccggcactggagagcacgtgcccggcagcgagatgcctgtgcctgactacaccagcatccacatcgtgcagagcccccagggcctcatcctgaatgccacagccctgcccctgcctgacaaggagttcctgagcagctgtggctacgtgtccacagaccagctgaacaagatcatgccctag

SEQ ID NO: 149602 - DNA, 1113 bp, synthetic construct
  misc_feature 1..1113: note = Description of Artificial Sequence: Synthetic coding sequence
  source 1..1113: mol_type = other DNA
atgttccaggcctccatgaggagccccaacatggagcccttcaagcagcagaaggtggaggacttctatgacattggagaggagctgggcagcggccagtttgccatcgtgaagaagtgccgggagaagagcacaggcctggagtatgctgccaagttcatcaagaagaggcagagccgggccagcagaagaggagtgtcccgggaggagattgagcgggaggtgtccatcctgcggcaggtgctgcaccacaacgtcatcaccctgcatgatgtgtatgagaacagaacagatgtggtgctgatcctggagctggtgtctggaggagagctgtttgacttcctggcccagaaggagagcctgtctgaggaggaggccaccagcttcatcaagcagatcctggatggagtgaactacctgcacaccaagaagatcgcccactttgacctgaagccagagaacatcatgctgctggacaagaacatccccatcccccacatcaagctgattgactttggcctggcccacgagattgaagatggagtggagttcaagaacatcttcggcaccccagagtttgtggcccctgagatcgtgaactatgagcccctgggcctggaggccgacatgtggagcattggagtcatcacctacatcctgctgagcggggccagccccttcctgggggacaccaagcaggagaccctggccaacatcacagctgtgtcctatgactttgatgaggagttcttcagccagaccagcgagctggccaaggacttcatcaggaagctgctggtgaaggagaccaggaagaggctgaccatccaggaggccctgcggcacccctggatcacccctgtggacaaccagcaggccatggtgcggcgggagagcgtggtgaacctggagaacttcaggaagcagtatgtgagaagacgctggaagctgtccttcagcatcgtgtccctgtgcaaccacctgaccaggagcctgatgaagaaggtgcacctgcggccagatgaggacctgaggaactgtgagagtgacacagaagaagatattgcccggaggaaggccctgcaccccaggagaagaagcagcaccagctag

SEQ ID NO: 149603 - DNA, 1113 bp, synthetic construct; identical to SEQ ID NO: 149602
  misc_feature 1..1113: note = Description of Artificial Sequence: Synthetic coding sequence
  source 1..1113: mol_type = other DNA

SEQ ID NO: 149604 - DNA, 246 bp, synthetic construct
  misc_feature 1..246: note = Description of Artificial Sequence: Synthetic coding sequence
  source 1..246: mol_type = other DNA
atgttccaggcctccatgaggagccccaacatggagcccttcaagcagcagaaggtggaggacttctatgacattggagaggagctgggcagcggccagtttgccatcgtgaagaagtgccgggagaagagcacaggcctggagtatgctgccaagttcatcaagaagaggcagagccgggccagcagaagaggagtgtcccgggaggagattgagcgggaggtgtccatcctgcggcaggtgtag

SEQ ID NO: 149605 - DNA, 2223 bp, synthetic construct
  misc_feature 1..2223: note = Description of Artificial Sequence: Synthetic coding sequence
  source 1..2223: mol_type = other DNA
atggccacagccaacagcatcatcgtgctggatgatgatgatgaagatgaggccgccgcccagcccggccccagccaccccctgcccaatgctgccagccctggagctgaggcccccagcagcagcgagccccatggagcccggggcagcagcagcagcggcggcaagaagtgctacaagctggagaatgagaagctgtttgaggagttcctggagctgtgcaagatgcagacagctgaccaccctgaggtggtgcccttcctgtacaaccggcagcagagggcccacagcctcttcctggccagcgctgagttctgcaacatcctgagccgggtgctgagccgggcccggagcaggcctgccaagctgtatgtgtacatcaatgagctgtgcaccgtgctgaaggcccacagcgccaagaagaagctgaacctggccccagctgccaccaccagcaatgagcccagcggcaacaacccccccacccacctgagcctggaccccaccaatgctgagaacacagccagccagagccccaggacccggggcagccggcggcagatccagaggctggagcagctgctggccctgtatgtggccgagatccggcggctgcaggagaaggagctggacctgtctgagctggatgatcctgacagcgcctacctgcaggaggcccggctgaagaggaagctgatccggctgtttggccgcctgtgtgagctgaaggactgcagcagcctgaccggccgggtgattgagcagaggatcccctaccggggcacccgctacccagaggtgaacagaagaattgagcggctcatcaacaagccaggccctgacaccttcccagactatggagatgtgctgcgggctgtggagaaggctgctgcccggcacagcctgggcctgccccggcagcagctgcagctgatggcccaggatgccttcagagatgtgggcatccggctgcaggagaggaggcacctggacctgatctacaactttggctgccacctgacagatgactacagacctggggtggaccctgccctgagtgaccctgtgctggcccggcggctgagagaaaatagaagcctggccatgagccggctggatgaagtcatcagcaaatatgccatgctgcaggacaagtctgaggagggggagaggaagaagaggcgggcccggctgcagggcaccagcagccacagcgctgacaccccagaggccagcctggacagcggggagggccccagcggcatggccagccagggctgccccagcgccagcagagctgagacagatgatgaagatgatgaggagagtgatgaggaggaggaggaggaggaggaggaggaggaggaggaggccacagattctgaggaggaggaggacctggagcagatgcaggagggccaggaggatgatgaggaggaggatgaggaggaggaggccgccgccggcaaggatggagacaagagccccatgagcagcctgcagatcagcaatgagaagaacctggagcccgggaagcagatcagccgcagcagcggggagcagcagaacaagggcagaattgtgagccccagcctgctgtctgaggagcccctggcccccagcagcattgatgctgagagcaatggagagcagcctgaggagctgaccctggaggaggagagccctgtgtcccagctgtttgagctggagattgaggccctgcccctggacacccccagctctgtggagacagacatcagcagcagcaggaagcagagcgaggagcccttcaccaccgtgctggagaatggagctggcatggtgagcagcaccagcttcaacggcggcgtgagcccccacaactggggagacagcggccccccctgcaagaagagcaggaaggagaagaagcagacaggcagcggccccctgggcaacagctatgtggagcggcagaggtctgtgcatgagaagaatggcaagaagatctgcaccctgcccagcccccccagccccctggccagcctggcccctgtggccgacagcagcaccagggtggacagccccagccacggcctggtgaccagcagcctgtgcatccccagccctgcccggctgagccagaccccccacagccagccccccaggcctggcacctgcaagacctctgtggccacccagtgtgaccctgaggagatcatcgtgctgagtgacagcgactag

SEQ ID NO: 149606 - DNA, 2223 bp, synthetic construct; identical to SEQ ID NO: 149605
  misc_feature 1..2223: note = Description of Artificial Sequence: Synthetic coding sequence
  source 1..2223: mol_type = other DNA

SEQ ID NO: 149607 - DNA, 2223 bp, synthetic construct; identical to SEQ ID NO: 149605
  misc_feature 1..2223: note = Description of Artificial Sequence: Synthetic coding sequence
  source 1..2223: mol_type = other DNA

SEQ ID NO: 149608 - DNA, 2223 bp, synthetic construct; identical to SEQ ID NO: 149605
  misc_feature 1..2223: note = Description of Artificial Sequence: Synthetic coding sequence
  source 1..2223: mol_type = other DNA

SEQ ID NO: 149609 - DNA, 393 bp, synthetic construct
  misc_feature 1..393: note = Description of Artificial Sequence: Synthetic coding sequence
  source 1..393: mol_type = other DNA
atggccacagccaacagcatcatcgtgctggatgatgatgatgaagatgaggccgccgcccagcccggccccagccaccccctgcccaatgctgccagccctggagctgaggcccccagcagcagcgagccccatggagcccggggcagcagcagcagcggcggcaagaagtgctacaagctggagaatgagaagctgtttgaggagttcctggagctgtgcaagatgcagacagctgaccaccctgaggtggtgcccttcctgtacaaccggcagcagagggcccacagcctcttcctggccagcgctgagttctgcaacatcctgagccgggtgctgagccgggcccggagcaggcctgccaagctgtatgtgtacatcaatgagctgtag

SEQ ID NO: 149610 - DNA, 147 bp, synthetic construct
  misc_feature 1..147: note = Description of Artificial Sequence: Synthetic coding sequence
  source 1..147: mol_type = other DNA
atggccacagccaacagcatcatcgtgctggatgatgatgatgaagatgaggccgccgcccagcccggccccagccaccccctgcccaatgctgccagccctggagctgaggcccccagcagcagcgagccccatggagccaggtag

SEQ ID NO: 149611 - DNA, 393 bp, synthetic construct; identical to SEQ ID NO: 149609
  misc_feature 1..393: note = Description of Artificial Sequence: Synthetic coding sequence
  source 1..393: mol_type = other DNA

SEQ ID NO: 149612 - DNA, 147 bp, synthetic construct; identical to SEQ ID NO: 149610
  misc_feature 1..147: note = Description of Artificial Sequence: Synthetic coding sequence
  source 1..147: mol_type = other DNA

SEQ ID NO: 149613 - DNA, 537 bp, synthetic construct
  misc_feature 1..537: note = Description of Artificial Sequence: Synthetic coding sequence
  source 1..537: mol_type = other DNA
atggccacagccaacagcatcatcgtgctggatgatgatgatgaagatgaggccgccgcccagcccggccccagccaccccctgcccaatgctgccagccctggagctgaggcccccagcagcagcgagccccatggagcccggggcagcagcagcagcggcggcaagaagtgctacaagctggagaatgagaagctgtttgaggagttcctggagctgtgcaagatgcagacagctgaccaccctgaggtggtgcccttcctgtacaaccggcagcagagggcccacagcctcttcctggccagcgctgagttctgcaacatcctgagccgggtgctgagccgggcccggagcaggcctgccaagctgtatgtgtacatcaatgagctgtgcaccgtgctgaaggcccacagcgccaagaagaagctgaacctggccccagctgccaccaccagcaatgagcccagcggcaacaacccccccacccacctgagcctggaccccaccaatgctgagaacacagccagccagagctag

SEQ ID NO: 149614 - DNA, 537 bp, synthetic construct; identical to SEQ ID NO: 149613
  misc_feature 1..537: note = Description of Artificial Sequence: Synthetic coding sequence
  source 1..537: mol_type = other DNA

SEQ ID NO: 149615 - DNA, 2223 bp, synthetic construct; identical to SEQ ID NO: 149605
  misc_feature 1..2223: note = Description of Artificial Sequence: Synthetic coding sequence
  source 1..2223: mol_type = other DNA

SEQ ID NO: 149616 - DNA, 2223 bp, synthetic construct; identical to SEQ ID NO: 149605
  misc_feature 1..2223: note = Description of Artificial Sequence: Synthetic coding sequence
  source 1..2223: mol_type = other DNA

SEQ ID NO: 149617 - DNA, 393 bp, synthetic construct; identical to SEQ ID NO: 149609
  misc_feature 1..393: note = Description of Artificial Sequence: Synthetic coding sequence
  source 1..393: mol_type = other DNA

SEQ ID NO: 149618 - DNA, 537 bp, synthetic construct; identical to SEQ ID NO: 149613
  misc_feature 1..537: note = Description of Artificial Sequence: Synthetic coding sequence
  source 1..537: mol_type = other DNA

SEQ ID NO: 149619 - DNA, 2223 bp, synthetic construct; identical to SEQ ID NO: 149605
  misc_feature 1..2223: note = Description of Artificial Sequence: Synthetic coding sequence
  source 1..2223: mol_type = other DNA

SEQ ID NO: 149620 - DNA, 147 bp, synthetic construct; identical to SEQ ID NO: 149610
  misc_feature 1..147: note = Description of Artificial Sequence: Synthetic coding sequence
  source 1..147: mol_type = other DNA

SEQ ID NO: 149621 - DNA, 393 bp, synthetic construct; identical to SEQ ID NO: 149609
  misc_feature 1..393: note = Description of Artificial Sequence: Synthetic coding sequence
  source 1..393: mol_type = other DNA

SEQ ID NO: 149622 - DNA, 537 bp, synthetic construct; identical to SEQ ID NO: 149613
  misc_feature 1..537: note = Description of Artificial Sequence: Synthetic coding sequence
  source 1..537: mol_type = other DNA

SEQ ID NO: 149623 - DNA, 2223 bp, synthetic construct; identical to SEQ ID NO: 149605
  misc_feature 1..2223: note = Description of Artificial Sequence: Synthetic coding sequence
  source 1..2223: mol_type = other DNA

SEQ ID NO: 149624 - DNA, 147 bp, synthetic construct; identical to SEQ ID NO: 149610
  misc_feature 1..147: note = Description of Artificial Sequence: Synthetic coding sequence
  source 1..147: mol_type = other DNA

SEQ ID NO: 149625 - DNA, 1998 bp, synthetic construct
  misc_feature 1..1998: note = Description of Artificial Sequence: Synthetic coding sequence
  source 1..1998: mol_type = other DNA
atgcagacagctgaccaccctgaggtggtgcccttcctgtacaaccggcagcagagggcccacagcctcttcctggccagcgctgagttctgcaacatcctgagccgggtgctgagccgggcccggagcaggcctgccaagctgtatgtgtacatcaatgagctgtgcaccgtgctgaaggcccacagcgccaagaagaagctgaacctggccccagctgccaccaccagcaatgagcccagcggcaacaacccccccacccacctgagcctggaccccaccaatgcagaaaatacagccagccagagccccaggacccggggcagccggcggcagatccagaggctggagcagctgctggccctgtatgtggccgagatccggcggctgcaggagaaggagctggacctgtctgagctggatgatcctgattctgcctacctgcaggaggcccggctgaagaggaagctgatccggctgtttggccgcctgtgtgagctgaaggactgcagcagcctgaccggccgggtcatcgagcagaggatcccctaccggggcacccgctacccagaggtgaacagacgcatcgagcggctcatcaacaagccaggccctgacaccttcccagactatggagatgtgctgcgggctgtggagaaggccgccgcccggcacagcctgggcctgccccggcagcagctgcagctgatggcccaggatgccttcagagatgtgggcatccggctgcaggagcggcggcacctggacctgatctacaactttggctgccacctgacagatgactacagacctggggtggaccctgccctgagtgaccctgtgctggcccggcggctgcgggagaacagaagcctggccatgagccggctggatgaggtgatcagcaaatatgccatgctgcaggacaagtctgaggagggggagaggaagaagagaagagcccggctgcagggcaccagcagccacagcgctgacaccccagaggccagcctggacagcggggagggccccagcggcatggccagccagggctgccccagcgccagcagagctgagacagatgatgaagatgatgaggagagtgatgaggaggaggaggaggaggaggaggaggaggaggaggaggccacagacagcgaggaggaggaggacctggagcagatgcaggagggccaggaggatgatgaggaggaggatgaggaggaggaggccgctgctgggaaggatggagacaagagccccatgagcagcctgcagatcagcaatgagaagaacctggagcccgggaagcagatcagccgcagcagtggagagcagcagaacaagggccgcatcgtgagccccagcctgctgtctgaggagcccctggcccccagcagcattgatgctgagagcaatggagagcagcctgaggagctgaccctggaggaggagagccctgtgtcccagctgtttgagctggagattgaggccctgcccctggacacccccagctctgtggagacagacatcagcagcagcaggaagcagagcgaggagcccttcaccaccgtgctggagaatggagctggcatggtgagcagcaccagcttcaatggaggagtgagcccccacaactggggagacagcggccccccctgcaagaagagcaggaaggagaagaagcagacaggcagcggccccctgggcaacagctatgtggagcggcagaggtctgtgcatgagaagaatggcaagaagatctgcaccctgcccagcccccccagccccctggccagcctggcccctgtggccgacagcagcaccagggtggacagccccagccacggcctggtgaccagcagcctgtgcatccccagccctgcccggctgagccagaccccccacagccagcccccccggcccggcacctgcaagacctctgtggccacccagtgtgaccctgaggagatcatcgtgctgagtgacagcgactag

SEQ ID NO: 149626 - DNA, 1998 bp, synthetic construct; identical to SEQ ID NO: 149625
  misc_feature 1..1998: note = Description of Artificial Sequence: Synthetic coding sequence
  source 1..1998: mol_type = other DNA

SEQ ID NO: 149627 - DNA, 1998 bp, synthetic construct; identical to SEQ ID NO: 149625
  misc_feature 1..1998: note = Description of Artificial Sequence: Synthetic coding sequence
  source 1..1998: mol_type = other DNA

SEQ ID NO: 149628 - DNA, 1998 bp, synthetic construct; identical to SEQ ID NO: 149625
  misc_feature 1..1998: note = Description of Artificial Sequence: Synthetic coding sequence
  source 1..1998: mol_type = other DNA

SEQ ID NO: 149629 - DNA, 1080 bp, synthetic construct
  misc_feature 1..1080: note = Description of Artificial Sequence: Synthetic coding sequence
  source 1..1080: mol_type = other DNA
atgaaggccaccatcatcctgctgctgctggcccaggtgtcctgggccggccccttccagcagaggggcctgtttgacttcatgctggaggatgaggccagcggcatcggccctgaggtgcctgatgaccgggactttgagcccagcctgggccctgtgtgccccttccgctgccagtgccacctgcgggtggtgcagtgcagcgacctgggcctggacaaggtgcccaaggacctgcccccagacaccaccctgctggacctgcagaacaacaagatcacagagatcaaggatggagacttcaagaacctgaagaacctgcacgccctgatcctggtgaacaacaagatcagcaaggtgtcccctggggccttcacccccctggtgaagctggagcggctgtacctgagcaagaaccagctgaaggagctgcctgagaagatgcccaagaccctgcaggagctgcgggcccatgaaaatgagatcaccaaggtgaggaaggtgaccttcaacggcctgaaccagatgattgtgattgagctgggcaccaaccccctgaagagcagcggcattgaaaatggagccttccagggcatgaagaagctgagctacatcagaattgctgacaccaacatcaccagcatcccccagggcctgccccccagcctgacagagctgcacctggatggcaacaagatcagccgggtggatgctgccagcctgaagggcctgaacaacctggccaagctgggcctgtccttcaacagcatctctgctgtggacaatggcagcctggccaacaccccccacctgcgggagctgcacctggacaacaacaagctgaccagggtgcctgggggcctggccgagcacaagtacatccaggtggtgtacctgcacaacaacaacatctctgtggtgggcagcagtgacttctgccccccaggccacaacaccaagaaggccagctacagcggcgtgtccctcttcagcaaccctgtgcagtactgggagatccagcccagcaccttccgctgtgtgtatgtgcgcagcgccatccagctgggcaactacaagtag

SEQ ID NO: 149630 - DNA, 7092 bp, synthetic construct
  misc_feature 1..7092: note = Description of Artificial Sequence: Synthetic coding sequence
  source 1..7092: mol_type = other DNA
atgcctgtgctgggcgtggccagcaagctgcggcagcctgctgtgggcagcaagcctgtgcacacagccctgcccatccccaacctgggcaccaccggcagccagcactgcagcagccggcccctggagctgacagaaacagagagctccatgctgagctgccagctggccctgaagagcacctgtgaatttggagagaagaagcccctgcagggcaaggccaaggagaaggaggacagcaagatctacacagactgggccaaccactacctggccaagagcggccacaagaggctcatcaaggacctgcagcaggacattgctgatggagtgctgctggccgagatcatccagatcatcgccaatgagaaggtggaggacatcaatggctgccccaggagccagagccagatgattgaaaatgtggatgtgtgcctgtccttcctggccgcccggggcgtgaatgtgcagggcctgtctgctgaggagatcagaaatggaaacctgaaggccatcctgggcctcttcttcagcctgagccgctacaagcagcagcagcaccaccagcagcagtactaccagagcctggtggagctgcagcagagggtgacccacgccagcccccccagcgaggccagccaggccaagacccagcaggacatgcagagcagcctggccgcccgctatgccacccagagcaaccacagcggcatcgccaccagccagaagaagcccacccggctgcccggccccagccgggtgcctgctgctggcagcagcagcaaggtgcagggcgccagcaacctgaacagaagaagccagagcttcaacagcattgacaagaacaagccacccaactatgccaatggaaatgagaaggacagcagcaagggcccccagagcagcagtggagtgaatggaaatgtgcagccccccagcacagctggccagcccccagccagcgccatccccagccccagcgccagcaagccctggaggagcaagtccatgaatgtgaagcacagcgccaccagcaccatgctgactgtgaagcagagcagcacagccaccagccccacccccagcagtgaccggctgaagccccctgtgtctgaaggagtgaagacagcccccagcggccagaagtccatgctggagaagttcaagctggtgaatgccaggacagccctgcggcccccccagccccccagcagcggccccagtgatggcggcaaggatgatgatgccttcagcgagagcggggagatggagggcttcaacagcggcctgaacagcggcggcagcaccaacagcagccccaaggtgagccccaagctggccccacccaaggccggcagcaagaacctgagcaacaagaagagcctgctgcagcccaaggagaaggaggagaagaacagagacaagaacaaggtgtgcacagagaagcctgtgaaggaggagaaggaccaggtgacagagatggcccccaagaagaccagcaagatcgccagcctcatccccaagggcagcaagaccacagctgccaagaaggagagcctcatccccagcagcagcggcatccccaagccaggcagcaaggtgcccaccgtgaagcagaccatcagccctggcagcacagccagcaaggagagcgagaagttccgcaccaccaagggcagccccagccagagcctgagcaagcccatcaccatggagaaggccagcgccagcagctgcccagcccccctggagggccgggaggccggccaggccagccccagcggcagctgcaccatgacagtggcccagagcagcggccagagcactggaaatggagctgtgcagctgccccagcagcagcagcacagccaccccaacacagccaccgtggcccccttcatctaccgggcccacagtgaaaatgaaggaacagccctgcccagcgctgacagctgcaccagccccaccaagatggacctgagctacagcaagacagccaagcagtgcctggaggagatcagcggggaggaccctgagaccaggaggatgaggacagtgaagaacattgctgacctgcggcagaacctggaggagaccatgagcagcctgcggggcacccagatcagccacagcaccctggagaccacctttgacagcacagtgaccacagaggtgaatggccgcaccatccccaacctgaccagccggcccacccccatgacctggaggctgggccaggcctgcccccggctgcaggccggagatgcccccagcctgggcgccggctaccccaggagcggcaccagccgcttcatccacacagaccccagccgcttcatgtacaccacccccctgcggcgggctgctgtgtcccggctgggcaacatgagccagattgacatgtctgagaaggccagcagtgacctggacatgagcagcgaggtggatgtgggcggctacatgtctgatggagacatcctgggcaagagcctgaggacagatgacatcaacagcggctacatgacagatggcggcctgaacctgtacaccaggagcctgaaccgcatcccagacacagccaccagccgggacatcatccagaggggcgtgcatgatgtgacagtggatgctgacagctgggatgacagcagctctgtgagcagcggcctgagtgacaccctggacaacatcagcacagatgacctgaacaccaccagctctgtgagcagctacagcaacatcaccgtgcccagcaggaagaacacccagctgaggacagacagcgagaagaggagcaccacagatgagacctgggacagccctgaggagctgaagaagccagaagaagattttgacagccatggagatgctgggggcaagtggaagacagtgagcagcggcctgcctgaggaccctgagaaggccggccagaaggccagcctgtctgtgtcccagacaggctcctggaggcggggcatgtctgcccagggcggggcccccagccggcagaaggccggcaccagcgccctgaagaccccaggcaagacagatgatgccaaggccagcgagaagggcaaggcccccctgaagggcagcagcctgcagaggagccccagtgatgctgggaagagcagtggagatgagggcaagaagccacccagcggcatcggccgcagcacagccaccagcagctttggcttcaagaagcccagcggcgtgggcagcagcgccatgatcaccagcagcggggccaccatcaccagcggcagcgccaccctgggcaagatccccaagtctgctgccatcggcggcaagagcaatgccggcaggaagaccagcctggatggcagccagaaccaggatgatgtggtgctgcacgtgagcagcaagaccaccctgcagtaccgcagcctgccccggcccagcaagagcagcaccagcggcatccctggccggggcggccacaggagcagcaccagcagcattgacagcaatgtgagcagcaagtctgctggggccaccaccagcaagctgcgggagcccaccaagattggcagcggccgcagcagccctgtgacagtgaaccagacagacaaggagaaggagaaggtggccgtgtctgattctgagagcgtgtccctgagcggcagccccaagagcagccccaccagcgccagcgcctgtggggcccagggcctgcggcagcccggcagcaagtacccagacatcgccagccccaccttcagaagactctttggagccaaggccggcggcaagagcgccagcgcccccaacacagagggcgtgaagagcagctctgtgatgcccagccccagcaccaccctggcccggcagggcagcctggagagccccagcagcggcaccggctccatgggcagcgctgggggcctgagcggcagcagcagccccctcttcaacaagcccagcgacctgaccacagatgtgatcagcctgagccacagcctggccagcagccctgcctctgtgcacagcttcaccagcggcggcctggtgtgggccgccaacatgagcagcagcagcgctggcagcaaggacacccccagctaccagagcatgaccagcctgcacaccagcagcgagagcattgacctgcccctgagccaccacggcagcctgagcggcctgaccaccggcacccatgaggtgcagagcctgctgatgaggactggatctgtgcgcagcaccctgtctgagagcatgcagctggacaggaacaccctgcccaagaagggcctgcgctacacccccagcagccggcaggccaaccaggaggagggcaaggagtggctgcggagccacagcactggaggcctgcaggacaccggcaaccagagccccctggtgagccccagcgccatgagcagcagcgctgctgggaagtaccacttcagcaacctggtgagccccaccaacctgagccagttcaacctgcccggccccagcatgatgaggagcaacagcatcccagcccaggacagcagctttgacctgtatgatgacagccagctgtgtggcagcgccaccagcctggaggagcggccccgggccatcagccacagcggcagcttccgggacagcatggaggaggtgcacggcagcagcctgagcctggtgagcagcaccagcagcctgtacagcacagctgaggccggcggcagcctggagcagatccacaagctgcggcgggagctggtggccagccaggagaaggtggccaccctgaccagccagctgagcgccaatgcccacctggtggccgcctttgagaagagcctgggcaacatgacaggccgcctgcagagcctgaccatgacagctgagcagaaggagagcgagctgattgagctgcgggagaccatcgagatgctgaaggcccagaacagcgctgcccaggccgccatccagggcgccctgaatggaccagaccacccccccaaggacctgcgcatccggcggcagcacagcagcgagagcgtgagcagcatcaacagcgccaccagccacagcagcatcggcagcggaaatgatgctgacagcaagaagaagaagaagaagaactgggtgaacagccggggcagcgagctgcggagcagcttcaagcaggccttcggcaagaagaagagcaccaagccacccagcagccacagcgacatcgaggagctgacagacagcagcctgcctgccagccccaagctgccccacaatgctggggactgtggcagcgcctccatgaagcccagccagagcgccagcgccatctgtgaatgtacagaagctgaggccgagatcatcctgcagctgaagtctgagctgcgggagaaggagctgaagctgacagacatccggctggaggccctgagcagcgcccaccacctggaccagatccgggaggccatgaacaggatgcagaatgaaattgagatcctgaaggccgagaatgaccggctgaaggccgagaccggcaacacagccaagcccaccaggcctccttctgagagcagcagcagcaccagcagcagcagcagccggcagagcctgggcctgagcctgaacaacctgaacatcacagaggccgtgtccagtgacatcctgctggatgatgctggagatgccaccggccacaaggatggccgctctgtgaagatcatcgtgtccatcagcaagggctacggccgggccaaggaccagaagagccaggcctacctgattggcagcattggagtgtctgggaagaccaagtgggatgtgctggatggagtcatccggcggctcttcaaggagtatgtgttcagaattgacaccagcaccagcctgggcctgagcagtgactgcatcgccagctactgcatcggggacctgatccgcagccacaacctggaggtgcctgagctgctgccctgtggctacctggtgggggacaacaacatcatcaccgtgaacctgaagggcgtggaggagaacagcctggacagctttgtgtttgacaccctcatccccaagcccatcacccagcgctacttcaacctgctgatggagcaccaccgcatcatcctgagcggccccagcggcaccgggaagacctacctggccaacaagctggccgagtatgtgatcaccaagagcggcaggaagaagacagaagatgccatcgccaccttcaacgtggaccacaagagcagcaaggagctgcagcagtacctggccaacctggccgagcagtgcagcgctgacaacaatggagtggagctgcctgtggtgatcatcctggacaacctgcaccacgtgggcagcctgagtgacatcttcaacggcttcctgaactgcaagtacaacaagtgcccctacatcatcggcaccatgaaccagggcgtgagcagcagccccaacctggagctgcaccacaacttccgctgggtgctgtgtgccaaccacacagagcctgtgaagggcttcctgggccgctacctgcggaggaagctgattgaaattgaaattgaaagaaacatccggaacaatgacctggtgaagatcatcgactggatccccaagacctggcaccacctgaacagcttcctggagacccacagcagcagtgatgtgaccatcggccccaggctcttcctgccctgccccatggatgtggagggcagccgggtgtggttcatggacctgtggaactacagcctggtgccctacatcctggaggccgtgcgggagggcctgcagatgtatggcaagaggaccccctgggaggaccccagcaagtgggtgctggacacctacccctggagcagcgccaccctgccccaggagagccctgccctgctgcagctgcggccagaagatgtgggctatgagagctgcaccagcaccaaggaggccaccaccagcaagcacatcccccagacagacacagaaggagaccccctgatgaacatgctgatgaagctgcaggaggccgccaactacagcagcacccagagctgtgacagcgagagcaccagccaccacgaggacatcctggacagcagcctggagagcaccctgtag

SEQ ID NO: 149631 - DNA, 519 bp, synthetic construct
  misc_feature 1..519: note = Description of Artificial Sequence: Synthetic coding sequence
  source 1..519: mol_type = other DNA
atgaaggccaccatcatcctgctgctgctggcccaggtgtcctgggccggccccttccagcagaggggcctgtttgacttcatgctggaggatgaggccagcggcatcggccctgaggtgcctgatgaccgggactttgagcccagcctgggccctgtgtgccccttccgctgccagtgccacctgcgggtggtgcagtgcagcgacctgggcctggacaaggtgcccaaggacctgcccccagacaccaccctgctggacctgcagaacaacaagatcacagagatcaaggatggagacttcaagaacctgaagaacctgcacgtggtgtacctgcacaacaacaacatctctgtggtgggcagcagtgacttctgccccccaggccacaacaccaagaaggccagctacagcggcgtgtccctcttcagcaaccctgtgcagtactgggagatccagcccagcaccttccgctgtgtgtatgtgcgcagcgccatccagctgggcaactacaagtag

SEQ ID NO: 149632 - DNA, 1080 bp, synthetic construct; identical to SEQ ID NO: 149629
  misc_feature 1..1080: note = Description of Artificial Sequence: Synthetic coding sequence
  source 1..1080: mol_type = other DNA

SEQ ID NO: 149633 - DNA, 753 bp, synthetic construct
  misc_feature 1..753: note = Description of Artificial Sequence: Synthetic coding sequence
  source 1..753: mol_type = other DNA
atgaaggccaccatcatcctgctgctgctggcccaggtgtcctgggccggccccttccagcagaggggcctgtttgacttcatgctggaggatgaggccagcggcatcggccctgaggtgcctgatgaccgggactttgagcccagcctgggccctgtgtgccccttccgctgccagtgccacctgcgggtggtgcagtgcagcgacctggagctgggcaccaaccccctgaagagcagcggcattgaaaatggagccttccagggcatgaagaagctgagctacatcagaattgctgacaccaacatcaccagcatcccccagggcctgccccccagcctgacagagctgcacctggatggcaacaagatcagccgggtggatgctgccagcctgaagggcctgaacaacctggccaagctgggcctgtccttcaacagcatctctgctgtggacaatggcagcctggccaacaccccccacctgcgggagctgcacctggacaacaacaagctgaccagggtgcctgggggcctggccgagcacaagtacatccaggtggtgtacctgcacaacaacaacatctctgtggtgggcagcagtgacttctgccccccaggccacaacaccaagaaggccagctacagcggcgtgtccctcttcagcaaccctgtgcagtactgggagatccagcccagcaccttccgctgtgtgtatgtgcgcagcgccatccagctgggcaactacaagtag

SEQ ID NO: 149634 - DNA, 639 bp, synthetic construct
  misc_feature 1..639: note = Description of Artificial Sequence: Synthetic coding sequence
  source 1..639: mol_type = other DNA
atgaaggccaccatcatcctgctgctgctggcccaggtgtcctgggccggccccttccagcagaggggcctgtttgacttcatgctggaggatgaggccagcggcatcggccctgaggtgcctgatgaccgggactttgagcccagcctgggccctgtgtgccccttccgctgccagtgccacctgcgggtggtgcagtgcagcgacctgggcctgccccccagcctgacagagctgcacctggatggcaacaagatcagccgggtggatgctgccagcctgaagggcctgaacaacctggccaagctgggcctgtccttcaacagcatctctgctgtggacaatggcagcctggccaacaccccccacctgcgggagctgcacctggacaacaacaagctgaccagggtgcctgggggcctggccgagcacaagtacatccaggtggtgtacctgcacaacaacaacatctctgtggtgggcagcagtgacttctgccccccaggccacaacaccaagaaggccagctacagcggcgtgtccctcttcagcaaccctgtgcagtactgggagatccagcccagcaccttccgctgtgtgtatgtgcgcagcgccatccagctgggcaactacaagtag

SEQ ID NO: 149635 - DNA, 519 bp, synthetic construct; identical to SEQ ID NO: 149631
  misc_feature 1..519: note = Description of Artificial Sequence: Synthetic coding sequence
  source 1..519: mol_type = other DNA

SEQ ID NO: 149636 - DNA, 228 bp, synthetic construct
  misc_feature 1..228: note = Description of Artificial Sequence: Synthetic coding sequence
  source 1..228: mol_type = other DNA
atgaaggccaccatcatcctgctgctgctggcccaggtgtcctgggccggccccttccagcagaggggcctgtttgacttcatgctggaggatgaggccagcggcatcggccctgaggtgcctgatgaccgggactttgagcccagcctgggccctgtgtgccccttccgctgccagtgccacctgcgggtggtgcagtgcagcgacctgggctgcctgcccagctag

SEQ ID NO: 149637 - DNA, 639 bp, synthetic construct; identical to SEQ ID NO: 149634
  misc_feature 1..639: note = Description of Artificial Sequence: Synthetic coding sequence
  source 1..639: mol_type = other DNA

SEQ ID NO: 149638 - DNA, 540 bp, synthetic construct
  misc_feature 1..540: note = Description of Artificial Sequence: Synthetic coding sequence
  source 1..540: mol_type = other DNA
atgaaggccaccatcatcctgctgctgctggcccaggtgtcctgggccggccccttccagcagaggggcctgtttgacttcatgctggaggatgaggccagcggcatcggccctgaggtgcctgatgaccgggactttgagcccagcctgggccctgtgtgccccttccgctgccagtgccacctgcgggtggtgcagtgcagcgacctgggcctggacaaggtgcccaaggacctgcccccagacaccaccctgctggacctgcagaacaacaagatcacagagatcaaggatggagacttcaagaacctgaagaacctgcacgccctgatcctggtgaacaacaagatcagcaaggtgtcccctggggccttcacccccctggtgaagctggagcggctgtacctgagcaagaaccagctgaaggagctgcctgagaagatgcccaagaccctgcaggagctgcgggcccatgaaaatgagatcaccaaggtgaggaaggtgaccttcaacggcctgaaccagatgatcgtcatctag

SEQ ID NO: 149639 - DNA, 360 bp, synthetic construct
  misc_feature 1..360: note = Description of Artificial Sequence: Synthetic coding sequence
  source 1..360: mol_type = other DNA
atgaaggccaccatcatcctgctgctgctggcccaggtgtcctgggccggccccttccagcagaggggcctgtttgacttcatgctggaggatgaggccagcggcatcggccctgaggtgcctgatgaccgggactttgagcccagcctgggccctgtgtgccccttccgctgccagtgccacctgcgggtggtgcagtgcagcgacctgggcctggacaaggtgcccaaggacctgcccccagacaccaccctgctggacctgcagaacaacaagatcacagagatcaaggatggagacttcaagaacctgaagaacctgcacgccctgatcctggtgaacaacaagatcagcaagtag

SEQ ID NO: 149640 - DNA, 525 bp, synthetic construct
  misc_feature 1..525: note = Description of Artificial Sequence: Synthetic coding sequence
  source 1..525: mol_type = other DNA
atgaaggccaccatcatcctgctgctgctggcccaggtgtcctgggccggccccttccagcagaggggcctgtttgacttcatgctggaggatgaggccagcggcatcggccctgaggtgcctgatgaccgggactttgagcccagcctgggccctgtgtgccccttccgctgccagtgccacctgcgggtggtgcagtgcagcgacctgggcctggacaaggtgcccaaggacctgcccccagacaccaccctgctggacctgcagaacaacaagatcacagagatcaaggatggagacttcaagaacctgaagaacctgcacgccctgatcctggtgaacaacaagatcagcaaggtgtcccctggggccttcacccccctggtgaagctggagcggctgtacctgagcaagaaccagctgaaggagctgcctgagaagatgcccaagaccctgcaggagctgcgggcccatgaaaatgagatcaccaaggtgaggaaggtgaccttcaacggcctgaactag

SEQ ID NO: 149641 - DNA, 537 bp, synthetic construct
  misc_feature 1..537: note = Description of Artificial Sequence: Synthetic coding sequence
  source 1..537: mol_type = other DNA
atgaaggccaccatcatcctgctgctgctggcccaggtgtcctgggccggccccttccagcagaggggcctgtttgacttcatgctggaggatgaggccagcggcatcggccctgaggtgcctgatgaccgggactttgagcccagcctgggccctgtgtgccccttccgctgccagtgccacctgcgggtggtgcagtgcagcgacctgggcctggacaaggtgcccaaggacctgcccccagacaccaccctgctggacctgcagaacaacaagatcacagagatcaaggatggagacttcaagaacctgaagaacctgcacgccctgatcctggtgaacaacaagatcagcaaggtgtcccctggggccttcacccccctggtgaagctggagcggctgtacctgagcaagaaccagctgaaggagctgcctgagaagatgcccaagaccctgcaggagctgcgggcccatgaaaatgagatcaccaaggtgaggaaggtgaccttcaacggcctgaaccagatgattgtgtag

SEQ ID NO: 149642 - DNA, 1080 bp, synthetic construct; identical to SEQ ID NO: 149629
  misc_feature 1..1080: note = Description of Artificial Sequence: Synthetic coding sequence
  source 1..1080: mol_type = other DNA

SEQ ID NO: 149643 - DNA, 5598 bp, synthetic construct
  misc_feature 1..5598: note = Description of Artificial Sequence: Synthetic coding sequence
  source 1..5598: mol_type = other DNA
atgacccgctgggtgcccaccaagcgggaggagaagtatggagtggccttctacaactatgatgcccggggagcagatgagctgagcctgcagatcggggacacagtgcacatcctggagacctatgagggctggtaccggggctacaccctgaggaagaagagcaagaagggcatcttccctgccagctacatccacctgaaggaggccatcgtggagggcaagggccagcacgagaccgtcatccctggggacctgcccctcatccaggaggtgaccaccaccctgcgggagtggagcaccatctggaggcagctgtatgtgcaggacaaccgggagatgttccgctctgtgcgccacatgatctatgacctgattgagtggaggagccagatcctgagcggcaccctgccccaggatgagctgaaggagctgaagaagaaggtgacagccaagattgattatggcaaccgcatcctggacctggacctggtggtgagagatgaagatggcaacatcctggaccctgagctgaccagcaccatcagcctcttccgggcccacgagatcgccagcaagcaggtggaggagcggctgcaggaggagaagagccagaagcagaacatcgacatcaaccggcaggccaagtttgctgccacccccagcctggccctgtttgtgaacctgaagaatgtggtgtgcaagatcggggaggatgctgaggtgctgatgagcctgtatgaccctgtggagagcaagttcatcagcgagaactacctggtgcgctggagcagcagcggcctgcccaaggacatcgaccggctgcacaacctgcgggctgtgttcacagacctgggcagcaaggacctgaagcgggagaagatcagctttgtgtgccagatcgtgcgggtgggccgcatggagctgcgggacaacaacaccaggaagctgaccagcggcctgcggcggccctttggagtggccgtgatggatgtgacagacatcatcaatggcaaggtggatgatgaggacaagcagcacttcatccccttccagcctgtggccggagaaaatgacttcctgcagaccgtcatcaacaaggtgattgctgccaaggaggtgaaccacaagggccagggcctgtgggtgaccctgaagctgctgcccggggacatccaccagatcaggaaggagttcccccacctggtggacaggaccacagctgtggccaggaagacaggcttccctgagatcatcatgcctggagatgtgagaaatgacatctacgtgaccctggtgcagggcgactttgataaaggcagcaagaccacagccaagaatgtggaggtgacagtgtctgtgtatgatgaagatggcaagaggctggagcacgtgatcttccctggagctggagatgaggccatcagcgagtacaagagcgtcatctactaccaggtgaagcagccccgctggtttgagaccgtgaaggtggccatccccattgaagatgtgaacagaagccacctgcgcttcaccttccgccacaggagcagccaggacagcaaggacaagtctgagaagatctttgccctggcctttgtgaagctgatgagatatgatggcaccaccctgagagatggagaacatgacctgattgtgtacaaggccgaggccaagaagctggaggatgctgccacctacctgagcctgcccagcaccaaggccgagctggaggagaagggccacagcgccaccgggaagtccatgcagagcctgggcagctgcaccatcagcaaggacagcttccagatcagcaccctggtgtgcagcaccaagctgacccagaatgtggacctgctgggcctgctgaagtggaggagcaacaccagcctgctgcagcagaacctgcggcagctgatgaaggtggatggaggagaggtggtgaagttcctgcaggacaccctggatgccctcttcaacatcatgatggagaacagcgagagcgagacctttgacaccctggtgtttgatgccctggtgttcatcatcggcctgattgctgacaggaagttccagcacttcaaccctgtgctggagacctacatcaagaagcacttcagcgccaccctggcctacaccaagctgaccaaggtgctgaagaactacgtggatggagctgagaagccaggagtgaatgagcagctgtacaaggccatgaaggccctggagagcatcttcaagttcatcgtgcgcagccgcatcctcttcaaccagctgtatgaaaataaaggagaggccgactttgtggagagcctgctgcagctgttccgcagcatcaatgacatgatgagctccatgtctgaccagacagtgcgggtgaagggggccgccctgaagtacctgcccaccatcgtgaatgatgtgaagctggtgtttgaccccaaggagctgagcaagatgttcacagagttcatcctgaatgtgcccatgggcctgctgaccatccagaagctgtactgcctgattgagatcgtgcacagcgacctcttcacccagcacgactgccgggagatcctgctgcccatgatgacagaccagctgaagtaccacctggagcggcaggaggacctggaggcctgctgccagctgctgagccacatcctggaggtgctgtacaggaaggatgtgggccccacccagagacatgtgcagatcatcatggagaagctgctgaggacagtgaacagaactgtcatctccatgggccgggacagcgagctgattggcaactttgtggcctgcatgacagccatcctgcggcagatggaggactaccactacgcccacctgatcaagaccttcggcaagatgaggacagatgtggtggacttcctgatggagaccttcatcatgttcaagaacctgattggcaagaatgtgtacccctttgactgggtgatcatgaacatggtgcagaacaaggtgttcctgcgggccatcaaccagtatgctgacatgctgaacaagaagttcctggaccaggccaactttgagctgcagctgtggaacaactacttccacctggccgtggccttcctgacccaggagagcctgcagctggagaacttcagcagcgccaagagggccaagatcctgaacaagtatggagacatgaggcggcagatcggctttgagatccgggacatgtggtacaacctgggccagcacaagatcaagttcatccctgagatggtgggccccatcctggagatgaccctcatccctgagacagagctgaggaaggccaccatccccatcttctttgacatgatgcagtgtgagttccacagcaccaggagcttccagatgtttgaaaatgagatcatcaccaagctggaccacgaggtggagggcggcagaggagatgagcagtacaaggtgctgtttgacaagatcctgctggagcactgcaggaagcacaagtacctggccaagacaggagagacctttgtgaagctggtggtgcggctgatggagcggctgctggactaccgcaccatcatgcatgatgagaacaaggagaacaggatgagctgcaccgtgaatgtgctgaacttctacaaggagattgaaagagaggagatgtacatccgctacctgtacaagctgtgtgacctgcacaaggaatgtgacaactacacagaggccgcctacaccctgctgctgcacgccaagctgctgaagtggagcgaagatgtgtgtgtggcccacctgacccagagagatggctaccaggccaccacccagggccagctgaaggagcagctgtaccaggagatcatccactactttgacaagggcaagatgtgggaggaggccatcgccctgggcaaggagctggccgagcagtatgaaaatgagatgtttgattatgagcagctgtctgagctgctgaagaagcaggcccagttctatgagaacatcgtgaaggtgatccggcccaagccagactactttgctgtgggctactacggccagggcttccccaccttcctgcggggcaaggtgttcatctaccggggcaaggagtatgaaagaagagaggactttgaggcccggctgctgacccagttccccaatgctgagaagatgaagaccaccagccccccaggagatgacatcaagaacagccctggccagtacatccagtgcttcaccgtgaagcccaagctggacctgccccccaagttccacaggcctgtgtctgagcagatcgtgtccttctacagagtgaatgaggtgcagagatttgagtacagccggcccatcagaaaaggagagaagaacccagacaatgaatttgccaacatgtggattgaaagaaccatctacaccacagcctacaagctgcccggcatcctgcgctggtttgaggtgaagtctgtgttcatggtggagatcagccccctggagaatgccatcgagaccatgcagctgaccaatgacaagatcaacagcatggtgcagcagcacctggatgaccccagcctgcccatcaaccccctgtccatgctgctgaatggaattgtggaccctgctgtgatgggcggctttgccaactatgagaaggccttcttcacagaccgctacctgcaggagcaccctgaggcccacgagaagattgagaagctgaaggacctgattgcctggcagatccccttcctggccgagggcatccgcatccacggggacaaggtgacagaggccctgcggcccttccacgagaggatggaggcctgcttcaagcagctgaaggagaaggtggagaaggagtatggagtgcgcatcatgcccagcagcctggatgaccggcggggcagccggcccaggtccatggtgcgctccttcaccatgcccagcagcagccggcccctgtctgtggcctctgtgagcagcctgagcagtgacagcacccccagccggcccggcagtgatggctttgccctggagcccctgctgcccaagaagatgcacagccgcagccaggacaagctggacaaggatgacctggagaaggagaagaaggacaagaagaaggagaagaggaacagcaagcaccaggagatctttgagaaggagttcaagcccacagacatcagcctgcagcagagcgaggccgtcatcctgtctgagaccatcagccccctgcggccccagaggcccaagagccaggtgatgaatgtgattggcagcgagcggcgcttctctgtgagccccagcagccccagcagccagcagaccccacctcctgtgaccccccgggccaagctgtccttctccatgcagagcagcctggagctgaatggcatgactggagcagatgtggctgatgtgcccccacccctgcccctgaagggctctgtggccgactatggcaacctgatggagaaccaggacctgctgggcagccccaccccacctcctcctccaccccaccagaggcacctgcccccacccctgcccagcaagaccccacctcctcctccacccaagaccaccaggaagcaggcctctgtggacagcggcatcgtgcagtag

SEQ ID NO: 149644 - DNA, 6561 bp, synthetic construct
  misc_feature 1..6561: note = Description of Artificial Sequence: Synthetic coding sequence
  source 1..6561: mol_type = other DNA
atggccggggagaggacccggcgcttcaccaggagcctgctgcggcccggccaggccgctgagctgcggcacagcgctgccagcgctgctgctgtggccgtgagcagccggcagcagcagaggcaggagaagccccggctgctggagcccctggactatgaaacagtgattgaggagctggagaagacctacagaaatgaccccctgcaggacctgctcttcttccccagtgatgacttctctgctgccaccgtgtcctgggacatccgcaccctgtacagcacagtgcctgaagatgctgagcacaaggccgagaacctgctggtgaaggaggcctgcaagttctacagcagccagtggcacgtggtgaactacaagtatgagcagtacagcggggacatccggcagctgcccagggctgagtacaagccagagaagctgcccagccacagctttgaaattgaccatgaagatgctgacaaggatgaggacaccaccagccacagcagcagcaagggcggcggcggggccggcggcaccggggtcttcaagagcggctggctgtacaagggcaacttcaacagcacagtgaacaacacagtgacagtgcgctccttcaagaagcgctacttccagctgacccagctgcctgacaacagctacatcatgaacttctacaaggatgagaagatcagcaaggagcccaagggctgcatcttcctggacagctgcacaggagtggtgcagaacaaccggctgaggaaatatgcctttgagctgaagatgaatgacctgacctactttgtgctggccgctgagacagaaagtgacatggatgagtggatccacaccctgaaccgcatcctgcagatcagccctgagggccccctgcagggccgccgcagcacagagctgacagacctgggcctggacagcctggacaacagcgtgacctgtgagtgcaccccagaggagacagacagcagcgagaacaacctgcatgctgactttgccaagtacctgacagaaacagaagatactgtgaagaccaccaggaacatggagcggctgaacctcttcagcctggaccctgacatcgacaccctgaagctgcagaagaaggacctgctggagcctgagagcgtcatcaagccctttgaggagaaggccgccaagaggatcatgatcatctgcaaggccctgaacagcaacctgcagggctgtgtgacagaaaatgaaaatgaccccatcaccaacatcgagcccttctttgtgtctgtggccctgtatgacctgcgggacagcaggaagatctctgctgacttccacgtggacctgaaccacgccgctgtgcggcagatgctgctgggcgcctctgtggccctggagaatggaaatattgacaccatcaccccccggcagagcgaggagccccacatcaagggcctgcctgaggagtggctgaagttccccaagcaggccgtgttttctgtgagcaacccccacagcgagatcgtgctggtggccaagattgagaaggtgctgatgggcaacatcgccagcggggctgagccctacatcaagaacccagacagcaacaagtatgcccagaagatcctgaagagcaaccggcagttctgcagcaagctgggcaagtacaggatgccctttgcctgggccgtgcgctctgtgttcaaggacaaccagggcaatgtggaccgggacagccgcttcagccccctcttccggcaggagagcagcaagatcagcacagaggacctggtgaagctggtgtctgactaccgccgggctgaccgcatcagcaagatgcagaccatccctggcagcctggacattgctgtggacaacgtgcccctggagcaccccaactgtgtgaccagcagcttcatccctgtgaagcccttcaacatgatggcccagacagagcccaccgtggaggtggaggagtttgtgtatgacagcaccaagtactgccggccctacagagtgtacaagaaccagatctacatctaccccaagcacctgaagtatgacagccagaagtgcttcaacaaggccaggaacatcaccgtgtgcatcgagttcaagaacagtgatgaggagagcgccaagcccctgaagtgcatctacggcaagccaggcggccccctcttcaccagcgctgcctacacagctgtgctgcaccacagccagaacccagacttcagtgatgaggtgaagattgagctgcccacccagctgcacgagaagcaccacatcctcttctccttctaccacgtgacctgtgacatcaatgccaaggccaatgccaagaagaaggaggccctggagacctctgtgggctacgcctggctgcccctgatgaagcatgaccagatcgccagccaggagtacaacatccccatcgccaccagcctgccccccaactacctgtccttccaggacagcgccagcggcaagcacggcggcagtgacatcaagtgggtggatggcggcaagcccctcttcaaggtgtccacctttgtggtgtccacagtgaacacccaggacccccacgtgaatgccttcttccaggagtgccagaagcgggagaaggacatgagccagagccccaccagcaacttcatccgcagctgcaagaacctgctgaatgtggagaagatccacgccatcatgtccttcctgcccatcatcctgaaccagctgttcaaggtgctggtgcagaatgaggaggatgagatcaccaccaccgtgaccagggtgctgacagacatcgtggccaagtgccacgaggagcagctggaccacagcgtgcagagctacatcaagtttgtgttcaagacccgggcctgcaaggagaggacagtgcatgaggagctggccaagaatgtgacaggcctgctgaagagcaatgacagcaccaccgtgaagcacgtgctgaagcacagctggttcttctttgccatcatcctgaagtccatggcccagcacctgattgacaccaacaagatccagctgccccggccccagcgcttccctgagagctaccagaatgagctggacaacctggtgatggtgctgagtgaccacgtgatctggaagtacaaggatgccctggaggagacccggcgggccaaccacagcgtggcccgcttcctgaagcgctgcttcaccttcatggaccggggctacgtgttcaagatggtgaacaactacatctccatgttcagcagcggggacctgaagaccctgtgccagtacaagtttgacttcctgcaggaggtgtgccagcacgagcacttcatccccctgtgcctgcccatccgcagcgccaacatcccagaccccctgaccccatctgagagcacccaggagctgcacgccagtgacatgcctgagtacagcgtgaccaatgagttctgcaggaagcacttcctgattggcatcctgctgcgggaggtgggctttgccctgcaggaggaccaggatgtgcgccacctggccctggccgtgctgaagaacctgatggccaagcacagctttgatgaccgctaccgggagcccaggaagcaggcccagatcgccagcctgtacatgcccctgtatggcatgctgctggacaacatgccccgcatctacctgaaggacctgtaccccttcaccgtgaacaccagcaaccagggcagcagagatgacctgagcaccaatggaggcttccagagccagacagccatcaagcacgccaacagcgtggacaccagcttcagcaaggatgtgctgaacagcattgctgccttcagcagcatcgccatcagcacagtgaaccacgccgacagccgggccagcctggccagcctggacagcaaccccagcaccaatgagaagagcagcgagaagacagacaactgtgagaagatcccccggcccctgagcctcatcggcagcaccctgcgctttgacaagctggaccaggccgagaccaggagcctgctgatgtgcttcctgcacatcatgaagaccatctcctatgagaccctcatcgcctactggcagagggcccccagccctgaggtgtctgacttcttcagcatcctggatgtgtgcctgcagaacttccgctacctgggcaagaggaacatcatcaggaagattgctgctgccttcaagtttgtgcagagcacccagaacaacggcaccctgaagggcagcaaccccagctgccagaccagcggcctgctgagccagtggatgcacagcaccagcagccatgagggccacaagcagcacaggagccagaccctgcccatcatccggggcaagaatgccctgagcaaccccaagctgctgcagatgctggacaacaccatgaccagcaacagcaatgaaattgacatcgtgcaccacgtggacacagaggccaacatcgccacagaggtgtgcctgaccatcctggacctgctgagcctcttcacccagacccaccagaggcagctgcagcagtgtgactgccagaacagcctgatgaagagggtgtttgacacctacatgctgttcttccaggtgaaccagagcgccacagccctgaagcacgtgtttgccagcctgcggctgtttgtgtgcaagttccccagcgccttcttccagggccctgctgacctgtgtggcagcttctgctatgaggtgctgaagtgctgcaaccacaggagccgcagcacccagacagaggccagcgccctgctgtacttcttcatgaggaagaactttgagttcaacaagcagaagagcatcgtgcgcagccacctgcagctgatcaaggctgtgtcccagctgattgctgatgctggcattggaggcagccgcttccagcacagcctggccatcaccaacaactttgccaacggggacaagcagatgaagaacagcaacttccctgctgaggtgaaggacctgaccaagaggatcagaacagtgctgatggccacagcccagatgaaggagcacgagaaggaccctgagatgctggtggacctgcagtacagcctggccaacagctatgccagcaccccagagctgcggaggacctggctggagagcatggccaagatccacgccagaaatggagacctgtctgaggccgccatgtgctacatccacatcgccgccctgattgctgagtacctgaagaggaagggctactggaaggtggagaagatctgcacagccagcctgctgtctgaggacacccacccctgtgacagcaacagcctgctgaccacccccagcggcggctccatgttctccatgggctggccagccttcctgagcatcacccccaacatcaaggaggagggcgccatgaaggaggacagcggcatgcaggacaccccctacaatgaaaacatcctggtggagcagctgtacatgtgtgtggagttcctgtggaagtcagaaagatatgagctgattgctgatgtgaacaagcccatcatcgctgtgtttgagaagcagagggacttcaagaagctgagtgacctgtactatgacatccacaggagctacctgaaggtggccgaggtggtgaacagcgagaagaggctgtttggccgctactacagagtggccttctacggccagggcttctttgaggaggaggagggcaaggagtacatctacaaggagcccaagctgaccggcctgtctgagatcagccagaggctgctgaagctgtatgctgacaagtttggagctgacaacgtgaagatcatccaggacagcaacaaggtgaaccccaaggacctggaccccaagtatgcctacatccaggtgacctacgtgacccccttctttgaggagaaggagattgaggacaggaagacagactttgagatgcaccacaacatcaacagatttgtgtttgagacccccttcaccctgagcggcaagaagcacggcggcgtggccgagcagtgcaagaggaggaccatcctgaccaccagccacctgttcccctacgtgaagaagaggatccaggtgatcagccagagcagcacagagctgaaccccatcgaggtggccattgatgagatgagcaagaaggtgtctgagctgaaccagctgtgcaccatggaggaggtggacatgatccggctgcagctgaagctgcagggctctgtgtctgtgaaggtgaatgccggccccatggcctatgcccgggccttcctggaggagaccaatgccaagaagtacccagacaaccaggtgaagctgctgaaggagatcttccggcagtttgctgatgcctgtggccaggccctggatgtgaatgaaagactcatcaaggaggaccagctggagtaccaggaggagctgcggagccactacaaggacatgctgtctgagctgagcacagtgatgaatgagcagatcaccggcagagatgacctgagcaagaggggcgtggaccagacctgcaccagggtcatcagcaaggccaccccagccctgcccaccgtgtccatcagcagcagcgctgaggtgtag

SEQ ID NO: 149645 - DNA, 2103 bp, synthetic construct
  misc_feature 1..2103: note = Description of Artificial Sequence: Synthetic coding sequence
  source 1..2103: mol_type = other DNA
atgaccagcaacagcaatgaaattgacatcgtgcaccacgtggacacagaggccaacatcgccacagaggtgtgcctgaccatcctggacctgctgagcctcttcacccagacccaccagaggcagctgcagcagtgtgactgccagaacagcctgatgaagagggtgtttgacacctacatgctgttcttccaggtgaaccagagcgccacagccctgaagcacgtgtttgccagcctgcggctgtttgtgtgcaagttccccagcgccttcttccagggccctgctgacctgtgtggcagcttctgctatgaggtgctgaagtgctgcaaccacaggagccgcagcacccagacagaggccagcgccctgctgtacttcttcatgaggaagaactttgagttcaacaagcagaagagcatcgtgcgcagccacctgcagctgatcaaggctgtgtcccagctgattgctgatgctggcattggaggcagccgcttccagcacagcctggccatcaccaacaactttgccaacggggacaagcagatgaagaacagcaacttccctgctgaggtgaaggacctgaccaagaggatcagaacagtgctgatggccacagcccagatgaaggagcacgagaaggaccctgagatgctggtggacctgcagtacagcctggccaacagctatgccagcaccccagagctgcggaggacctggctggagagcatggccaagatccacgccagaaatggagacctgtctgaggccgccatgtgctacatccacatcgccgccctgattgctgagtacctgaagaggaagggcatgttctccatgggctggccagccttcctgagcatcacccccaacatcaaggaggagggcgccatgaaggaggacagcggcatgcaggacaccccctacaatgaaaacatcctggtggagcagctgtacatgtgtgtggagttcctgtggaagtcagaaagatatgagctgattgctgatgtgaacaagcccatcatcgctgtgtttgagaagcagagggacttcaagaagctgagtgacctgtactatgacatccacaggagctacctgaaggtggccgaggtggtgaacagcgagaagaggctgtttggccgctactacagagtggccttctacggccagggcgtgggcttctttgaggaggaggagggcaaggagtacatctacaaggagcccaagctgaccggcctgtctgagatcagccagaggctgctgaagctgtatgctgacaagtttggagctgacaacgtgaagatcatccaggacagcaacaaggtgaaccccaaggacctggaccccaagtatgcctacatccaggtgacctacgtgacccccttctttgaggagaaggagattgaggacaggaagacagactttgagatgcaccacaacatcaacagatttgtgtttgagacccccttcaccctgagcggcaagaagcatggaggagtggccgagcagtgcaagaggaggaccatcctgaccaccagccacctgttcccctacgtgaagaagaggatccaggtgatcagccagagcagcacagagctgaaccccatcgaggtggccattgatgagatgagcaagaaggtgtctgagctgaaccagctgtgcaccatggaggaggtggacatgatccggctgcagctgaagctgcagggctctgtgtctgtgaaggtgaatgccggccccatggcctatgcccgggccttcctggaggagaccaatgccaagaagtacccagacaaccaggtgaagctgctgaaggagatcttccggcagtttgctgatgcctgtggccaggccctggatgtgaatgaaagactcatcaaggaggaccagctggagtaccaggaggagctgcggagccactacaaggacatgctgtctgagctgagcacagtgatgaatgagcagctgtgccggggcccctgcctgtacagcttctgcagctctgtgagcagcatcagcctgagcacagtgtccaagagtgactatggccagggccggcctgtgaaggcccggagcggccccaacctgcacagcagcaactag

SEQ ID NO: 149646 - DNA, 6543 bp, synthetic construct
  misc_feature 1..6543: note = Description of Artificial Sequence: Synthetic coding sequence
  source 1..6543: mol_type = other DNA
atgtccttccggggcaaggtgttcaagcgggagcccagcgagttctggaagaagagaagaacagtgagaagagtgaaccaggaggagatccaccgcttcagcagccaggagaagccccggctgctggagcccctggactatgaaacagtgattgaggagctggagaagacctacagaaatgaccccctgcaggacctgctcttcttccccagtgatgacttctctgctgccaccgtgtcctgggacatccgcaccctgtacagcacagtgcctgaagatgctgagcacaaggccgagaacctgctggtgaaggaggcctgcaagttctacagcagccagtggcacgtggtgaactacaagtatgagcagtacagcggggacatccggcagctgcccagggctgagtacaagccagagaagctgcccagccacagctttgaaattgaccatgaagatgctgacaaggatgaggacaccaccagccacagcagcagcaagggcggcggcggggccggcggcaccggggtcttcaagagcggctggctgtacaagggcaacttcaacagcacagtgaacaacacagtgacagtgcgctccttcaagaagcgctacttccagctgacccagctgcctgacaacagctacatcatgaacttctacaaggatgagaagatcagcaaggagcccaagggctgcatcttcctggacagctgcacaggagtggtgcagaacaaccggctgaggaaatatgcctttgagctgaagatgaatgacctgacctactttgtgctggccgctgagacagaaagtgacatggatgagtggatccacaccctgaaccgcatcctgcagatcagccctgagggccccctgcagggccgccgcagcacagagctgacagacctgggcctggacagcctggacaacagcgtgacctgtgagtgcaccccagaggagacagacagcagcgagaacaacctgcatgctgactttgccaagtacctgacagaaacagaagatactgtgaagaccaccaggaacatggagcggctgaacctcttcagcctggaccctgacatcgacaccctgaagctgcagaagaaggacctgctggagcctgagagcgtcatcaagccctttgaggagaaggccgccaagaggatcatgatcatctgcaaggccctgaacagcaacctgcagggctgtgtgacagaaaatgaaaatgaccccatcaccaacatcgagcccttctttgtgtctgtggccctgtatgacctgcgggacagcaggaagatctctgctgacttccacgtggacctgaaccacgccgctgtgcggcagatgctgctgggcgcctctgtggccctggagaatggaaatattgacaccatcaccccccggcagagcgaggagccccacatcaagggcctgcctgaggagtggctgaagttccccaagcaggccgtgttttctgtgagcaacccccacagcgagatcgtgctggtggccaagattgagaaggtgctgatgggcaacatcgccagcggggctgagccctacatcaagaacccagacagcaacaagtatgcccagaagatcctgaagagcaaccggcagttctgcagcaagctgggcaagtacaggatgccctttgcctgggccgtgcgctctgtgttcaaggacaaccagggcaatgtggaccgggacagccgcttcagccccctcttccggcaggagagcagcaagatcagcacagaggacctggtgaagctggtgtctgactaccgccgggctgaccgcatcagcaagatgcagaccatccctggcagcctggacattgctgtggacaacgtgcccctggagcaccccaactgtgtgaccagcagcttcatccctgtgaagcccttcaacatgatggcccagacagagcccaccgtggaggtggaggagtttgtgtatgacagcaccaagtactgccggccctacagagtgtacaagaaccagatctacatctaccccaagcacctgaagtatgacagccagaagtgcttcaacaaggccaggaacatcaccgtgtgcatcgagttcaagaacagtgatgaggagagcgccaagcccctgaagtgcatctacggcaagccaggcggccccctcttcaccagcgctgcctacacagctgtgctgcaccacagccagaacccagacttcagtgatgaggtgaagattgagctgcccacccagctgcacgagaagcaccacatcctcttctccttctaccacgtgacctgtgacatcaatgccaaggccaatgccaagaagaaggaggccctggagacctctgtgggctacgcctggctgcccctgatgaagcatgaccagatcgccagccaggagtacaacatccccatcgccaccagcctgccccccaactacctgtccttccaggacagcgccagcggcaagcacggcggcagtgacatcaagtgggtggatggcggcaagcccctcttcaaggtgtccacctttgtggtgtccacagtgaacacccaggacccccacgtgaatgccttcttccaggagtgccagaagcgggagaaggacatgagccagagccccaccagcaacttcatccgcagctgcaagaacctgctgaatgtggagaagatccacgccatcatgtccttcctgcccatcatcctgaaccagctgttcaaggtgctggtgcagaatgaggaggatgagatcaccaccaccgtgaccagggtgctgacagacatcgtggccaagtgccacgaggagcagctggaccacagcgtgcagagctacatcaagtttgtgttcaagacccgggcctgcaaggagaggacagtgcatgaggagctggccaagaatgtgacaggcctgctgaagagcaatgacagcaccaccgtgaagcacgtgctgaagcacagctggttcttctttgccatcatcctgaagtccatggcccagcacctgattgacaccaacaagatccagctgccccggccccagcgcttccctgagagctaccagaatgagctggacaacctggtgatggtgctgagtgaccacgtgatctggaagtacaaggatgccctggaggagacccggcgggccaaccacagcgtggcccgcttcctgaagcgctgcttcaccttcatggaccggggctacgtgttcaagatggtgaacaactacatctccatgttcagcagcggggacctgaagaccctgtgccagtacaagtttgacttcctgcaggaggtgtgccagcacgagcacttcatccccctgtgcctgcccatccgcagcgccaacatcccagaccccctgaccccatctgagagcacccaggagctgcacgccagtgacatgcctgagtacagcgtgaccaatgagttctgcaggaagcacttcctgattggcatcctgctgcgggaggtgggctttgccctgcaggaggaccaggatgtgcgccacctggccctggccgtgctgaagaacctgatggccaagcacagctttgatgaccgctaccgggagcccaggaagcaggcccagatcgccagcctgtacatgcccctgtatggcatgctgctggacaacatgccccgcatctacctgaaggacctgtaccccttcaccgtgaacaccagcaaccagggcagcagagatgacctgagcaccaatggaggcttccagagccagacagccatcaagcacgccaacagcgtggacaccagcttcagcaaggatgtgctgaacagcattgctgccttcagcagcatcgccatcagcacagtgaaccacgccgacagccgggccagcctggccagcctggacagcaaccccagcaccaatgagaagagcagcgagaagacagacaactgtgagaagatcccccggcccctgagcctcatcggcagcaccctgcgctttgacaagctggaccaggccgagaccaggagcctgctgatgtgcttcctgcacatcatgaagaccatctcctatgagaccctcatcgcctactggcagagggcccccagccctgaggtgtctgacttcttcagcatcctggatgtgtgcctgcagaacttccgctacctgggcaagaggaacatcatcaggaagattgctgctgccttcaagtttgtgcagagcacccagaacaacggcaccctgaagggcagcaaccccagctgccagaccagcggcctgctgagccagtggatgcacagcaccagcagccatgagggccacaagcagcacaggagccagaccctgcccatcatccggggcaagaatgccctgagcaaccccaagctgctgcagatgctggacaacaccatgaccagcaacagcaatgaaattgacatcgtgcaccacgtggacacagaggccaacatcgccacagaggtgtgcctgaccatcctggacctgctgagcctcttcacccagacccaccagaggcagctgcagcagtgtgactgccagaacagcctgatgaagagggtgtttgacacctacatgctgttcttccaggtgaaccagagcgccacagccctgaagcacgtgtttgccagcctgcggctgtttgtgtgcaagttccccagcgccttcttccagggccctgctgacctgtgtggcagcttctgctatgaggtgctgaagtgctgcaaccacaggagccgcagcacccagacagaggccagcgccctgctgtacttcttcatgaggaagaactttgagttcaacaagcagaagagcatcgtgcgcagccacctgcagctgatcaaggctgtgtcccagctgattgctgatgctggcattggaggcagccgcttccagcacagcctggccatcaccaacaactttgccaacggggacaagcagatgaagaacagcaacttccctgctgaggtgaaggacctgaccaagaggatcagaacagtgctgatggccacagcccagatgaaggagcacgagaaggaccctgagatgctggtggacctgcagtacagcctggccaacagctatgccagcaccccagagctgcggaggacctggctggagagcatggccaagatccacgccagaaatggagacctgtctgaggccgccatgtgctacatccacatcgccgccctgattgctgagtacctgaagaggaagggctactggaaggtggagaagatctgcacagccagcctgctgtctgaggacacccacccctgtgacagcaacagcctgctgaccacccccagcggcggctccatgttctccatgggctggccagccttcctgagcatcacccccaacatcaaggaggagggcgccatgaaggaggacagcggcatgcaggacaccccctacaatgaaaacatcctggtggagcagctgtacatgtgtgtggagttcctgtggaagtcagaaagatatgagctgattgctgatgtgaacaagcccatcatcgctgtgtttgagaagcagagggacttcaagaagctgagtgacctgtactatgacatccacaggagctacctgaaggtggccgaggtggtgaacagcgagaagaggctgtttggccgctactacagagtggccttctacggccagggcttctttgaggaggaggagggcaaggagtacatctacaaggagcccaagctgaccggcctgtctgagatcagccagaggctgctgaagctgtatgctgacaagtttggagctgacaacgtgaagatcatccaggacagcaacaaggtgaaccccaaggacctggaccccaagtatgcctacatccaggtgacctacgtgacccccttctttgaggagaaggagattgaggacaggaagacagactttgagatgcaccacaacatcaacagatttgtgtttgagacccccttcaccctgagcggcaagaagcacggcggcgtggccgagcagtgcaagaggaggaccatcctgaccaccagccacctgttcccctacgtgaagaagaggatccaggtgatcagccagagcagcacagagctgaaccccatcgaggtggccattgatgagatgagcaagaaggtgtctgagctgaaccagctgtgcaccatggaggaggtggacatgatccggctgcagctgaagctgcagggctctgtgtctgtgaaggtgaatgccggccccatggcctatgcccgggccttcctggaggagaccaatgccaagaagtacccagacaaccaggtgaagctgctgaaggagatcttccggcagtttgctgatgcctgtggccaggccctggatgtgaatgaaagactcatcaaggaggaccagctggagtaccaggaggagctgcggagccactacaaggacatgctgtctgagctgagcacagtgatgaatgagcagatcaccggcagagatgacctgagcaagaggggcgtggaccagacctgcaccagggtcatcagcaaggccaccccagccctgcccaccgtgtccatcagcagcagcgctgaggtgtag

SEQ ID NO: 149647 - DNA, 5493 bp, synthetic construct
  misc_feature 1..5493: note = Description of Artificial Sequence: Synthetic coding sequence
  source 1..5493: mol_type = other DNA
atggccccctggaggaaggctgacaaggagagacatggagtggccatctacaacttccagggcagcggggccccccagctgagcctgcagattggagatgtggtgcgcatccaggagacctgtggggactggtaccggggctacctgatcaagcacaagatgctgcagggcatcttccccaagagcttcatccacatcaaggaggtgacagtggagaagagaagaaacacagagaacatcatcccagctgagatccccctggcccaggaggtgaccaccaccctgtgggagtggggcagcatctggaagcagctgtatgtggccagcaagaaggagcgcttcctgcaggtgcagagcatgatgtatgacctgatggagtggaggagccagctgctgagcggcaccctgcccaaggatgagctgaaggagctgaagcagaaggtgaccagcaagattgattatggcaacaagatcctggagctggacctgattgtgagagatgaagatggcaacatcctggaccctgacaacaccagcgtcatcagcctcttccacgcccacgaggaggccacagacaagatcacagagcgcatcaaggaggagatgagcaaggaccagcctgactatgccatgtacagccgcatcagcagcagccccacccacagcctgtatgtgtttgtgaggaactttgtgtgccgcatcggggaggatgctgagctgttcatgagcctgtatgaccccaacaagcagaccgtcatcagcgagaactacctggtgcgctggggcagccggggcttccccaaggagattgagatgctgaacaacctgaaggtggtgttcacagacctgggcaacaaggacctgaacagagacaagatctacctgatctgccagatcgtgcgggtgggcaagatggacctgaaggacaccggggccaagaagtgcacccagggcctgcggcggccctttggagtggccgtgatggacatcacagacatcatcaagggcaaggccgagagtgatgaggagaagcagcacttcatccccttccaccctgtgacagcagaaaatgacttcctgcacagcctgctgggcaaggtgattgccagcaaaggagacagcggcggccagggcctgtgggtgaccatgaagatgctggtgggggacatcatccagatcaggaaggactacccccacctggtggacaggaccaccgtggtggccaggaagctgggcttccctgagatcatcatgcctggagatgtgagaaatgacatctacatcaccctgctgcagggcgactttgacaagtacaacaagaccacccagagaaatgtggaggtgatcatgtgtgtgtgtgctgaagatggcaagaccctgcccaatgccatctgtgtgggcgctggggacaagcccatgaatgagtacagatctgtggtgtactaccaggtgaagcagccccgctggatggagaccgtgaaggtggccgtgcccatcgaggacatgcagaggatccacctgcgcttcatgttccgccacaggagcagcctggagagcaaggacaagggggagaagaactttgccatgtcctatgtgaagctgatgaaggaggatggcaccaccctgcatgatggcttccatgacctggtggtgctgaagggggacagcaagaagatggaggatgccagcgcctacctgaccctgcccagctaccgccaccacgtggagaacaagggggccaccctgagccgcagcagcagctctgtgggcggcctgtctgtgagcagcagagatgtgttcagcatcagcaccctggtgtgcagcaccaagctgacccagaatgtgggcctgctgggcctgctgaagtggaggatgaagccccagctgctgcaggagaacctggagaagctgaagatcgtggatggagaggaggtggtgaagttcctgcaggacaccctggatgccctcttcaacatcatgatggagcacagccagagtgatgaatatgacatcctggtgtttgatgccctgatctacatcatcggcctgattgctgacaggaagttccagcacttcaacacagtgctggaggcctacatccagcagcacttcagcgccaccctggcctacaagaagctgatgacagtgctgaagacctacctggacaccagcagcagaggagagcagtgtgagcccatcctgcggaccctgaaggccctggagtatgtgttcaagttcatcgtgcgcagcaggaccctcttcagccagctgtatgagggcaaggagcagatggagtttgaggagagcatgagaagactctttgagagcatcaacaacctgatgaagagccagtacaagaccaccatcctgctgcaggtggccgccctgaagtacatccccagcgtgctgcatgatgtggagatggtgtttgatgccaagctgctgagccagctgctgtatgagttctacacctgcatcccccctgtgaagctgcagaagcagaaggtgcagagcatgaatgagatcgtgcagagcaacctcttcaagaagcaggagtgccgggacatcctgctgcctgtgatcaccaaggagctgaaggagctgctggagcagaaggatgacatgcagcaccaggtgctggagaggaagtactgtgtggagctgctgaacagcatcctggaggtgctgagctaccaggatgctgccttcacctaccaccacatccaggagatcatggtgcagctgctgaggacagtgaacagaactgtcatcaccatgggccgggaccacatcctgatcagccactttgtggcctgcatgacagccatcctgaaccagatgggagaccagcactacagcttctacatcgagaccttccagaccagcagcgagctggtggacttcctgatggagaccttcatcatgttcaaggacctgattggcaagaatgtgtacccaggggactggatggccatgtccatggtgcagaacagagtcttcctgcgggccatcaacaagtttgctgagaccatgaaccagaagttcctggagcacaccaactttgagttccagctgtggaacaactacttccacctggccgtggccttcatcacccaggacagcctgcagctggagcagttcagccacgccaagtacaacaagatcctgaacaagtatggagacatgagaagactcatcggcttcagcatccgggacatgtggtacaagctgggccagaacaagatctgcttcatccctggcatggtgggccccatcctggagatgaccctcatccctgaggccgagctgaggaaggccaccatccccatcttctttgacatgatgctgtgtgagtaccagaggtctggggacttcaagaagtttgaaaatgagatcatcctgaagctggaccacgaggtggagggcggcagaggagatgagcagtacatgcagctgctggagagcatcctgatggagtgtgccgctgagcaccccaccatcgccaagtctgtggagaactttgtgaacctggtgaagggcctgctggagaagctgctggactaccggggcgtgatgacagatgagagcaaggacaacaggatgagctgcaccgtgaacctgctgaacttctacaaggacaacaaccgggaggagatgtacatccgctacctgtacaagctgcgggacctgcacctggactgtgacaactacacagaggccgcctacaccctgctgctgcacacctggctgctgaagtggagcgatgagcagtgtgccagccaggtgatgcagacaggccagcagcacccccagacccaccggcagctgaaggagaccctgtatgagaccatcatcggctactttgacaagggcaagatgtgggaggaggccatcagcctgtgcaaggagctggccgagcagtatgagatggagatctttgattatgagctgctgagccagaacctgatccagcaggccaagttctatgagagcatcatgaagatcctgcggcccaagccagactactttgctgtgggctactacggccagggcttccccagcttcctgaggaacaaggtgttcatctaccggggcaaggagtatgaaagaagagaggacttccagatgcagctgatgacccagttccccaatgctgagaagatgaacaccaccagcgcccctggagatgatgtgaagaatgcccctggccagtacatccagtgcttcaccgtgcagcctgtgctggatgagcacccccgcttcaagaacaagcctgtgcctgaccagatcatcaacttctacaagagcaactacgtgcagcgcttccactacagcaggcctgtgagaagaggcaccgtggaccctgaaaatgaatttgcctccatgtggattgaaagaaccagctttgtgacagcctacaagctgcccggcatcctgcgctggtttgaggtggtgcacatgagccagaccaccatcagccccctggagaatgccatcgagaccatgagcacagccaatgagaagatcctgatgatgatcaaccagtaccagagtgatgagaccctgcccatcaaccccctgtccatgctgctgaatggcatcgtggaccctgctgtgatgggcggctttgccaagtatgagaaggccttcttcacagaggagtatgtgcgggaccaccctgaggaccaggacaagctgacccacctgaaggacctgattgcctggcagatccccttcctgggcgccggcatcaagatccacgagaagagggtgtctgacaacctgcggcccttccatgacaggatggaggagtgcttcaagaacctgaagatgaaggtggagaaggagtatggagtgcgggagatgccagactttgatgaccggcgggtgggccggcccaggtccatgctgcggagctaccggcagatgagcatcatcagcctggcctccatgaacagcgactgcagcacccccagcaagcccaccagcgagagctttgacctggagctggccagccccaagaccccccgggtggagcaggaggagcccatcagccctggcagcaccctgcctgaggtgaagctgcggcgcagcaagaagaggaccaagaggagctctgtggtgtttgctgatgagaaggctgctgctgagagtgacctgaagaggctgagcaggaagcatgagttcatgtctgacaccaacctgtctgagcacgccgccatccccctgaaggcctctgtgctgagccagatgagctttgccagccagagcatgcccaccatcccagccctggccctgtctgtggccggcatccctggcctggatgaggccaacaccagcccccggctgagccagaccttcctgcagctgagtgatggagacaagaagaccctgaccaggaagaaggtgaaccagttcttcaagaccatgctggccagcaagtctgctgaggagggcaagcagatcccagacagcctgagcacagacctgtag

SEQ ID NO: 149648 - DNA, 1011 bp, synthetic construct
  misc_feature 1..1011: note = Description of Artificial Sequence: Synthetic coding sequence
  source 1..1011: mol_type = other DNA
atgtgtgtgtgtgccgaggatggcaagaccctgcctgtggccgtgcccatcgaggacatgcagaggatccacctgcgcttcatgttccgccacaggagcagcctggagagcaaggacaagggggagaagaactttgccatgtcctatgtgaagctgatgaaggaggatggcaccaccctgcatgatggcttccatgacctggtggtgctgaagggggacagcaagaagatggaggatgccagcgcctacctgaccctgcccagctaccgccaccacgtggagaacaagggggccaccctgagccgcagcagcagctctgtgggcggcctgtctgtgagcagcagagatgtgttcagcatcagcaccctggtgtgcagcaccaagctgacccagaatgtgggcctgctgggcctgctgaagtggaggatgaagccccagctggaggagagcatgaggcggctgtttgagagcatcaacaacctgatgaagagccagtacaagaccaccatcctgctgcaggtggccgccctgaagtacatccccagcgtgctgcatgatgtggagatggtgtttgatgccaagctgctgagccagctgctgtatgagttctacacctgcatcccccctgtgaagctgcagaagcagaaggtgcagagcatgaatgaaattgtgcagagcaacctcttcaagaagcaggagtgccgggacatcctgctgcccgtcatcaccaaggagctgaaggagctgctggagcagaaggatgacatgcagcaccaggtgctggagaggaagtactgtgtggagctgctgaacagcatcctggaggtgctgagctaccaggatgctgccttcacctaccaccacatccaggagatcatggtgcagctgctgaggacagtgaacagaactgtcatcaccatgggccgggaccacatcctgattggagcctgctgcaactgtggcttccccagcagcaccccccacagcctcatccagtggctgtggggctag

SEQ ID NO: 149649 - DNA, 2676 bp, synthetic construct
  misc_feature 1..2676: note = Description of Artificial Sequence: Synthetic coding sequence
  source 1..2676: mol_type = other DNA
atgacagccatcctgaaccagatgggagaccagcactacagcttctacatcgagaccttccagaccagcagcgagctggtggacttcctgatggagaccttcatcatgttcaaggacctgattggcaagaatgtgtacccaggggactggatggccatgtccatggtgcagaacagagtcttcctgcgggccatcaacaagtttgctgagaccatgaaccagaagttcctggagcacaccaactttgagttccagctgtggaacaactacttccacctggccgtggccttcatcacccaggacagcctgcagctggagcagttcagccacgccaagtacaacaagatcctgaacaagtacggggacatgaggcggctgattggcttcagcatccgggacatgtggtacaagctgggccagaacaagatctgcttcatccctggcatggtgggccccatcctggagatgaccctcatccctgaggccgagctgaggaaggccaccatccccatcttctttgacatgatgctgtgtgagtaccagaggtctggggacttcaagaagtttgaaaatgagatcatcctgaagctggaccacgaggtggagggcggcagaggagatgagcagtacatgcagctgctggagagcatcctgatggagtgtgccgctgagcaccccaccatcgccaagtctgtggagaactttgtgaacctggtgaagggcctgctggagaagctgctggactacagaggagtgatgacagatgagagcaaggacaacaggatgagctgcaccgtgaacctgctgaacttctacaaggacaacaaccgggaggagatgtacatccgctacctgtacaagctgcgggacctgcacctggactgtgacaactacacagaagctgcctacaccctgctgctgcacacctggctgctgaagtggagcgatgagcagtgtgccagccaggtgatgcagacaggccagcagcacccccagacccaccggcagctgaaggagaccctgtatgagaccatcatcggctactttgataaaggcaagatgtgggaggaggccatcagcctgtgcaaggagctggccgagcagtatgagatggagatctttgattatgagctgctgagccagaacctgatccagcaggccaagttctatgagagcatcatgaagatcctgcggcccaagccagactactttgctgtgggctactacggccagggcttccccagcttcctgaggaacaaggtgttcatctaccggggcaaggagtatgaaagaagagaggacttccagatgcagctgatgacccagttccccaatgctgagaagatgaacaccaccagcgcccctggagatgatgtgaagaatgcccctggccagtacatccagtgcttcaccgtgcagcctgtgctggatgagcacccccgcttcaagaacaagcctgtgcctgaccagatcatcaacttctacaagagcaactacgtgcagcgcttccactacagcaggcctgtgcggcggggcaccgtggaccctgaaaatgaatttgcctccatgtggattgaaagaaccagctttgtgacagcctacaagctgcccggcatcctgcgctggtttgaggtggtgcacatgagccagaccaccatcagccccctggagaatgccatcgagaccatgagcacagccaatgagaagatcctgatgatgatcaaccagtaccagagtgatgagaccctgcccatcaaccccctgtccatgctgctgaatggaattgtggaccctgctgtgatgggcggctttgccaagtatgagaaggccttcttcacagaggagtatgtgcgggaccaccctgaggaccaggacaagctgacccacctgaaggacctgattgcctggcagatccccttcctgggcgccggcatcaagatccacgagaagagggtgtctgacaacctgcggcccttccatgacaggatggaggagtgcttcaagaacctgaagatgaaggtggagaaggagtatggagtgcgggagatgccagactttgatgacagaagagtgggccggcccaggtccatgctgcggagctaccggcagatgagcatcatcagcctggcctccatgaacagcgactgcagcacccccagcaagcccaccagcgagagctttgacctggagctggccagccccaagaccccccgggtggagcaggaggagcccatcagccctggcagcaccctgcctgaggtgaagctgcggcgcagcaagaagaggaccaagaggagctctgtggtgtttgctgatgagaaggctgctgctgagagtgacctgaagaggctgagcaggaagcatgagttcatgtctgacaccaacctgtctgaacatgctgccatccccctgaaggcctctgtgctgagccagatgagctttgccagccagagcatgcccaccatcccagccctggccctgtctgtggccggcatccctggcctggatgaggccaacaccagcccccggctgagccagaccttcctgcagctgagtgatggagacaagaagaccctgaccaggaagaaggtgaaccagttcttcaagaccatgctggccagcaagtctgctgaggagggcaagcagatcccagacagcctgagcacagacctgtag

SEQ ID NO: 149650 - DNA, 6093 bp, synthetic construct
  misc_feature 1..6093: note = Description of Artificial Sequence: Synthetic coding sequence
  source 1..6093: mol_type = other DNA
atgtggacccccacagaggaggagaagtatggagtggtgatctgcagcttccggggctctgtgccccagggcctggtgctggagattggagagaccgtgcagatcctggagaagtgtgagggctggtacagaggagtgtccaccaagaagcccaacgtgaagggcatcttccctgccaactacatccacctgaagaaggccatcgtgagcaacagaggccagtatgaaacagtggtgcccctggaggacagcatcgtgacagaggtgacagccaccctgcaggagtgggccagcctgtggaagcagctgtatgtgaagcacaaggtggacctcttctacaagctgcggcacgtgatgaatgagctgattgacctgcggcggcagctgctgagcggccacctgacccaggaccaggtgcgggaggtgaagaggcacatcaccgtgcggctggactggggcaatgagcacctgggcctggacctggtgcccaggaaggactttgaggtggtggacagcgaccagatctctgtgtctgacctgtacaagatgcacctgagcagccggcagagcgtgcagcagagcaccagccaggtggacaccatgaggcccaggcatggagagacctgcaggatgcctgtgccccaccacttcttcctgagcctgaagagcttcacctacaacaccatcggggaggacacagatgtgttcttcagcctgtatgacatgagggagggcaagcagatcagcgagcgcttcctggtgcggctgaacaagaatggaggccccagaaatcctgagaagattgaaagaatgtgtgccctcttcacagacctgagcagcaaggacatgaagagggacctgtacatcgtggcccacgtgatccgcatcggccgcatgctgctgaatgacagcaagaagggccccccccacctgcactaccgccggccctacggctgtgctgtgctgagcatcctggatgtgctgcagagcctgacagaggtgaaggaggagaaggactttgtgctgaaggtgtacacctgcaacaatgaaagtgagtggagccagatccacgagaacatcatcaggaagagcagcgccaagtacagcgcccccagcgccagccacggcctcatcatcagcctgcagctgctgcggggggacatggagcagatccggcgggagaaccccatgatcttcaacagaggcctggccatcaccaggaagctgggcttcccagatgtgatcatgcctggggacatcagaaatgacctgtacctgaccctggagaagggggactttgagcggggcggcaagtctgtgcagaagaacatcgaggtgaccatgtatgtgctgtatgcagatggagagatcctgaaggactgcatcagcctgggcagcggggagcccaacagaagcagctaccacagctttgtgctgtaccacagcaacagcccccgctggggcgagatcatcaagctgcccatccccatcgaccgcttccggggcagccacctgcgctttgagttccgccactgcagcaccaaggacaagggggagaagaagctgtttggatttgccttcagcaccctgatgagagatgatggcaccaccctgagtgatgacatccacgagctgtatgtgtacaagtgtgatgagaacagcaccttcaacaaccacgccctgtacctgggcctgccctgctgcaaggaggactacaacggctgccccaacatccccagcagcctcatcttccagaggagcaccaaggagagcttcttcatcagcacccagctgagcagcaccaagctgacccagaatgtggacctgctggccctgctgaagtggaaggccttcccagaccgcatcatggatgtgctgggccgcctgcggcacgtgtctggagaggagatcgtgaagttcctgcaggacatcctggacaccctgtttgtgatcctggatgacaacacagagaagtatggcctgctggtgttccagagcctggtgttcatcatcaacctgctgcgggacatcaagtacttccacttccggcctgtgatggacacctacatccagaagcactttgctggggccctggcctacaaggagctgatccgctgcctgaagtggtacatggactgcagcgctgagctgatccggcaggaccacatccaggaggccatgagggccctggagtacctgttcaagttcatcgtgcagagccgcatcctgtacagccgggccacctgtggcatggaggaggagcagttccgcagcagcatccaggagctgttccagagcatccgctttgtgctgagcctggacagcaggaacagcgagaccctgctcttcacccaggccgccctgctgaacagcttccccaccatctttgatgagctgctgcagatgttcaccgtgcaggaggtggccgagtttgtgcggggcaccctgggctccatgcccagcacagtgcacatcggccagagcatggatgtggtgaagctgcagagcatcgccaggacagtggacagccgcctcttctccttcagcgagagccgccgcatcctgctgcctgtggtgctgcaccacatccacctgcacctgcggcagcagaaggagctgctgatctgcagcggcatcctgggcagcatcttcagcatcgtgaagaccagcagcctggaggctgatgtgatggaggaggtggagatgatggtggagagcctgctggatgtgctgctgcagaccctgctgaccatcatgagcaagagccacgcccaggaggccgtgcggggccagcgctgcccccagtgcacagctgagatcactggagaatatgtgtcctgcctgctgagcctgctgcggcagatgtgtgacacccacttccagcacctgctggacaacttccagagcaaggatgagctgaaggagttcctgctgaagatcttctgtgtgttcaggaacctgatgaagatgtctgtgttcccccgggactggatggtgatgaggctgctgaccagcaacatcatcgtgaccaccgtgcagtacctgagcagcgccctgcacaagaacttcacagaaacagactttgacttcaaggtgtggaacagctacttcagcctggccgtgctcttcatcaaccagcccagcctgcagctggagatcatcaccagcgccaagaggaagaagatcctggacaagtacggggacatgagggtgatgatggcctatgagctgttctccatgtggcagaacctgggggagcacaagatccacttcatccctggcatgattggccccttcctgggcgtgaccctggtgccccagcctgaggtgaggaacatcatgatccccatcttccatgacatgatggactgggagcagaggaagaatggaaacttcaagcaggtggaggccgagctgattgacaagctggacagcatggtgtctgagggcaaaggagatgagagctaccgggagctgttcagcctgctgacccagctgtttggcccctaccccagcctgctggagaaggtggagcaggagacctggagggagaccggcatcagctttgtgacctctgtgacccggctgatggagcggctgctggactacagagactgcatgaagggggaggagacagagaacaagaagattggctgcaccgtgaacctgatgaacttctacaagtctgagatcaacaaggaggagatgtacatccgctacatccacaagctgtgtgacatgcacctgcaggccgagaactacacagaagctgccttcaccctgctgctgtactgtgagctgctgcagtgggaggaccggcccctgcgggagttcctgcactaccccagccagacagagtggcagaggaaggagggcctgtgcaggaagatcatccactacttcaacaagggcaagtcctgggagtttggcatccccctgtgccgggagctggcctgccagtatgagagcctgtatgactaccagagcctgtcctggatcaggaagatggaggccagctactatgacaacatcatggagcagcagaggctggagcctgagttcttccgggtgggcttctacggcaggaagttccccttcttcctgaggaacaaggagtatgtgtgccggggccatgactatgaaaggctggaggccttccagcagaggatgctgtctgagttcccccaggccgtggccatgcagcaccccaaccacccagatgatgccatcctgcagtgtgatgcccagtacctgcagatctatgctgtgacccccatcccagactatgtggatgtgctgcagatggacagagtgcctgacagagtgaagagcttctacagagtgaacaacgtgaggaagttccgctatgaccggcccttccacaagggccccaaggacaaggaaaatgagttcaagagcctgtggattgaaagaaccaccctgaccctgacccacagcctgcccggcatcagccgctggtttgaggtggagcggcgggagctggtggaggtgagccccctggagaatgccatccaggtggtggagaacaagaaccaggagctgcggagcctcatcagccagtaccagcacaagcaggtgcacggcaacatcaacctgctgtccatgtgcctgaatggagtgattgatgctgctgtgaatggaggcatcgcccgctaccaggaggccttctttgacaaggactacatcaacaagcaccctggagatgctgagaagatcacccagctgaaggagctgatgcaggagcaggtgcacgtgctgggcgtgggcctggccgtgcatgagaagtttgtgcaccctgagatgaggcccctgcacaagaagctgattgaccagttccagatgatgagggccagcctgtaccacgagttccctggcctggacaagctgagccctgcctgcagcggcaccagcaccccaagaggaaatgtgctggccagccacagccccatgagccctgagagcatcaagatgacccaccgccacagccccatgaacctgatgggcaccggccgccacagcagcagcagcctgagcagccacgccagcagcgaggccggcaacatggtgatgctgggagatggctccatgggagatgcccctgaggacctgtaccaccacatgcagctggcctaccccaacccccgctaccagggctctgtgaccaacgtgtctgtgctgagcagcagccaggccagccccagcagcagcagcctgagcagcacccacagcgcccccagccagatgatcaccagcgcccccagcagcgcccggggcagccccagcctgcctgacaagtacagacatgcccgggagatgatgctgctgctgcccacctacagagaccggcccagcagcgccatgtacccagctgccatcctggagaatggccagccccccaacttccagagggccctcttccagcaggtggtgggcgcctgcaagccctgcagcgaccccaacctgtctgtggccgagaagggccactacagcctgcactttgatgccttccaccaccccctgggggacaccccaccagccctgcctgcccggaccctgaggaagagccccctgcaccccatcccagccagccccaccagcccccagagcggcctggatggcagcaacagcaccctgagcggcagcgccagcagtggagtgagcagcctgtctgagagcaactttggccacagcagcgaggccccacccaggacagacaccatggacagcatgcccagccaggcctggaatgctgatgaggacctggagcccccctacctgcctgtgcactacagcctgtctgagagcgctgtgctggacagcatcaaggcccagccctgccgcagccacagcgcccctggctgtgtgatcccccaggaccccatggaccccccagccctgccccccaagccctaccacccccggctgcctgccctggagcatgatgagggcgtgctgctgcgggaggagacagagcggccccggggcctgcacaggaaggcccccctgcccccaggcagcgccaaggaggagcaggccaggatggcctgggagcacggccgcggggagcagtag

SEQ ID NO: 149651 - DNA, 1785 bp, synthetic construct
  misc_feature 1..1785: note = Description of Artificial Sequence: Synthetic coding sequence
  source 1..1785: mol_type = other DNA
atgcccaagtggctggaggagacagagaacaagaagattggctgcaccgtgaacctgatgaacttctacaagtctgagatcaacaaggaggagatgtacatccgctacatccacaagctgtgtgacatgcacctgcaggccgagaactacacagaagctgccttcaccctgctgctgtactgtgagctgctgcagtgggaggaccggcccctgcgggagttcctgcactaccccagccagacagagtggcagaggaaggagggcctgtgcaggaagatcatccactacttcaacaagggcaagtcctgggagtttggcatccccctgtgccgggagctggcctgccagtatgagagcctgtatgactaccagagcctgtcctggatcaggaagatggaggccagctactatgacaacatcatggagcagcagaggctggagcctgagttcttccgggtgggcttctacggcaggaagttccccttcttcctgaggaacaaggagtatgtgtgccggggccatgactatgaaaggctggaggccttccagcagaggatgctgtctgagttcccccaggccgtggccatgcagcaccccaaccacccagatgatgccatcctgcagtgtgatgcccagtacctgcagatctatgctgtgacccccatcccagactatgtggatgtgctgcagatggacagagtgcctgacagagtgaagagcttctacagagtgaacaacgtgaggaagttccgctatgaccggcccttccacaagggccccaaggacaaggaaaatgagttcaagagcctgtggattgaaagaaccaccctgaccctgacccacagcctgcccggcatcagccgctggtttgaggtggagcggcgggagctggtggaggtgagccccctggagaatgccatccaggtggtggagaacaagaaccaggagctgcggagcctcatcagccagtaccagcacaagcaggtgcacggcaacatcaacctgctgtccatgtgcctgaatggagtgattgatgctgctgtgaatggaggcatcgcccgctaccaggaggccttctttgacaaggactacatcaacaagcaccctggagatgctgagaagatcacccagctgaaggagctgatgcaggagcaggtgcacgtgctgggcgtgggcctggccgtgcatgagaagtttgtgcaccctgagatgaggcccctgcacaagaagctgattgaccagttccagatgatgagggccagcctgtaccacgagttccctggcctggacaagctgagccctgcctgcagcggcaccagcaccccaagaggaaatgtgctggccagccacagccccatgagccctgagagcatcaagatgacccaccgccacagccccatgaacctgatgggcaccggccgccacagcagcagcagcctgagcagccacgccagcagcgaggccggcaacatggtgatgctgggagatggctccatgggagatgcccctgaggacctgtaccaccacatgcagctggcctaccccaacccccgctaccagggctctgtgaccaacgtgtctgtgctgagcagcagccaggccagccccagcagcagcagcctgagcagcacccacagcgcccccagccagatgatcaccagcgcccccagcagcgcccggggcagccccagcctgcctgacaagtacagacatgcccgggagatgatgctgctgctgcccacctacagagaccggcccagcagcgccatgtacccagctgcctag

SEQ ID NO: 149652 - DNA, 5778 bp, synthetic construct
  misc_feature 1..5778: note = Description of Artificial Sequence: Synthetic coding sequence
  source 1..5778: mol_type = other DNA
gtcatcgccagcttccggggcaccgtgccctacggcctgagcctggagattggagacacagtgcagatcctggagaagtgtgatggctggtaccggggctttgccctgaagaaccccaacatcaagggcatcttccccagcagctatgtgcacctgaagaatgcctgtgtgaagaacaagggccagtttgagatggtgatccccacagaggacagcgtcatcacagagatgaccagcaccctgcgggactggggcaccatgtggaagcagctgtatgtgagaaatgaaggagacctcttccaccggctgtggcacatcatgaatgagatcctggacctgcggcggcaggtgctggtgggccacctgacccatgacaggatgaaggatgtgaagaggcacatcacagcccggctggactggggcaatgagcagctgggcctggacctggtgcccaggaaggagtatgccatggtggaccctgaggacatcagcatcacagagctgtaccgcctgatggagcaccgccacaggaagaaggacacccctgtgcaggccagcagccaccacctgtttgtgcagatgaagagcctgatgtgcagcaacctgggggaggagctggaggtgatcttcagcctgtttgacagcaaagaaaatcggcccatcagcgagcgcttcttcctgcggctgaacagaaatggcctgcccaaggccccagacaagccagagcggcactgcagcctgtttgtggacctgggcagcagcgagctgaggaaggacatctacatcaccgtgcacatcatcagaattggaaggatgggcgctggggagaagaagaatgcctgcagcgtgcagtaccgccggcccttcggctgtgctgtgctgagcattgctgacctgctgactggagagaccaaggatgacctgatcctgaaggtgtacatgtgcaacacagaaagtgagtggtaccagatccacgagaacatcatcaagaagctgaatgcccgctacaacctgaccggcagcaatgccggcctggccgtgtccctgcagctgctgcatggagacatcgagcagatccggcgggagtacagctctgtgttcagccatggagtgtccatcaccaggaagctgggcttcagcaacatcatcatgcctggagagatgagaaatgacctgtacatcaccatcgagcggggggagtttgagaagggcggcaagtctgtggccagaaatgtggaggtgaccatgttcatcgtggacagcagcggccagaccctgaaggacttcatcagctttggcagcggggagcccccagccagcgagtaccacagctttgtgctgtaccacaacaacagcccccgctggagcgagctgctgaagctgcccatccctgtggacaagttccggggggcccacatccgctttgagttccgccactgcagcaccaaggagaagggggagaagaagctgtttggcttctcctttgtgcccctgatgcaggaggatggccgcaccctgcctgatggcacccatgagctgattgtgcacaagtgtgaggagaacaccaacctgcaggacaccacccgctacctgaagctgcccttcagcaagggcatcttcctgggcaacaacaaccaggccatgaaggccaccaaggagagcttctgcatcaccagcttcctgtgcagcaccaagctgacccagaatggagacatgctggacctgctgaagtggaggacccacccagacaagatcaccggctgcctgagcaagctgaaggagattgatggcagcgagatcgtgaagttcctgcaggacaccctggacaccctgtttggcatcctggatgagaacagccagaagtatggcagcaaggtgtttgacagcctggtgcacatcatcaacctgctgcaggacagcaagttccaccacttcaagcctgtgatggacacctacatcgagagccactttgctggggccctggcctacagagacctgatcaaggtgctgaagtggtacgtggaccgcatcacagaggccgagcggcaggagcacatccaggaggtgctgaaggcccaggagtacatcttcaagtacatcgtgcagagccggcggctcttcagcctggccactggaggccagaatgaggaggagttccgctgctgcatccaggagctgctgatgtctgtgcgcttcttcctgagccaggagagcaaaggaagtggggccctgagccagagccaggccgtgttcctgagcagcttccctgctgtgtacagcgagctgctgaagctgtttgatgtgcgggaggtggccaacctggtgcaggacaccctgggcagcctgcccaccatcctgcacgtggatgacagcctgcaggccatcaagctgcagtgcatcggcaagacagtggagagccagctgtacaccaacccagacagccgctacatcctgctgcctgtggtgctgcaccacctgcacatccacctgcaggagcagaaggacctgatcatgtgtgcccgcatcctgagcaatgtgttctgcctgatcaagaagaacagcagcgagaagtctgtgctggaggagattgatgtgattgtggccagcctgctggacatcctgctgcggaccatcctggagatcaccagccggccccagcccagcagcagcgccatgaggttccagttccaggatgtgactggagaatttgtggcctgcctgctgagcctgctgcggcagatgacagacagacactaccagcagctgctggacagcttcaacaccaaggaggagctgcgggacttcctgctgcagatcttcaccgtcttccgcatcctgatccggcctgagatgttccccaaggactggacagtgatgaggctggtggccaacaacgtcatcatcaccaccgtgctgtacctgagtgatgccctgaggaagaacttcctgaatgaaaattttgactacaagatctgggacagctacttctacctggccgtcatcttcatcaaccagctgtgcctgcagctggagatgttcacccccagcaagaagaagaaggtgctggagaagtatggagacatgagggtgaccatgggctgtgagatcttctccatgtggcagaacctgggggagcacaagctgcacttcatcccagccctgattggccccttcctggaggtgaccctcatcccccagcctgacctgagaaatgtgatgatccccatcttccatgacatgatggactgggagcagaggaggagcggcaacttcaagcaggtggaggccaagctgattgacaagctggacagcctgatgtctgagggcaaaggagatgagacctaccgggagctgttcaacagcatcatccccctgtttggcccctaccccagcctgctgaagaagattgaaagagagacctggagggagagcggcgtgtccctgattgccaccgtgacccggctgatggagcggctgctggactacagagactgcatgaagatgggagaggtggatggcaagaagattggctgcaccgtgtccctgctgaacttctacaagacagagctgaacaaggaggagatgtacatccgctacatccacaagctgtatgacctgcacctgaaggcccagaacttcacagaggccgcctacaccctgctgctgtatgatgagctgctggagtggagcgaccggcccctgcgggagttcctgacctaccccatgcagacagagtggcagaggaaggagcacctgcacctgaccatcatccagaactttgaccggggcaagtgctgggagaatggcatcatcctgtgcaggaagattgctgagcagtatgagagctactatgactacagaaacctgagcaagatgaggatgatggaggccagcctgtatgacaagatcatggaccagcagaggctggagcctgagttcttccgggtgggcttctacggcaagaagttccccttcttcctgaggaacaaggagtttgtgtgccggggccatgactatgagcggctggaggccttccagcagaggatgctgaatgagttcccccacgccatcgccatgcagcacgccaaccagccagatgagaccatcttccaggccgaggcccagtacctgcagatctatgctgtgacccccatccctgagagccaggaggtgctgcagcgggagggcgtgcctgacaacatcaagagcttctacaaggtgaaccacatctggaagttccgctatgaccggcccttccacaagggcaccaaggacaaggaaaatgagttcaagagcctgtgggtggagaggaccagcctgtacctggtgcagagcctgcccggcatcagccgctggtttgaggtggagaagcgggaggtggtggagatgagccccctggagaatgccatcgaggtgctggagaacaagaaccagcagctgaagaccctcatcagccagtgccagacccggcagatgcagaacatcaaccccctgaccatgtgcctgaatggagtgattgatgctgctgtgaatggaggagtgagccgctaccaggaggccttctttgtgaaggagtacatcctgagccacccagaagatggagagaagatcgcccggctgcgggagctgatgctggagcaggcccagatcctggagtttggcctggccgtgcatgagaagtttgtgccccaggacatgaggcccctgcacaagaagctggtggaccagttctttgtgatgaagagcagcctgggcatccaggagttcagcgcctgcatgcaggccagccctgtgcacttccccaacggcagcccccgggtgtgcagaaattctgccccagcctctgtgtccccagatggcaccagggtcatcccccggcgcagccccctgagctacccagctgtgaaccgctacagcagcagcagcctgagcagccaggccagcgctgaggtgagcaacatcaccggccagagcgagagcagtgatgaggtgttcaacatgcagcccagccccagcaccagcagcctgagcagcacccacagcgccagccccaacgtgaccagcagcgcccccagcagcgcccgggccagccccctgctgagtgacaagcacaagcacagccgggagaacagctgcctgagcccccgggagcggccctgcagcgccatctaccccacccctgtggagcccagccagaggatgctgttcaaccacatcggagatggagccctgcccaggagtgaccccaacctgagcgcccctgagaaggccagccctgcccggcacaccacctctgtgagccccagccctgctggccgcagccccctgaagggctctgtgcagagcttcacccccagccctgtggagtaccacagccctggcctcatcagcaacagccctgtgctgagcggcagctacagcagcggcatcagcagcctgagccgctgcagcaccagcgagaccagcggctttgagaaccaggtgaatgagcagagcgcccccctgcctgtgcctgtgcctgtgcctgtgcccagctatggaggagaggagcctgtgaggaaggagagcaagaccccaccaccctacagcgtgtatgaaagaaccctgcggcggcctgtgcccctgccccacagcctgagcatccctgtgaccagcgagcccccagccctgccccccaagcccctggccgcccggagcagccacctggagaatggagccaggagaacagatcctggcccccggccccggcccctgcccaggaaggtgtcccagctgtag

SEQ ID NO: 149653 - DNA, 5865 bp, synthetic construct
  misc_feature 1..5865: note = Description of Artificial Sequence: Synthetic coding sequence
  source 1..5865: mol_type = other DNA
gtcatcgccagcttccggggcaccgtgccctacggcctgagcctggagattggagacacagtgcagatcctggagaagtgtgatggctggtaccggggctttgccctgaagaaccccaacatcaagggcatcttccccagcagctatgtgcacctgaagaatgcctgtgtgaagaacaagggccagtttgagatggtgatccccacagaggacagcgtcatcacagagatgaccagcaccctgcgggactggggcaccatgtggaagcagctgtatgtgagaaatgaaggagacctcttccaccggctgtggcacatcatgaatgagatcctggacctgcggcggcaggtgctggtgggccacctgacccatgacaggatgaaggatgtgaagaggcacatcacagcccggctggactggggcaatgagcagctgggcctggacctggtgcccaggaaggagtatgccatggtggaccctgaggacatcagcatcacagagctgtaccgcctgatggagcaccgccacaggaagaaggacacccctgtgcaggccagcagccaccacctgtttgtgcagatgaagagcctgatgtgcagcaacctgggggaggagctggaggtgatcttcagcctgtttgacagcaaagaaaatcggcccatcagcgagcgcttcttcctgcggctgaacagaaatggcctgcccaaggccccagacaagccagagcggcactgcagcctgtttgtggacctgggcagcagcgagctgaggaaggacatctacatcaccgtgcacatcatcagaattggaaggatgggcgctggggagaagaagaatgcctgcagcgtgcagtaccgccggcccttcggctgtgctgtgctgagcattgctgacctgctgactggagagaccaaggatgacctgatcctgaaggtgtacatgtgcaacacagaaagtgagtggtaccagatccacgagaacatcatcaagaagctgaatgcccgctacaacctgaccggcagcaatgccggcctggccgtgtccctgcagctgctgcatggagacatcgagcagatccggcgggagtacagctctgtgttcagccatggagtgtccatcaccaggaagctgggcttcagcaacatcatcatgcctggagagatgagaaatgacctgtacatcaccatcgagcggggggagtttgagaagggcggcaagtctgtggccagaaatgtggaggtgaccatgttcatcgtggacagcagcggccagaccctgaaggacttcatcagctttggcagcggggagcccccagccagcgagtaccacagctttgtgctgtaccacaacaacagcccccgctggagcgagctgctgaagctgcccatccctgtggacaagttccggggggcccacatccgctttgagttccgccactgcagcaccaaggagaagggggagaagaagctgtttggcttctcctttgtgcccctgatgcaggaggatggccgcaccctgcctgatggcacccatgagctgattgtgcacaagtgtgaggagaacaccaacctgcaggacaccacccgctacctgaagctgcccttcagcaagggcatcttcctgggcaacaacaaccaggccatgaaggccaccaaggagagcttctgcatcaccagcttcctgtgcagcaccaagctgacccagaatggagacatgctggacctgctgaagtggaggacccacccagacaagatcaccggctgcctgagcaagctgaaggagattgatggcagcgagatcgtgaagttcctgcaggacaccctggacaccctgtttggcatcctggatgagaacagccagaagtatggcagcaaggtgtttgacagcctggtgcacatcatcaacctgctgcaggacagcaagttccaccacttcaagcctgtgatggacacctacatcgagagccactttgctggggccctggcctacagagacctgatcaaggtgctgaagtggtacgtggaccgcatcacagaggccgagcggcaggagcacatccaggaggtgctgaaggcccaggagtacatcttcaagtacatcgtgcagagccggcggctcttcagcctggccactggaggccagaatgaggaggagttccgctgctgcatccaggagctgctgatgtctgtgcgcttcttcctgagccaggagagcaaaggaagtggggccctgagccagagccaggccgtgttcctgagcagcttccctgctgtgtacagcgagctgctgaagctgtttgatgtgcgggaggtggccaacctggtgcaggacaccctgggcagcctgcccaccatcctgcacgtggatgacagcctgcaggccatcaagctgcagtgcatcggcaagacagtggagagccagctgtacaccaacccagacagccgctacatcctgctgcctgtggtgctgcaccacctgcacatccacctgcaggagcagaaggacctgatcatgtgtgcccgcatcctgagcaatgtgttctgcctgatcaagaagaacagcagcgagaagtctgtgctggaggagattgatgtgattgtggccagcctgctggacatcctgctgcggaccatcctggagatcaccagccggccccagcccagcagcagcgccatgaggttccagttccaggatgtgactggagaatttgtggcctgcctgctgagcctgctgcggcagatgacagacagacactaccagcagctgctggacagcttcaacaccaaggaggagctgcgggacttcctgctgcagatcttcaccgtcttccgcatcctgatccggcctgagatgttccccaaggactggacagtgatgaggctggtggccaacaacgtcatcatcaccaccgtgctgtacctgagtgatgccctgaggaagaacttcctgaatgaaaattttgactacaagatctgggacagctacttctacctggccgtcatcttcatcaaccagctgtgcctgcagctggagatgttcacccccagcaagaagaagaaggtgctggagaagtatggagacatgagggtgaccatgggctgtgagatcttctccatgtggcagaacctgggggagcacaagctgcacttcatcccagccctgattggccccttcctggaggtgaccctcatcccccagcctgacctgagaaatgtgatgatccccatcttccatgacatgatggactgggagcagaggaggagcggcaacttcaagcaggtggaggccaagctgattgacaagctggacagcctgatgtctgagggcaaaggagatgagacctaccgggagctgttcaacagcatcctgctgaagaagattgagcgggagacctggagggagagcggcgtgtccctcatcgccaccgtgacccggctgatggagcggctgctggactacagagactgcatgaagatgggagaggtggatggcaagaagattggctgcaccgtgtccctgctgaacttctacaagacagagctgaacaaggaggagatgtacatccgctacatccacaagctgtatgacctgcacctgaaggcccagaacttcacagaagctgcctacaccctgctgctgtatgatgagctgctggagtggagcgaccggcccctgcgggagttcctgacctaccccatgcagacagagtggcagaggaaggagcacctgcacctgaccatcatccagaactttgaccggggcaagtgctgggagaatggcatcatcctgtgcaggaagattgctgagcagtatgagagctactatgactacagaaacctgagcaagatgaggatgatggaggccagcctgtatgacaagatcatggaccagcagaggctggagcctgagttcttccgggtgggcttctacggcaagaagttccccttcttcctgaggaacaaggagtttgtgtgccggggccatgactatgaaaggctggaggccttccagcagaggatgctgaatgagttcccccacgccatcgccatgcagcacgccaaccagccagatgagaccatcttccaggccgaggcccagtacctgcagatctatgctgtgacccccatccctgagagccaggaggtgctgcagcgggagggcgtgcctgacaacatcaagagcttctacaaggtgaaccacatctggaagttccgctatgaccggcccttccacaagggcaccaaggacaaggaaaatgagttcaagagcctgtgggtggagaggaccagcctgtacctggtgcagagcctgcccggcatcagccgctggtttgaggtggagaagcgggaggtggtggagatgagccccctggagaatgccatcgaggtgctggagaacaagaaccagcagctgaagaccctcatcagccagtgccagacccggcagatgcagaacatcaaccccctgaccatgtgcctgaatggagtgattgatgctgctgtgaatggaggagtgagccgctaccaggaggccttctttgtgaaggagtacatcctgagccacccagaagatggagagaagatcgcccggctgcgggagctgatgctggagcaggcccagatcctggagtttggcctggccgtgcatgagaagtttgtgccccaggacatgaggcccctgcacaagaagctggtggaccagttctttgtgatgaagagcagcctgggcatccaggagttcagcgcctgcatgcaggccagccctgtgcacttccccaacggcagcccccgggtgtgcaggaacagcgccccagcctctgtgtccccagatggcaccagggtcatccccaggaggagccccctgagctacccagctgtgaaccgctacagcagcagcagcctgagcagccaggccagcgctgaggtgagcaacatcaccggccagagcgagagcagtgatgaggtgttcaacatgcagcccagccccagcaccagcagcctgagcagcacccacagcgccagccccaacgtgaccagcagcgcccccagcagcgcccgggccagccccctgctgagtgacaagcacaagcacagccgggagaacagctgcctgagcccccgggagcggccctgcagcgccatctaccccacccctgtggagcccagccagaggatgctgttcaaccacatcggagatggagccctgcccaggagtgaccccaacctgagcgcccctgagaaggctgtgaaccccacccccagctcctggagcctggacagcggcaaggaggccaagaacatgtctgacagcggcaagctgatcagcccccctgtgcccccccggcccacccagacagccagccctgcccggcacaccacctctgtgagccccagccctgctggccgcagccccctgaagggctctgtgcagagcttcacccccagccctgtggagtaccacagccctggcctcatcagcaacagccctgtgctgagcggcagctacagcagcggcatcagcagcctgagccgctgcagcaccagcgagaccagcggctttgagaaccaggtgaatgagcagagcgcccccctgcctgtgcctgtgcctgtgcctgtgcccagctatggaggagaggagcctgtgaggaaggagagcaagaccccaccaccctacagcgtgtatgaaagaaccctgcggcggcctgtgcccctgccccacagcctgagcatccctgtgaccagcgagcccccagccctgccccccaagcccctggccgcccggagcagccacctggagaatggagcccggaggacagaccccggcccccggccccggcccctgcccaggaaggtgtcccagctgtag

SEQ ID NO: 149654 - DNA, 5928 bp, synthetic construct
  misc_feature 1..5928: note = Description of Artificial Sequence: Synthetic coding sequence
  source 1..5928: mol_type = other DNA
atgtggatccccacagaacatgagaagtatggagtggtgattgccagcttccggggcaccgtgccctacggcctgagcctggagattggagacacagtgcagatcctggagaagtgtgatggctggtaccggggctttgccctgaagaaccccaacatcaagggcatcttccccagcagctatgtgcacctgaagaatgcctgtgtgaagaacaagggccagtttgagatggtgatccccacagaggacagcgtcatcacagagatgaccagcaccctgcgggactggggcaccatgtggaagcagctgtatgtgagaaatgaaggagacctcttccaccggctgtggcacatcatgaatgagatcctggacctgcggcggcaggtgctggtgggccacctgacccatgacaggatgaaggatgtgaagaggcacatcacagcccggctggactggggcaatgagcagctgggcctggacctggtgcccaggaaggagtatgccatggtggaccctgaggacatcagcatcacagagctgtaccgcctgatggagcaccgccacaggaagaaggacacccctgtgcaggccagcagccaccacctgtttgtgcagatgaagagcctgatgtgcagcaacctgggggaggagctggaggtgatcttcagcctgtttgacagcaaagaaaatcggcccatcagcgagcgcttcttcctgcggctgaacagaaatggcctgcccaaggccccagacaagccagagcggcactgcagcctgtttgtggacctgggcagcagcgagctgaggaaggacatctacatcaccgtgcacatcatcagaattggaaggatgggcgctggggagaagaagaatgcctgcagcgtgcagtaccgccggcccttcggctgtgctgtgctgagcattgctgacctgctgactggagagaccaaggatgacctgatcctgaaggtgtacatgtgcaacacagaaagtgagtggtaccagatccacgagaacatcatcaagaagctgaatgcccgctacaacctgaccggcagcaatgccggcctggccgtgtccctgcagctgctgcatggagacatcgagcagatccggcgggagtacagctctgtgttcagccatggagtgtccatcaccaggaagctgggcttcagcaacatcatcatgcctggagagatgagaaatgacctgtacatcaccatcgagcggggggagtttgagaagggcggcaagtctgtggccagaaatgtggaggtgaccatgttcatcgtggacagcagcggccagaccctgaaggacttcatcagctttggcagcggggagcccccagccagcgagtaccacagctttgtgctgtaccacaacaacagcccccgctggagcgagctgctgaagctgcccatccctgtggacaagttccggggggcccacatccgctttgagttccgccactgcagcaccaaggagaagggggagaagaagctgtttggcttctcctttgtgcccctgatgcaggaggatggccgcaccctgcctgatggcacccatgagctgattgtgcacaagtgtgaggagaacaccaacctgcaggacaccacccgctacctgaagctgcccttcagcaagggcatcttcctgggcaacaacaaccaggccatgaaggccaccaaggagagcttctgcatcaccagcttcctgtgcagcaccaagctgacccagaatggagacatgctggacctgctgaagtggaggacccacccagacaagatcaccggctgcctgagcaagctgaaggagattgatggcagcgagatcgtgaagttcctgcaggacaccctggacaccctgtttggcatcctggatgagaacagccagaagtatggcagcaaggtgtttgacagcctggtgcacatcatcaacctgctgcaggacagcaagttccaccacttcaagcctgtgatggacacctacatcgagagccactttgctggggccctggcctacagagacctgatcaaggtgctgaagtggtacgtggaccgcatcacagaggccgagcggcaggagcacatccaggaggtgctgaaggcccaggagtacatcttcaagtacatcgtgcagagccggcggctcttcagcctggccactggaggccagaatgaggaggagttccgctgctgcatccaggagctgctgatgtctgtgcgcttcttcctgagccaggagagcaaaggaagtggggccctgagccagagccaggccgtgttcctgagcagcttccctgctgtgtacagcgagctgctgaagctgtttgatgtgcgggaggtggccaacctggtgcaggacaccctgggcagcctgcccaccatcctgcacgtggatgacagcctgcaggccatcaagctgcagtgcatcggcaagacagtggagagccagctgtacaccaacccagacagccgctacatcctgctgcctgtggtgctgcaccacctgcacatccacctgcaggagcagaaggacctgatcatgtgtgcccgcatcctgagcaatgtgttctgcctgatcaagaagaacagcagcgagaagtctgtgctggaggagattgatgtgattgtggccagcctgctggacatcctgctgcggaccatcctggagatcaccagccggccccagcccagcagcagcgccatgaggttccagttccaggatgtgactggagaatttgtggcctgcctgctgagcctgctgcggcagatgacagacagacactaccagcagctgctggacagcttcaacaccaaggaggagctgcgggacttcctgctgcagatcttcaccgtcttccgcatcctgatccggcctgagatgttccccaaggactggacagtgatgaggctggtggccaacaacgtcatcatcaccaccgtgctgtacctgagtgatgccctgaggaagaacttcctgaatgaaaattttgactacaagatctgggacagctacttctacctggccgtcatcttcatcaaccagctgtgcctgcagctggagatgttcacccccagcaagaagaagaaggtgctggagaagtatggagacatgagggtgaccatgggctgtgagatcttctccatgtggcagaacctgggggagcacaagctgcacttcatcccagccctgattggccccttcctggaggtgaccctcatcccccagcctgacctgagaaatgtgatgatccccatcttccatgacatgatggactgggagcagaggaggagcggcaacttcaagcaggtggaggccaagctgattgacaagctggacagcctgatgtctgagggcaaaggagatgagacctaccgggagctgttcaacagcatcatccccctgtttggcccctaccccagcctgctgaagaagattgaaagagagacctggagggagagcggcgtgtccctgattgccaccgtgacccggctgatggagcggctgctggactacagagactgcatgaagatgggagaggtggatggcaagaagattggctgcaccgtgtccctgctgaacttctacaagacagagctgaacaaggaggagatgtacatccgctacatccacaagctgtatgacctgcacctgaaggcccagaacttcacagaggccgcctacaccctgctgctgtatgatgagctgctggagtggagcgaccggcccctgcgggagttcctgacctaccccatgcagacagagtggcagaggaaggagcacctgcacctgaccatcatccagaactttgaccggggcaagtgctgggagaatggcatcatcctgtgcaggaagattgctgagcagtatgagagctactatgactacagaaacctgagcaagatgaggatgatggaggccagcctgtatgacaagatcatggaccagcagaggctggagcctgagttcttccgggtgggcttctacggcaagaagttccccttcttcctgaggaacaaggagtttgtgtgccggggccatgactatgagcggctggaggccttccagcagaggatgctgaatgagttcccccacgccatcgccatgcagcacgccaaccagccagatgagaccatcttccaggccgaggcccagtacctgcagatctatgctgtgacccccatccctgagagccaggaggtgctgcagcgggagggcgtgcctgacaacatcaagagcttctacaaggtgaaccacatctggaagttccgctatgaccggcccttccacaagggcaccaaggacaaggaaaatgagttcaagagcctgtgggtggagaggaccagcctgtacctggtgcagagcctgcccggcatcagccgctggtttgaggtggagaagcgggaggtggtggagatgagccccctggagaatgccatcgaggtgctggagaacaagaaccagcagctgaagaccctcatcagccagtgccagacccggcagatgcagaacatcaaccccctgaccatgtgcctgaatggagtgattgatgctgctgtgaatggaggagtgagccgctaccaggaggccttctttgtgaaggagtacatcctgagccacccagaagatggagagaagatcgcccggctgcgggagctgatgctggagcaggcccagatcctggagtttggcctggccgtgcatgagaagtttgtgccccaggacatgaggcccctgcacaagaagctggtggaccagttctttgtgatgaagagcagcctgggcatccaggagttcagcgcctgcatgcaggccagccctgtgcacttccccaacggcagcccccgggtgtgcagaaattctgccccagcctctgtgtccccagatggcaccagggtcatcccccggcgcagccccctgagctacccagctgtgaaccgctacagcagcagcagcctgagcagccaggccagcgctgaggtgagcaacatcaccggccagagcgagagcagtgatgaggtgttcaacatgcagcccagccccagcaccagcagcctgagcagcacccacagcgccagccccaacgtgaccagcagcgcccccagcagcgcccgggccagccccctgctgagtgacaagcacaagcacagccgggagaacagctgcctgagcccccgggagcggccctgcagcgccatctaccccacccctgtggagcccagccagaggatgctgttcaaccacatcggagatggagccctgcccaggagtgaccccaacctgagcgcccctgagaaggctgtgaaccccacccccagctcctggagcctggacagcggcaaggaggccaagaacatgtctgattctgggaagctgatcagcccccctgtgcccccccggcccacccagacagccagccctgcccggcacaccacctctgtgagccccagccctgctggccgcagccccctgaagggctctgtgcagagcttcacccccagccctgtggagtaccacagccctggcctcatcagcaacagccctgtgctgagcggcagctacagcagcggcatcagcagcctgagccgctgcagcaccagcgagaccagcggctttgagaaccaggtgaatgagcagagcgcccccctgcctgtgcctgtgcctgtgcctgtgcccagctatggaggagaggagcctgtgaggaaggagagcaagaccccaccaccctacagcgtgtatgaaagaaccctgcggcggcctgtgcccctgccccacagcctgagcatccctgtgaccagcgagcccccagccctgccccccaagcccctggccgcccggagcagccacctggagaatggagccaggagaacagatcctggcccccggccccggcccctgcccaggaaggtgtcccagctgtag

SEQ ID NO: 149655 - DNA, 5901 bp, synthetic construct
  misc_feature 1..5901: note = Description of Artificial Sequence: Synthetic coding sequence
  source 1..5901: mol_type = other DNA
atgtggatccccacagaacatgagaagtatggagtggtgattgccagcttccggggcaccgtgccctacggcctgagcctggagattggagacacagtgcagatcctggagaagtgtgatggctggtaccggggctttgccctgaagaaccccaacatcaagggcatcttccccagcagctatgtgcacctgaagaatgcctgtgtgaagaacaagggccagtttgagatggtgatccccacagaggacagcgtcatcacagagatgaccagcaccctgcgggactggggcaccatgtggaagcagctgtatgtgagaaatgaaggagacctcttccaccggctgtggcacatcatgaatgagatcctggacctgcggcggcaggtgctggtgggccacctgacccatgacaggatgaaggatgtgaagaggcacatcacagcccggctggactggggcaatgagcagctgggcctggacctggtgcccaggaaggagtatgccatggtggaccctgaggacatcagcatcacagagctgtaccgcctgatggagcaccgccacaggaagaaggacacccctgtgcaggccagcagccaccacctgtttgtgcagatgaagagcctgatgtgcagcaacctgggggaggagctggaggtgatcttcagcctgtttgacagcaaagaaaatcggcccatcagcgagcgcttcttcctgcggctgaacagaaatggcctgcccaaggccccagacaagccagagcggcactgcagcctgtttgtggacctgggcagcagcgagctgaggaaggacatctacatcaccgtgcacatcatcagaattggaaggatgggcgctggggagaagaagaatgcctgcagcgtgcagtaccgccggcccttcggctgtgctgtgctgagcattgctgacctgctgactggagagaccaaggatgacctgatcctgaaggtgtacatgtgcaacacagaaagtgagtggtaccagatccacgagaacatcatcaagaagctgaatgcccgctacaacctgaccggcagcaatgccggcctggccgtgtccctgcagctgctgcatggagacatcgagcagatccggcgggagtacagctctgtgttcagccatggagtgtccatcaccaggaagctgggcttcagcaacatcatcatgcctggagagatgagaaatgacctgtacatcaccatcgagcggggggagtttgagaagggcggcaagtctgtggccagaaatgtggaggtgaccatgttcatcgtggacagcagcggccagaccctgaaggacttcatcagctttggcagcggggagcccccagccagcgagtaccacagctttgtgctgtaccacaacaacagcccccgctggagcgagctgctgaagctgcccatccctgtggacaagttccggggggcccacatccgctttgagttccgccactgcagcaccaaggagaagggggagaagaagctgtttggcttctcctttgtgcccctgatgcaggaggatggccgcaccctgcctgatggcacccatgagctgattgtgcacaagtgtgaggagaacaccaacctgcaggacaccacccgctacctgaagctgcccttcagcaagggcatcttcctgggcaacaacaaccaggccatgaaggccaccaaggagagcttctgcatcaccagcttcctgtgcagcaccaagctgacccagaatggagacatgctggacctgctgaagtggaggacccacccagacaagatcaccggctgcctgagcaagctgaaggagattgatggcagcgagatcgtgaagttcctgcaggacaccctggacaccctgtttggcatcctggatgagaacagccagaagtatggcagcaaggtgtttgacagcctggtgcacatcatcaacctgctgcaggacagcaagttccaccacttcaagcctgtgatggacacctacatcgagagccactttgctggggccctggcctacagagacctgatcaaggtgctgaagtggtacgtggaccgcatcacagaggccgagcggcaggagcacatccaggaggtgctgaaggcccaggagtacatcttcaagtacatcgtgcagagccggcggctcttcagcctggccactggaggccagaatgaggaggagttccgctgctgcatccaggagctgctgatgtctgtgcgcttcttcctgagccaggagagcaaaggaagtggggccctgagccagagccaggccgtgttcctgagcagcttccctgctgtgtacagcgagctgctgaagctgtttgatgtgcgggaggtggccaacctggtgcaggacaccctgggcagcctgcccaccatcctgcacgtggatgacagcctgcaggccatcaagctgcagtgcatcggcaagacagtggagagccagctgtacaccaacccagacagccgctacatcctgctgcctgtggtgctgcaccacctgcacatccacctgcaggagcagaaggacctgatcatgtgtgcccgcatcctgagcaatgtgttctgcctgatcaagaagaacagcagcgagaagtctgtgctggaggagattgatgtgattgtggccagcctgctggacatcctgctgcggaccatcctggagatcaccagccggccccagcccagcagcagcgccatgaggttccagttccaggatgtgactggagaatttgtggcctgcctgctgagcctgctgcggcagatgacagacagacactaccagcagctgctggacagcttcaacaccaaggaggagctgcgggacttcctgctgcagatcttcaccgtcttccgcatcctgatccggcctgagatgttccccaaggactggacagtgatgaggctggtggccaacaacgtcatcatcaccaccgtgctgtacctgagtgatgccctgaggaagaacttcctgaatgaaaattttgactacaagatctgggacagctacttctacctggccgtcatcttcatcaaccagctgtgcctgcagctggagatgttcacccccagcaagaagaagaaggtgctggagaagtatggagacatgagggtgaccatgggctgtgagatcttctccatgtggcagaacctgggggagcacaagctgcacttcatcccagccctgattggccccttcctggaggtgaccctcatcccccagcctgacctgagaaatgtgatgatccccatcttccatgacatgatggactgggagcagaggaggagcggcaacttcaagcaggtggaggccaagctgattgacaagctggacagcctgatgtctgagggcaaaggagatgagacctaccgggagctgttcaacagcatcctgctgaagaagattgagcgggagacctggagggagagcggcgtgtccctcatcgccaccgtgacccggctgatggagcggctgctggactacagagactgcatgaagatgggagaggtggatggcaagaagattggctgcaccgtgtccctgctgaacttctacaagacagagctgaacaaggaggagatgtacatccgctacatccacaagctgtatgacctgcacctgaaggcccagaacttcacagaagctgcctacaccctgctgctgtatgatgagctgctggagtggagcgaccggcccctgcgggagttcctgacctaccccatgcagacagagtggcagaggaaggagcacctgcacctgaccatcatccagaactttgaccggggcaagtgctgggagaatggcatcatcctgtgcaggaagattgctgagcagtatgagagctactatgactacagaaacctgagcaagatgaggatgatggaggccagcctgtatgacaagatcatggaccagcagaggctggagcctgagttcttccgggtgggcttctacggcaagaagttccccttcttcctgaggaacaaggagtttgtgtgccggggccatgactatgaaaggctggaggccttccagcagaggatgctgaatgagttcccccacgccatcgccatgcagcacgccaaccagccagatgagaccatcttccaggccgaggcccagtacctgcagatctatgctgtgacccccatccctgagagccaggaggtgctgcagcgggagggcgtgcctgacaacatcaagagcttctacaaggtgaaccacatctggaagttccgctatgaccggcccttccacaagggcaccaaggacaaggaaaatgagttcaagagcctgtgggtggagaggaccagcctgtacctggtgcagagcctgcccggcatcagccgctggtttgaggtggagaagcgggaggtggtggagatgagccccctggagaatgccatcgaggtgctggagaacaagaaccagcagctgaagaccctcatcagccagtgccagacccggcagatgcagaacatcaaccccctgaccatgtgcctgaatggagtgattgatgctgctgtgaatggaggagtgagccgctaccaggaggccttctttgtgaaggagtacatcctgagccacccagaagatggagagaagatcgcccggctgcgggagctgatgctggagcaggcccagatcctggagtttggcctggccgtgcatgagaagtttgtgccccaggacatgaggcccctgcacaagaagctggtggaccagttctttgtgatgaagagcagcctgggcatccaggagttcagcgcctgcatgcaggccagccctgtgcacttccccaacggcagcccccgggtgtgcaggaacagcgccccagcctctgtgtccccagatggcaccagggtcatccccaggaggagccccctgagctacccagctgtgaaccgctacagcagcagcagcctgagcagccaggccagcgctgaggtgagcaacatcaccggccagagcgagagcagtgatgaggtgttcaacatgcagcccagccccagcaccagcagcctgagcagcacccacagcgccagccccaacgtgaccagcagcgcccccagcagcgcccgggccagccccctgctgagtgacaagcacaagcacagccgggagaacagctgcctgagcccccgggagcggccctgcagcgccatctaccccacccctgtggagcccagccagaggatgctgttcaaccacatcggagatggagccctgcccaggagtgaccccaacctgagcgcccctgagaaggctgtgaaccccacccccagctcctggagcctggacagcggcaaggaggccaagaacatgtctgacagcggcaagctgatcagcccccctgtgcccccccggcccacccagacagccagccctgcccggcacaccacctctgtgagccccagccctgctggccgcagccccctgaagggctctgtgcagagcttcacccccagccctgtggagtaccacagccctggcctcatcagcaacagccctgtgctgagcggcagctacagcagcggcatcagcagcctgagccgctgcagcaccagcgagaccagcggctttgagaaccaggtgaatgagcagagcgcccccctgcctgtgcctgtgcctgtgcctgtgcccagctatggaggagaggagcctgtgaggaaggagagcaagaccccaccaccctacagcgtgtatgaaagaaccctgcggcggcctgtgcccctgccccacagcctgagcatccctgtgaccagcgagcccccagccctgccccccaagcccctggccgcccggagcagccacctggagaatggagcccggaggacagaccccggcccccggccccggcccctgcccaggaaggtgtcccagctgtag

SEQ ID NO: 149656 - DNA, 2550 bp, synthetic construct
  misc_feature 1..2550: note = Description of Artificial Sequence: Synthetic coding sequence
  source 1..2550: mol_type = other DNA
atgaagatgcacagcacagagcgcatccccctgtttggcccctaccccagcctgctgaagaagattgaaagagagacctggagggagagcggcgtgtccctgattgccaccgtgacccggctgatggagcggctgctggactacagagactgcatgaagatgggagaggtggatggcaagaagattggctgcaccgtgtccctgctgaacttctacaagacagagctgaacaaggaggagatgtacatccgctacatccacaagctgtatgacctgcacctgaaggcccagaacttcacagaggccgcctacaccctgctgctgtatgatgagctgctggagtggagcgaccggcccctgcgggagttcctgacctaccccatgcagacagagtggcagaggaaggagcacctgcacctgaccatcatccagaactttgaccggggcaagtgctgggagaatggcatcatcctgtgcaggaagattgctgagcagtatgagagctactatgactacagaaacctgagcaagatgaggatgatggaggccagcctgtatgacaagatcatggaccagcagaggctggagcctgagttcttccgggtgggcttctacggcaagaagttccccttcttcctgaggaacaaggagtttgtgtgccggggccatgactatgagcggctggaggccttccagcagaggatgctgaatgagttcccccacgccatcgccatgcagcacgccaaccagccagatgagaccatcttccaggccgaggcccagtacctgcagatctatgctgtgacccccatccctgagagccaggaggtgctgcagcgggagggcgtgcctgacaacatcaagagcttctacaaggtgaaccacatctggaagttccgctatgaccggcccttccacaagggcaccaaggacaaggaaaatgagttcaagagcctgtgggtggagaggaccagcctgtacctggtgcagagcctgcccggcatcagccgctggtttgaggtggagaagcgggaggtggtggagatgagccccctggagaatgccatcgaggtgctggagaacaagaaccagcagctgaagaccctcatcagccagtgccagacccggcagatgcagaacatcaaccccctgaccatgtgcctgaatggagtgattgatgctgctgtgaatggaggagtgagccgctaccaggaggccttctttgtgaaggagtacatcctgagccacccagaagatggagagaagatcgcccggctgcgggagctgatgctggagcaggcccagatcctggagtttggcctggccgtgcatgagaagtttgtgccccaggacatgaggcccctgcacaagaagctggtggaccagttctttgtgatgaagagcagcctgggcatccaggagttcagcgcctgcatgcaggccagccctgtgcacttccccaacggcagcccccgggtgtgcagaaattctgccccagcctctgtgtccccagatggcaccagggtcatcccccggcgcagccccctgagctacccagctgtgaaccgctacagcagcagcagcctgagcagccaggccagcgctgaggtgagcaacatcaccggccagagcgagagcagtgatgaggtgttcaacatgcagcccagccccagcaccagcagcctgagcagcacccacagcgccagccccaacgtgaccagcagcgcccccagcagcgcccgggccagccccctgctgagtgacaagcacaagcacagccgggagaacagctgcctgagcccccgggagcggccctgcagcgccatctaccccacccctgtggagcccagccagaggatgctgttcaaccacatcggagatggagccctgcccaggagtgaccccaacctgagcgcccctgagaaggctgtgaaccccacccccagctcctggagcctggacagcggcaaggaggccaagaacatgtctgattctgggaagctgatcagcccccctgtgcccccccggcccacccagacagccagccctgcccggcacaccacctctgtgagccccagccctgctggccgcagccccctgaagggctctgtgcagagcttcacccccagccctgtggagtaccacagccctggcctcatcagcaacagccctgtgctgagcggcagctacagcagcggcatcagcagcctgagccgctgcagcaccagcgagaccagcggctttgagaaccaggtgaatgagcagagcgcccccctgcctgtgcctgtgcctgtgcctgtgcccagctatggaggagaggagcctgtgaggaaggagagcaagaccccaccaccctacagcgtgtatgaaagaaccctgcggcggcctgtgcccctgccccacagcctgagcatccctgtgaccagcgagcccccagccctgccccccaagcccctggccgcccggagcagccacctggagaatggagccaggagaacagatcctggcccccggccccggcccctgcccaggaaggtgtcccagctgtag

SEQ ID NO: 149657 - DNA, 3318 bp, synthetic construct
  misc_feature 1..3318: note = Description of Artificial Sequence: Synthetic coding sequence
  source 1..3318: mol_type = other DNA
tggatccccagcgagaagcagaccttcttcaccgtgattgccagcttccggggcaccgtgccctacggcctgagcctggagatcggggacacagtgcagatcctggagaagtgtgatggctggtaccggggctttgccctgaagaaccccaacatcaagggcatcttccccagcagctatgtgcacctgaagaatgcctgtgtgaagaacaagggccagtttgagatggtgatccccacagaagattctgtcatcacagagatgaccagcaccctgcgggactggggcaccatgtggaagcagctgtatgtgagaaatgaaggagacctcttccaccggctgtggcacatcatgaatgagatcctggacctgcggcggcaggtgctggtgggccacctgacccatgacaggatgaaggatgtgaagaggcacatcacagcccggctggactggggcaatgagcagctgggcctggacctggtgcccaggaaggagtatgccatggtggaccctgaggacatcagcatcacagagctgtaccgcctgatggagcaccgccacaggaagaaggacacccctgtgcaggccagcagccaccacctgtttgtgcagatgaagagcctgatgtgcagcaacctgggggaggagctggaggtgatcttcagcctgtttgacagcaaggagaaccggcccatcagcgagcgcttcttcctgcggctgaacagaaatggcctgcccaaggccccagacaagccagagcggcactgcagcctgtttgtggacctgggcagcagcgagctgaggaaggacatctacatcaccgtgcacatcatccgcatcggccgcatgggcgctggggagaagaagaatgcctgcagcgtgcagtacagaagacccttcggctgtgctgtgctgagcattgctgacctgctgaccggggagaccaaggatgacctgatcctgaaggtgtacatgtgcaacacagagagcgagtggtaccagatccacgagaacatcatcaagaagctgaatgcccgctacaacctgaccggcagcaatgccggcctggccgtgtccctgcagctgctgcacggggacatcgagcagatcagaagagagtacagcagcgtcttcagccacggcgtgtccatcaccaggaagctgggcttcagcaacatcatcatgcctggagagatgagaaatgacctgtacatcaccatcgagcggggggagtttgagaagggcggcaagtctgtggccagaaatgtggaggtgaccatgtttattgtggacagcagcggccagaccctgaaggacttcatcagctttggaagtggagagcccccagccagcgagtaccacagctttgtgctgtaccacaacaacagcccccgctggagcgagctgctgaagctgcccatccctgtggacaagttccggggggcccacatccgctttgagttccgccactgcagcaccaaggagaagggggagaagaagctgtttggcttctcctttgtgcccctgatgcaggaggatggccgcaccctgcctgatggcacccatgagctgattgtgcacaagtgtgaggagaacaccaacctgcaggacaccacccgctacctgaagctgcccttcagcaagggcatcttcctgggcaacaacaaccaggccatgaaggccaccaaggagagcttctgcatcaccagcttcctgtgcagcaccaagctgacccagaatggagacatgctggacctgctgaagtggaggacccacccagacaagatcaccggctgcctgagcaagctgaaggagattgatggcagcgagatcgtgaagttcctgcaggacaccctggacaccctgtttggcatcctggatgagaacagccagaagtatggcagcaaggtgtttgacagcctggtgcacatcatcaacctgctgcaggacagcaagttccaccacttcaagcctgtgatggacacctacatcgagagccactttgctggggccctggcctacagagacctgatcaaggtgctgaagtggtacgtggaccgcatcacagaagctgagcggcaggagcacatccaggaggtgctgaaggcccaggagtacatcttcaagtacatcgtgcagagcagaagactcttcagcctggccaccggcggccagaatgaggaggagttccgctgctgcatccaggagctgctgatgtctgtgcgcttcttcctgagccaggagagcaagggcagcggggccctgagccagagccaggccgtgttcctgagcagcttccctgctgtgtacagcgagctgctgaagctgtttgatgtgcgggaggtggccaacctggtgcaggacaccctgggcagcctgcccaccatcctgcacgtggatgacagcctgcaggccatcaagctgcagtgcatcggcaagacagtggagagccagctgtacaccaacccagacagccgctacatcctgctgcctgtggtgctgcaccacctgcacatccacctgcaggagcagaaggacctgatcatgtgtgcccgcatcctgagcaatgtgttctgcctgatcaagaagaacagcagcgagaagtctgtgctggaggagattgatgtgattgtggccagcctgctggacatcctgctgcggaccatcctggagatcaccagccggccccagcccagcagcagcgccatgaggttccagttccaggatgtgactggagaatttgtggcctgcctgctgagcctgctgcggcagatgacagacagacactaccagcagctgctggacagcttcaacaccaaggaggagctgcgggacttcctgctgcagatcttcaccgtcttccgcatcctgatccggcctgagatgttccccaaggactggacagtgatgaggctggtggccaacaacgtcatcatcaccaccgtgctgtacctgagtgatgccctgaggaagaacttcctgaatgaaaattttgactacaagatctgggacagctacttctacctggccgtcatcttcatcaaccagctgtgcctgcagctggagatgttcacccccagcaagaagaagaaggtgctggagaagtacggggacatgagggtgaccatgggctgtgagatcttctccatgtggcagaacctgggggagcacaagctgcacttcatcccagccctgcggcaggagaaccggctgaacctgggcggcggcggctgcagcgagccccgggcctgccactgcaccccagcctgggccaccaagagggactgtgtgtccaagaagaaggagaagaagacctag

SEQ ID NO: 149658 - DNA, 6144 bp, synthetic construct
  misc_feature 1..6144: note = Description of Artificial Sequence: Synthetic coding sequence
  source 1..6144: mol_type = other DNA
atggccgccagcgagcggcgggcctttgcccacaagatcaacagaacagtggccgctgaggtgaggaagcaggtgtcccgggagaggagcggcagcccccacagcagccgccgctgcagcagcagcctgggcgtgcccctgacagaggtggtggagcccctggactttgaagatgtgctgctgagccggcccccagatgctgagcccggccccctgcgggacctggtggagttcccagcagatgacctggagctgctgctgcagcccagagaatgtaggaccacagagcccggcatccccaaggatgagaagctggatgcccaggtgcgggctgctgtggagatgtacatcgaggactgggtgattgtgcaccggcgctaccagtacctgtctgctgcctacagccctgtgaccacagacacccagcgggagcggcagaagggcctgccccggcaggtgtttgagcaggatgccagcggagatgagaggagcggccctgaggacagcaatgacagcagaagaggcagcggcagccctgaggacacccccaggagcagcggggccagcagcatctttgacctgaggaacctggccgctgacagcctgctgcccagcctgctggagcgggccgccccagaagatgtggacagaagaaatgagaccctgcggcggcagcaccggcccccagccctgctgaccctgtacccagccccagatgaagatgaagctgtggagcgctgcagcaggcctgagcccccccgggagcacttcggccagaggatcctggtgaagtgcctgagcctgaagtttgaaattgaaattgagcccatcttcggcatcctggccctgtatgatgtgcgggagaagaagaagatcagcgagaacttctactttgacctgaacagcgacagcatgaagggcctgctgcgggcccacggcacccacccagccatcagcaccctggcccggagcgccatcttctctgtgacctaccccagcccagacatcttcctggtgatcaagctggagaaggtgctgcagcagggcgacatcagcgagtgctgtgagccctacatggtgctgaaggaggtggacacagccaagaacaaggagaagctggagaagctgcggctggccgctgagcagttctgcacccggctgggccgctacaggatgccctttgcctggacagctgtgcacctggccaacatcgtgtcctctgctggccagctggaccgggacagcgacagcgagggggagaggaggcctgcctggacagacagaagaagaagaggcccccaggaccgggccagcagtggagatgatgcctgcagcttcagcggcttccggcctgccaccctgactgtgaccaacttcttcaagcaggaggccgagcggctgagtgatgaggacctcttcaagttcctggccgacatgaggcggcccagcagcctgctgcggcggctgcggcctgtgacagcccagctgaagattgacatcagccctgcccctgagaacccccacttctgcctgagccctgagctgctgcacatcaagccctacccagacccccggggccggcccaccaaggagatcctggagttccctgcccgggaggtgtatgccccccacaccagctacagaaacctgctgtatgtgtacccccacagcctgaacttcagcagccggcagggctctgtgaggaacctggccgtgcgggtgcagtacatgaccggggaggaccccagccaggccctgcctgtgatctttgggaagagcagctgcagcgagttcacccgggaggccttcacccctgtggtgtaccacaacaagagccctgagttctatgaggagttcaagctgcacctgcctgcctgtgtgacagagaaccaccacctgctcttcaccttctaccacgtgtcctgccagccccggcccggcacagccctggagacccctgtgggcttcacctggatccccctgctgcagcacggccgcctgaggacaggccccttctgcctgcctgtgtctgtggaccagcccccacccagctacagcgtgctgaccccagatgtggccctgcccggcatgcgctgggtggatggccacaagggcgtcttctctgtggagctgacagctgtgtcctctgtgcacccccaggacccctacctggacaagttcttcaccctggtgcacgtgctggaggagggcgccttccccttccggctgaaggacacagtgctgtctgagggcaatgtggagcaggagctgcgggccagcctggccgccctgcggctggccagccctgagcccctggtggccttcagccaccacgtgctggacaagctggtgcggctggtgatccggccccccatcatcagcggccagatcgtgaacctgggccgcggggcctttgaggccatggcccacgtggtgtccctggtgcacaggagcctggaggccgcccaggatgcccggggccactgcccccagctggccgcctacgtgcactacgccttccggctgcctggaacagagcccagcctgcctgatggagcccctcctgtgacagtgcaggccgccaccctggcccggggcagcggccggcctgccagcctgtacctggcccggagcaagagcatcagcagcagcaacccagacctggccgtggcccctggctctgtggatgatgaggtgagccgcatcctggccagcaagctgctgcacgaggagctggccctgcagtgggtggtgagcagcagcgctgtgcgggaggccatcctgcagcacgcctggttcttcttccagctgatggtgaagtccatggccctgcacctgctgctgggccagaggctggacacccccaggaagctgcgcttccctggccgcttcctggatgacatcacagccctggtgggctctgtgggcctggaggtgatcaccagggtgcacaaggatgtggagctggccgagcacctgaatgccagcctggccttcttcctgagtgacctgctgagcctggtggaccggggctttgtgttcagcctggtgcgggcccactacaagcaggtggccacccggctgcagagcagccccaacccagctgccctgctgaccctgaggatggagttcacccgcatcctgtgcagccatgagcactacgtgaccctgaacctgccctgctgccccctgagccccccagccagccccagccccagcgtgagcagcaccaccagccagagcagcaccttcagcagccaggccccagaccccaaggtgacctccatgtttgagctgagcggccccttccggcagcagcacttcctggccggcctgctgctgacagagctggccctggccctggagcctgaggccgagggcgccttcctgctgcacaagaaggccatctctgctgtgcacagcctgctgtgtggccatgacacagaccccaggtatgcagaggccaccgtgaaggcccgggtggccgagctgtacctgcccctgctgagcatcgcccgggacaccctgccccggctgcatgactttgctgagggccctggccagaggagccggctggcctccatgctggacagcgacacagaaggagagggggacattgctggcaccatcaaccccagcgtggccatggccatcgccggcggccccctggcccctggcagccgggccagcatcagccagggccccccaacagccagcagagctggctgtgccctgtctgctgagagcagcaggaccctgctggcctgtgtgctgtgggtgctgaagaacacagagcccgccctgctgcagcgctgggccacagacctgaccctgccccagctgggccgcctgctggacctgctgtacctgtgcctggccgcctttgagtacaagggcaagaaggcctttgagcgcatcaacagcctgaccttcaagaagagcctggacatgaaggcccggctggaggaggccatcctgggcaccatcggggcccggcaggagatggtgagaagaagccgggagaggagcccctttggaaatccagaaaatgtgcgctggaggaagtctgtgacccactggaagcagaccagtgacagagtggacaagaccaaggatgagatggagcacgaggccctggtggagggcaacctggccacagaggccagcctggtggtgctggacaccctggagatcatcgtgcagacagtgatgctgtctgaggcccgggagagcgtgctgggcgctgtgctgaaggtggtgctgtacagcctgggcagcgcccagagcgccctcttcctgcagcacggcctggccacccagagggccctggtgtccaagtttcctgagctgctgtttgaggaggacacagagctgtgtgccgacctgtgcctgcggctgctgcggcactgcggcagccgcatcagcaccatccgcacccacgccagcgccagcctgtacctgctgatgaggcagaactttgaaattggccacaactttgcccgggtgaagatgcaggtgaccatgagcctgagcagcctggtgggcaccacccagaacttcagcgaggagcacctgcggcgcagcctgaagaccatcctgacctacgccgaggaggacatgggcctgcgggacagcacctttgctgagcaggtgcaggacctgatgttcaacctgcacatgatcctgacagacacagtgaagatgaaggagcaccaggaggaccctgagatgctgattgacctgatgtacagaattgcccggggctaccagggcagcccagacctgcggctgacctggctgcagaacatggccggcaagcacgccgagctgggcaaccacgccgaggccgcccagtgcatggtgcatgctgctgccctggtggccgagtacctggccctgctggaggaccaccgccacctgcctgtgggctgtgtgtccttccagaacatcagcagcaatgtgctggaggagagcgccatcagtgatgacatcctgagcccagatgaggagggcttctgcagcggcaagcacttcacagagctgggcctggtgggcctgctggagcaggccgccggctacttcaccatgggcggcctgtatgaggccgtgaatgaggtgtacaagaacctgatccccatcctggaggcccaccgggactacaagaagctggccgctgtgcacggcaagctgcaggaggccttcaccaagatcatgcaccagagcagcggctgggagcgggtgtttggcacctacttccgggtgggcttctatggagcccactttggagacctggatgagcaggagtttgtgtacaaggagcccagcatcaccaagctggccgagatcagccaccggctggaggagttctacacagaaagatttggagatgatgtggtggagatcatcaaggacagcaaccctgtggacaagagcaagctggacagccagaaggcctacatccagatcacctacgtggagccctactttgacacctatgagctgaaggacagagtgacctactttgacagaaattatggcctgcggaccttcctgttctgcacccccttcaccccagatggccgggcccatggagagctgcctgagcagcacaagaggaagaccctgctgagcacagaccacgccttcccctacatcaagacccgcatccgggtgtgccaccgggaggagaccgtgctgacccctgtggaggtggccatcgaggacatgcagaagaagacccgggagctggcctttgccacagagcaggaccccccagatgccaagatgctgcagatggtgctgcagggctctgtgggccccaccgtgaaccagggccccctggaggtggcccaggtgttcctggccgagatccctgaggaccccaagctgttccgccaccacaacaagctgcggctgtgcttcaaggacttctgcaagaagtgtgaagatgccctgaggaagaacaaggccctgattggccctgaccagaaggagtaccaccgggagctggagaggaactactgccgcctgcgggaggccctgcagcccctgctgacccagaggctgccccagctgatggcccccaccccacctggcctgaggaacagcctgaacagagccagcttcaggaaggctgacctgtag

SEQ ID NO: 149659 - DNA, 4161 bp, synthetic construct
  misc_feature 1..4161: note = Description of Artificial Sequence: Synthetic coding sequence
  source 1..4161: mol_type = other DNA
atgcgctgggtggatggccacaagggcgtcttctctgtggagctgacagctgtgtcctctgtgcacccccaggacccctacctggacaagttcttcaccctggtgcacgtgctggaggagggcgccttccccttccggctgaaggacacagtgctgtctgagggcaatgtggagcaggagctgcgggccagcctggccgccctgcggctggccagccctgagcccctggtggccttcagccaccacgtgctggacaagctggtgcggctggtgatccggccccccatcatcagcggccagatcgtgaacctgggccgcggggcctttgaggccatggcccacgtggtgtccctggtgcacaggagcctggaggccgcccaggatgcccggggccactgcccccagctggccgcctacgtgcactacgccttccggctgcctggaacagagcccagcctgcctgatggagcccctcctgtgacagtgcaggccgccaccctggcccggggcagcggccggcctgccagcctgtacctggcccggagcaagagcatcagcagcagcaacccagacctggccgtggcccctggctctgtggatgatgaggtgagccgcatcctggccagcaagggcatcgacaggagccacagctgggtgaacagcgcctatgcccctgggggcagcaaggctgtgctgcggcgggccccaccctactgtggggctgacccccggcagctgctgcacgaggagctggccctgcagtgggtggtgagcagcagcgctgtgcgggaggccatcctgcagcacgcctggttcttcttccagctgatggtgaagtccatggccctgcacctgctgctgggccagaggctggacacccccaggaagctgcgcttccctggccgcttcctggatgacatcacagccctggtgggctctgtgggcctggaggtgatcaccagggtgcacaaggatgtggagctggccgagcacctgaatgccagcctggccttcttcctgagtgacctgctgagcctggtggaccggggctttgtgttcagcctggtgcgggcccactacaagcaggtggccacccggctgcagagcagccccaacccagctgccctgctgaccctgaggatggagttcacccgcatcctgtgcagccatgagcactacgtgaccctgaacctgccctgctgccccctgagccccccagccagccccagccccagcgtgagcagcaccaccagccagagcagcaccttcagcagccaggccccagaccccaaggtgacctccatgtttgagctgagcggccccttccggcagcagcacttcctggccggcctgctgctgacagagctggccctggccctggagcctgaggccgagggcgccttcctgctgcacaagaaggccatctctgctgtgcacagcctgctgtgtggccatgacacagaccccaggtatgcagaggccaccgtgaaggcccgggtggccgagctgtacctgcccctgctgagcatcgcccgggacaccctgccccggctgcatgactttgctgagggccctggccagaggagccggctggcctccatgctggacagcgacacagaaggagagggggacattgctggcaccatcaaccccagcgtggccatggccatcgccggcggccccctggcccctggcagccgggccagcatcagccagggccccccaacagccagccgggccggctgtgccctgtctgctgagagcagcaggaccctgctggcctgtgtgctgtgggtgctgaagaacacagagcccgccctgctgcagcgctgggccacagacctgaccctgccccagctgggccgcctgctggacctgctgtacctgtgcctggccgcctttgagtacaagggcaagaaggcctttgagcgcatcaacagcctgaccttcaagaagagcctggacatgaaggcccggctggaggaggccatcctgggcaccatcggggcccggcaggagatggtgcggcgcagccgggagaggagccccttcggcaacccagaaaatgtgcgctggaggaagtctgtgacccactggaagcagaccagtgacagagtggacaagaccaaggatgagatggagcacgaggccctggtggagggcaacctggccacagaggccagcctggtggtgctggacaccctggagatcatcgtgcagacagtgatgctgtctgaggcccgggagagcgtgctgggcgctgtgctgaaggtggtgctgtacagcctgggcagcgcccagagcgccctcttcctgcagcacggcctggccacccagagggccctggtgtccaagtttcctgagctgctgtttgaggaggacacagagctgtgtgccgacctgtgcctgcggctgctgcggcactgcggcagccgcatcagcaccatccgcacccacgccagcgccagcctgtacctgctgatgaggcagaactttgagatcggccacaactttgcccgggtgaagatgcaggtgaccatgagcctgagcagcctggtgggcaccacccagaacttcagcgaggagcacctgcggcgcagcctgaagaccatcctgacctatgcagaggaggacatgggcctgcgggacagcacctttgctgagcaggtgcaggacctgatgttcaacctgcacatgatcctgacagacacagtgaagatgaaggagcaccaggaggaccctgagatgctgattgacctgatgtaccgcatcgcccggggctaccagggcagcccagacctgcggctgacctggctgcagaacatggccggcaagcatgctgagctgggcaaccacgccgaggccgcccagtgcatggtgcacgccgccgccctggtggccgagtacctggccctgctggaggaccaccgccacctgcctgtgggctgtgtgtccttccagaacatcagcagcaatgtgctggaggagagcgccatcagtgatgacatcctgagcccagatgaggagggcttctgcagcggcaagcacttcacagagctgggcctggtgggcctgctggagcaggccgccggctacttcaccatgggcggcctgtatgaagctgtgaatgaggtgtacaagaacctgatccccatcctggaggcccaccgggactacaagaagctggccgctgtgcacggcaagctgcaggaggccttcaccaagatcatgcaccagagcagcggctgggagcgggtgtttggcacctacttccgggtgggcttctacggggcccactttggagacctggatgagcaggagtttgtgtacaaggagcccagcatcaccaagctggccgagatcagccaccggctggaggagttctacacagaaagatttggagatgatgtggtggagatcatcaaggacagcaaccctgtggacaagagcaagctggacagccagaaggcctacatccagatcacctacgtggagccctactttgacacctatgagctgaaggacagagtgacctactttgacaggaactacggcctgcggaccttcctgttctgcacccccttcaccccagatggccgggcccacggggagctgcctgagcagcacaagaggaagaccctgctgagcacagaccacgccttcccctacatcaagacccgcatccgggtgtgccaccgggaggagaccgtgctgacccctgtggaggtggccatcgaggacatgcagaagaagacccgggagctggcctttgccacagagcaggaccccccagatgccaagatgctgcagatggtgctgcagggctctgtgggccccaccgtgaaccagggccccctggaggtggcccaggtgttcctggccgagatccctgaggaccccaagctgttccgccaccacaacaagctgcggctgtgcttcaaggacttctgcaagaagtgtgaagatgccctgaggaagaacaaggccctgattggaccagaccagaaggagtaccaccgggagctggagaggaactactgccgcctgcgggaggccctgcagcccctgctgacccagaggctgccccagctgatggcccccaccccacctggcctgaggaacagcctgaacagagccagcttcaggaaggctgacctgtag

SEQ ID NO: 149660 - DNA, 5973 bp, synthetic construct
  misc_feature 1..5973: note = Description of Artificial Sequence: Synthetic coding sequence
  source 1..5973: mol_type = other DNA
atggccaccctgcccagcgctgagcggcgggcctttgccctgaagatcaaccgctacagcagcgctgagatcaggaagcagttcaccctgccccccaacctgggccagtaccaccggcagagcatcagcaccagcggcttccccagcctgcagctgccccagttctatgaccctgtggagcctgtggactttgagggcctgctgatgacccacctgaacagcctggatgtgcagctggcccaggagctgggggacttcacagatgatgacctggatgtggtgttcacccccaaggaatgtaggaccctgcagcccagcctgcctgaggagggcgtggagctggacccccacgtgcgggactgtgtgcagacctacatccgggagtggctgattgtgaacaggaagaaccagggcagccctgagatctgtggcttcaagaagacaggcagcaggaaggacttccacaagaccctgcccaagcagacctttgaaagtgagaccctggagtgcagcgagcctgctgcccaggccggccccaggcacctgaatgtgctgtgtgatgtgtctggaaaaggacctgtgacagcctgtgactttgacctgcggagcctgcagcctgacaagaggctggagaacctgctgcagcaggtgtctgctgaggactttgagaagcagaatgaggaggcccggaggaccaaccggcaggccgagctgtttgccctgtaccccagcgtggatgaggaggatgctgtggagatccggcctgtgcctgagtgccccaaggagcacctgggcaaccgcatcctggtgaagctgctgaccctgaagtttgaaattgaaattgagcccctgtttgccagcatcgccctgtatgatgtgaaggagaggaagaagatcagcgagaacttccactgtgacctgaacagcgaccagttcaagggcttcctgcgggcccacacccccagcgtggccgccagcagccaggcccggtctgctgtgttttctgtgacctaccccagcagtgacatctacctggtggtgaagattgagaaggtgctgcagcagggcgagatcggggactgtgccgagccctacaccgtcatcaaggagagtgatggcggcaagagcaaggagaagattgagaagctgaagctgcaggccgagagcttctgccagaggctgggcaagtacaggatgccctttgcctgggcccccatcagcctgagcagcttcttcaacgtgtccaccctggagcgggaggtgacagatgtggacagcgtggtgggccgcagctctgtgggggagaggaggaccctggcccagagccggcggctgtctgagcgggccctgagcctggaggagaatggagtgggcagcaacttcaagaccagcaccctgtctgtgagcagcttcttcaagcaggagggggaccggctgagtgatgaggacctcttcaagttcctggccgactacaagaggagcagcagcctgcagaggagagtgaagagcatccctggcctgctgcggctggagatcagcacagcccctgagatcatcaactgctgcctgaccccagagatgctgcctgtgaagcccttcccagaaaatagaacccggccccacaaggagatcctggagttccccacccgggaggtgtatgtgccccacacagtgtacagaaacctgctgtatgtgtacccccagaggctgaactttgtgaacaagctggccagcgccaggaacatcaccatcaagatccagttcatgtgtggggaggatgccagcaatgccatgcctgtgatctttgggaagagcagcggccctgagttcctgcaggaggtgtacacagctgtgacctaccacaacaagagcccagacttctatgaggaggtgaagatcaagctgcctgccaagctgactgtgaaccaccacctgctcttcaccttctaccacatcagctgccagcagaagcagggcgcctctgtggagaccctgctgggctacagctggctgcccatcctgctgaatgaaaggctgcagacaggcagctactgcctgcctgtggccctggagaagctgccccccaactacagcatgcacagcgctgagaaggtgcccctgcagaacccccccatcaagtgggccgagggccacaagggcgtcttcaacatcgaggtgcaggccgtgtcctctgtgcacacccaggacaaccacctggagaagttcttcaccctgtgccacagcctggagagccaggtgaccttccccatccgggtgctggaccagaagatcagcgagatggccctggagcacgagctgaagctgagcatcatctgcctgaacagcagccggctggagcccctggtgctcttcctgcacctggtgctggacaagctgttccagctgtctgtgcagcccatggtgattgctggccagacagccaacttcagccagtttgcctttgaatctgtggtggccatcgccaacagcctgcacaacagcaaggacctgagcaaggaccagcacggcaggaactgcctgctggccagctatgtgcactacgtgttccggctgcctgaggtgcagagagatgtgcccaagagcggggcccccacagccctgctggaccccaggagctaccacacctacggccgcaccagcgctgctgctgtgagcagcaagctgctgcaggcccgggtgatgagcagcagcaacccagacctggccggcacccacagcgctgctgatgaggaggtgaagaacatcatgagcagcaagcacttccacgaggagctggccctgcagatggtggtgtccacaggcatggtgcgggagaccgtcttcaagtatgcctggttcttctttgagctgctggtgaagtccatggcccagcacgtgcacaacatggacaagagggacagcttccggaggacccgcttcagtgaccgcttcatggatgacatcaccaccatcgtgaatgtggtgaccagcgagattgctgccctgctggtgaagccccagaaggaaaatgagcaggccgagaagatgaacatcagcctggccttcttcctgtatgacctgctgagcctgatggaccggggctttgtgttcaacctgatccgccactactgcagccagctgagcgccaagctgagcaacctgcccaccctcatctccatgaggctggagttcctgcgcatcctgtgcagccatgagcactacctgaacctgaacctcttcttcatgaatgctgacacagcccccaccagcccctgccccagcatcagcagccagaacagcagcagctgcagcagcttccaggaccagaagatcgcctccatgtttgacctgaccagcgagtaccggcagcagcacttcctgaccggcctgctcttcacagagctggccgccgccctggatgctgagggggagggcatcagcaaggtgcagaggaaggctgtgtctgccatccacagcctgctgagcagccatgacctggacccccgctgtgtgaagccagaggtgaaggtgaagattgctgccctgtacctgcccctggtgggcatcatcctggatgccctgccccagctgtgtgacttcaccgtggccgacacccggcgctaccgcaccagcggcagtgatgaggagcaggagggcgctggggccatcaaccagaatgtggccctggccatcgccggcaacaacttcaacctgaagaccagcggcatcgtgctgagcagcctgccctacaagcagtacaacatgctgaatgctgacaccaccaggaacctgatgatctgcttcctgtggatcatgaagaatgctgaccagagcctcatcaggaagtggattgctgacctgcccagcacccagctgaaccgcatcctggacctgctcttcatctgtgtgctgtgctttgagtacaagggcaagcagagcagtgacaaggtgtccacccaggtgctgcagaagagcagagatgtgaaggcccggctggaggaggccctgctgcggggggagggcgcccggggggagatgatgagaagaagagcccctggaaatgaccgcttccctggcctgaatgaaaacctgcgctggaagaaggagcagacccactggaggcaggccaatgagaagctggacaagaccaaggccgagctggaccaggaggccctgatcagcggcaacctggccacagaggcccacctgatcatcctggacatgcaggagaacatcatccaggccagcagcgccctggactgcaaggacagcctgctgggcggcgtgctgcgggtgctggtgaacagcctgaactgtgaccagagcaccacctacctgacccactgctttgccaccctgcgggccctgattgccaagtttggagacctgctgtttgaggaggaggtggagcagtgctttgacctgtgccaccaggtgctgcaccactgcagcagctccatggatgtgaccaggagccaggcctgtgccaccctgtacctgctgatgaggttctcctttggagccaccagcaactttgcccgggtgaagatgcaggtgaccatgagcctggccagcctggtgggccgggccccagacttcaatgaggagcacctgcggcgcagcctgcggaccatcctggcctacagcgaggaggacacagccatgcagatgacccccttccccacccaggtggaggagctgctgtgcaacctgaacagcatcctgtatgacacagtgaagatgagggagttccaggaggaccctgagatgctgatggacctgatgtaccgcatcgccaagagctaccaggccagcccagacctgcggctgacctggctgcagaacatggccgagaagcacaccaagaagaagtgctacacagaagctgccatgtgcctggtgcacgccgccgccctggtggccgagtacctgtccatgctggaggaccacagctacctgcctgtgggctctgtgtccttccagaacatcagcagcaatgtgctggaggagagcgtggtgtctgaggacaccctgagcccagatgaagatggagtgtgtgccggccagtacttcacagagagcggcctggtgggcctgctggagcaggccgctgagctgttcagcactggaggcctgtatgaaacagtgaatgaggtgtacaagctggtgatccccatcctggaggcccaccgggagttcaggaagctgaccctgacccacagcaagctgcagagggcctttgacagcatcgtgaacaaggaccacaagaggatgtttggcacctacttccgggtgggcttcttcggcagcaagtttggagacctggatgagcaggagtttgtgtacaaggagcccgccatcaccaagctgcctgagatcagccaccggctggaggccttctacggccagtgctttggagctgagtttgtggaggtgatcaaggacagcacccctgtggacaagaccaagctggaccccaacaaggcctacatccagatcacctttgtggagccctactttgatgaatatgagatgaaggacagagtgacctactttgagaagaacttcaacctgcggcgcttcatgtacaccacccccttcaccctggagggccggcccagaggagagctgcacgagcagtacagaagaaacacagtgctgaccaccatgcacgccttcccctacatcaagacccgcatcagcgtcatccagaaggaggagtttgtgctgacccccatcgaggtggccatcgaggacatgaagaagaagaccctgcagctggccgtggccatcaaccaggagcccccagatgccaagatgctgcagatggtgctgcagggctctgtgggcgccaccgtgaaccagggccccctggaggtggcccaggtgttcctggccgagatcccagctgaccccaagctgtaccgccaccacaacaagctgcggctgtgcttcaaggagttcatcatgtag

SEQ ID NO: 149661 - DNA, 6096 bp, synthetic construct
  misc_feature 1..6096: note = Description of Artificial Sequence: Synthetic coding sequence
  source 1..6096: mol_type = other DNA
atgacccacctgaacagcctggatgtgcagctggcccaggagctgggggacttcacagatgatgacctggatgtggtgttcacccccaaggaatgtaggaccctgcagcccagcctgcctgaggagggcgtggagctggacccccacgtgcgggactgtgtgcagacctacatccgggagtggctgattgtgaacaggaagaaccagggcagccctgagatctgtggcttcaagaagacaggcagcaggaaggacttccacaagaccctgcccaagcagacctttgaaagtgagaccctggagtgcagcgagcctgctgcccaggccggccccaggcacctgaatgtgctgtgtgatgtgtctggaaaaggacctgtgacagcctgtgactttgacctgcggagcctgcagcctgacaagaggctggagaacctgctgcagcaggtgtctgctgaggactttgagaagcagaatgaggaggcccggaggaccaaccggcaggccgagctgtttgccctgtaccccagcgtggatgaggaggatgctgtggagatccggcctgtgcctgagtgccccaaggagcacctgggcaaccgcatcctggtgaagctgctgaccctgaagtttgaaattgaaattgagcccctgtttgccagcatcgccctgtatgatgtgaaggagaggaagaagatcagcgagaacttccactgtgacctgaacagcgaccagttcaagggcttcctgcgggcccacacccccagcgtggccgccagcagccaggcccggtctgctgtgttttctgtgacctaccccagcagtgacatctacctggtggtgaagattgagaaggtgctgcagcagggcgagatcggggactgtgccgagccctacaccgtcatcaaggagagtgatggcggcaagagcaaggagaagattgagaagctgaagctgcaggccgagagcttctgccagaggctgggcaagtacaggatgccctttgcctgggcccccatcagcctgagcagcttcttcaacgtgtccaccctggagcgggaggtgacagatgtggacagcgtggtgggccgcagctctgtgggggagaggaggaccctggcccagagccggcggctgtctgagcgggccctgagcctggaggagaatggagtgggcagcaacttcaagaccagcaccctgtctgtgagcagcttcttcaagcaggagggggaccggctgagtgatgaggacctcttcaagttcctggccgactacaagaggagcagcagcctgcagaggagagtgaagagcatccctggcctgctgcggctggagatcagcacagcccctgagatcatcaactgctgcctgaccccagagatgctgcctgtgaagcccttcccagaaaatagaacccggccccacaaggagatcctggagttccccacccgggaggtgtatgtgccccacacagtgtacagaaacctgctgtatgtgtacccccagaggctgaactttgtgaacaagctggccagcgccaggaacatcaccatcaagatccagttcatgtgtggggaggatgccagcaatgccatgcctgtgatctttgggaagagcagcggccctgagttcctgcaggaggtgtacacagctgtgacctaccacaacaagagcccagacttctatgaggaggtgaagatcaagctgcctgccaagctgactgtgaaccaccacctgctcttcaccttctaccacatcagctgccagcagaagcagggcgcctctgtggagaccctgctgggctacagctggctgcccatcctgctgaatgaaaggctgcagacaggcagctactgcctgcctgtggccctggagaagctgccccccaactacagcatgcacagcgctgagaaggtgcccctgcagaacccccccatcaagtgggccgagggccacaagggcgtcttcaacatcgaggtgcaggccgtgtcctctgtgcacacccaggacaaccacctggagaagttcttcaccctgtgccacagcctggagagccaggtgaccttccccatccgggtgctggaccagaagatcagcgagatggccctggagcacgagctgaagctgagcatcatctgcctgaacagcagccggctggagcccctggtgctcttcctgcacctggtgctggacaagctgttccagctgtctgtgcagcccatggtgattgctggccagacagccaacttcagccagtttgcctttgaatctgtggtggccatcgccaacagcctgcacaacagcaaggacctgagcaaggaccagcacggcaggaactgcctgctggccagctatgtgcactacgtgttccggctgcctgaggtgcagagagatgtgcccaagagcggggcccccacagccctgctggaccccaggagctaccacacctacggccgcaccagcgctgctgctgtgagcagcaagctgctgcaggcccgggtgatgagcagcagcaacccagacctggccggcacccacagcgctgctgatgaggaggtgaagaacatcatgagcagcaagattgctgacaggaactgcagcaggatgagctactactgcagcggcagcagtgatgcccccagcagccctgctgcccccaggcctgccagcaagaagcacttccacgaggagctggccctgcagatggtggtgtccacaggcatggtgcgggagaccgtcttcaagtatgcctggttcttctttgagctgctggtgaagtccatggcccagcacgtgcacaacatggacaagagggacagcttccggaggacccgcttcagtgaccgcttcatggatgacatcaccaccatcgtgaatgtggtgaccagcgagattgctgccctgctggtgaagccccagaaggaaaatgagcaggccgagaagatgaacatcagcctggccttcttcctgtatgacctgctgagcctgatggaccggggctttgtgttcaacctgatccgccactactgcagccagctgagcgccaagctgagcaacctgcccaccctcatctccatgaggctggagttcctgcgcatcctgtgcagccatgagcactacctgaacctgaacctcttcttcatgaatgctgacacagcccccaccagcccctgccccagcatcagcagccagaacagcagcagctgcagcagcttccaggaccagaagatcgcctccatgtttgacctgaccagcgagtaccggcagcagcacttcctgaccggcctgctcttcacagagctggccgccgccctggatgctgagggggagggcatcagcaaggtgcagaggaaggctgtgtctgccatccacagcctgctgagcagccatgacctggacccccgctgtgtgaagccagaggtgaaggtgaagattgctgccctgtacctgcccctggtgggcatcatcctggatgccctgccccagctgtgtgacttcaccgtggccgacacccggcgctaccgcaccagcggcagtgatgaggagcaggagggcgctggggccatcaaccagaatgtggccctggccatcgccggcaacaacttcaacctgaagaccagcggcatcgtgctgagcagcctgccctacaagcagtacaacatgctgaatgctgacaccaccaggaacctgatgatctgcttcctgtggatcatgaagaatgctgaccagagcctcatcaggaagtggattgctgacctgcccagcacccagctgaaccgcatcctggacctgctcttcatctgtgtgctgtgctttgagtacaagggcaagcagagcagtgacaaggtgtccacccaggtgctgcagaagagcagagatgtgaaggcccggctggaggaggccctgctgcggggggagggcgcccggggggagatgatgagaagaagagcccctggaaatgaccgcttccctggcctgaatgaaaacctgcgctggaagaaggagcagacccactggaggcaggccaatgagaagctggacaagaccaaggccgagctggaccaggaggccctgatcagcggcaacctggccacagaggcccacctgatcatcctggacatgcaggagaacatcatccaggccagcagcgccctggactgcaaggacagcctgctgggcggcgtgctgcgggtgctggtgaacagcctgaactgtgaccagagcaccacctacctgacccactgctttgccaccctgcgggccctgattgccaagtttggagacctgctgtttgaggaggaggtggagcagtgctttgacctgtgccaccaggtgctgcaccactgcagcagctccatggatgtgaccaggagccaggcctgtgccaccctgtacctgctgatgaggttctcctttggagccaccagcaactttgcccgggtgaagatgcaggtgaccatgagcctggccagcctggtgggccgggccccagacttcaatgaggagcacctgcggcgcagcctgcggaccatcctggcctacagcgaggaggacacagccatgcagatgacccccttccccacccaggtggaggagctgctgtgcaacctgaacagcatcctgtatgacacagtgaagatgagggagttccaggaggaccctgagatgctgatggacctgatgtaccgcatcgccaagagctaccaggccagcccagacctgcggctgacctggctgcagaacatggccgagaagcacaccaagaagaagtgctacacagaagctgccatgtgcctggtgcacgccgccgccctggtggccgagtacctgtccatgctggaggaccacagctacctgcctgtgggctctgtgtccttccagaacatcagcagcaatgtgctggaggagagcgtggtgtctgaggacaccctgagcccagatgaagatggagtgtgtgccggccagtacttcacagagagcggcctggtgggcctgctggagcaggccgctgagctgttcagcactggaggcctgtatgaaacagtgaatgaggtgtacaagctggtgatccccatcctggaggcccaccgggagttcaggaagctgaccctgacccacagcaagctgcagagggcctttgacagcatcgtgaacaaggaccacaagaggatgtttggcacctacttccgggtgggcttcttcggcagcaagtttggagacctggatgagcaggagtttgtgtacaaggagcccgccatcaccaagctgcctgagatcagccaccggctggaggccttctacggccagtgctttggagctgagtttgtggaggtgatcaaggacagcacccctgtggacaagaccaagctggaccccaacaaggcctacatccagatcacctttgtggagccctactttgatgaatatgagatgaaggacagagtgacctactttgagaagaacttcaacctgcggcgcttcatgtacaccacccccttcaccctggagggccggcccagaggagagctgcacgagcagtacagaagaaacacagtgctgaccaccatgcacgccttcccctacatcaagacccgcatcagcgtcatccagaaggaggagtttgtgctgacccccatcgaggtggccatcgaggacatgaagaagaagaccctgcagctggccgtggccatcaaccaggagcccccagatgccaagatgctgcagatggtgctgcagggctctgtgggcgccaccgtgaaccagggccccctggaggtggcccaggtgttcctggccgagatcccagctgaccccaagctgtaccgccaccacaacaagctgcggctgtgcttcaaggagttcatcatgagatgtggggaggccgtggagaagaacaagaggctcatcacagctgaccagcgggagtaccagcaggagctgaagaagaactacaacaagctgaaggagaacctgcggcccatgattgaaaggaagatccctgagctgtacaagcccatcttccgggtggagagccagaagagggacagcttccacaggagcagcttcagaaaatgtgagacccagctgagccagggcagctag

SEQ ID NO: 149662 - DNA, 6300 bp, synthetic construct
  misc_feature 1..6300: note = Description of Artificial Sequence: Synthetic coding sequence
  source 1..6300: mol_type = other DNA
atggccaccctgcccagcgctgagcggcgggcctttgccctgaagatcaaccgctacagcagcgctgagatcaggaagcagttcaccctgccccccaacctgggccagtaccaccggcagagcatcagcaccagcggcttccccagcctgcagctgccccagttctatgaccctgtggagcctgtggactttgagggcctgctgatgacccacctgaacagcctggatgtgcagctggcccaggagctgggggacttcacagatgatgacctggatgtggtgttcacccccaaggaatgtaggaccctgcagcccagcctgcctgaggagggcgtggagctggacccccacgtgcgggactgtgtgcagacctacatccgggagtggctgattgtgaacaggaagaaccagggcagccctgagatctgtggcttcaagaagacaggcagcaggaaggacttccacaagaccctgcccaagcagacctttgaaagtgagaccctggagtgcagcgagcctgctgcccaggccggccccaggcacctgaatgtgctgtgtgatgtgtctggaaaaggacctgtgacagcctgtgactttgacctgcggagcctgcagcctgacaagaggctggagaacctgctgcagcaggtgtctgctgaggactttgagaagcagaatgaggaggcccggaggaccaaccggcaggccgagctgtttgccctgtaccccagcgtggatgaggaggatgctgtggagatccggcctgtgcctgagtgccccaaggagcacctgggcaaccgcatcctggtgaagctgctgaccctgaagtttgaaattgaaattgagcccctgtttgccagcatcgccctgtatgatgtgaaggagaggaagaagatcagcgagaacttccactgtgacctgaacagcgaccagttcaagggcttcctgcgggcccacacccccagcgtggccgccagcagccaggcccggtctgctgtgttttctgtgacctaccccagcagtgacatctacctggtggtgaagattgagaaggtgctgcagcagggcgagatcggggactgtgccgagccctacaccgtcatcaaggagagtgatggcggcaagagcaaggagaagattgagaagctgaagctgcaggccgagagcttctgccagaggctgggcaagtacaggatgccctttgcctgggcccccatcagcctgagcagcttcttcaacgtgtccaccctggagcgggaggtgacagatgtggacagcgtggtgggccgcagctctgtgggggagaggaggaccctggcccagagccggcggctgtctgagcgggccctgagcctggaggagaatggagtgggcagcaacttcaagaccagcaccctgtctgtgagcagcttcttcaagcaggagggggaccggctgagtgatgaggacctcttcaagttcctggccgactacaagaggagcagcagcctgcagaggagagtgaagagcatccctggcctgctgcggctggagatcagcacagcccctgagatcatcaactgctgcctgaccccagagatgctgcctgtgaagcccttcccagaaaatagaacccggccccacaaggagatcctggagttccccacccgggaggtgtatgtgccccacacagtgtacagaaacctgctgtatgtgtacccccagaggctgaactttgtgaacaagctggccagcgccaggaacatcaccatcaagatccagttcatgtgtggggaggatgccagcaatgccatgcctgtgatctttgggaagagcagcggccctgagttcctgcaggaggtgtacacagctgtgacctaccacaacaagagcccagacttctatgaggaggtgaagatcaagctgcctgccaagctgactgtgaaccaccacctgctcttcaccttctaccacatcagctgccagcagaagcagggcgcctctgtggagaccctgctgggctacagctggctgcccatcctgctgaatgaaaggctgcagacaggcagctactgcctgcctgtggccctggagaagctgccccccaactacagcatgcacagcgctgagaaggtgcccctgcagaacccccccatcaagtgggccgagggccacaagggcgtcttcaacatcgaggtgcaggccgtgtcctctgtgcacacccaggacaaccacctggagaagttcttcaccctgtgccacagcctggagagccaggtgaccttccccatccgggtgctggaccagaagatcagcgagatggccctggagcacgagctgaagctgagcatcatctgcctgaacagcagccggctggagcccctggtgctcttcctgcacctggtgctggacaagctgttccagctgtctgtgcagcccatggtgattgctggccagacagccaacttcagccagtttgcctttgaatctgtggtggccatcgccaacagcctgcacaacagcaaggacctgagcaaggaccagcacggcaggaactgcctgctggccagctatgtgcactacgtgttccggctgcctgaggtgcagagagatgtgcccaagagcggggcccccacagccctgctggaccccaggagctaccacacctacggccgcaccagcgctgctgctgtgagcagcaagctgctgcaggcccgggtgatgagcagcagcaacccagacctggccggcacccacagcgctgctgatgaggaggtgaagaacatcatgagcagcaagattgctgacaggaactgcagcaggatgagctactactgcagcggcagcagtgatgcccccagcagccctgctgcccccaggcctgccagcaagaagcacttccacgaggagctggccctgcagatggtggtgtccacaggcatggtgcgggagaccgtcttcaagtatgcctggttcttctttgagctgctggtgaagtccatggcccagcacgtgcacaacatggacaagagggacagcttccggaggacccgcttcagtgaccgcttcatggatgacatcaccaccatcgtgaatgtggtgaccagcgagattgctgccctgctggtgaagccccagaaggaaaatgagcaggccgagaagatgaacatcagcctggccttcttcctgtatgacctgctgagcctgatggaccggggctttgtgttcaacctgatccgccactactgcagccagctgagcgccaagctgagcaacctgcccaccctcatctccatgaggctggagttcctgcgcatcctgtgcagccatgagcactacctgaacctgaacctcttcttcatgaatgctgacacagcccccaccagcccctgccccagcatcagcagccagaacagcagcagctgcagcagcttccaggaccagaagatcgcctccatgtttgacctgaccagcgagtaccggcagcagcacttcctgaccggcctgctcttcacagagctggccgccgccctggatgctgagggggagggcatcagcaaggtgcagaggaaggctgtgtctgccatccacagcctgctgagcagccatgacctggacccccgctgtgtgaagccagaggtgaaggtgaagattgctgccctgtacctgcccctggtgggcatcatcctggatgccctgccccagctgtgtgacttcaccgtggccgacacccggcgctaccgcaccagcggcagtgatgaggagcaggagggcgctggggccatcaaccagaatgtggccctggccatcgccggcaacaacttcaacctgaagaccagcggcatcgtgctgagcagcctgccctacaagcagtacaacatgctgaatgctgacaccaccaggaacctgatgatctgcttcctgtggatcatgaagaatgctgaccagagcctcatcaggaagtggattgctgacctgcccagcacccagctgaaccgcatcctggacctgctcttcatctgtgtgctgtgctttgagtacaagggcaagcagagcagtgacaaggtgtccacccaggtgctgcagaagagcagagatgtgaaggcccggctggaggaggccctgctgcggggggagggcgcccggggggagatgatgagaagaagagcccctggaaatgaccgcttccctggcctgaatgaaaacctgcgctggaagaaggagcagacccactggaggcaggccaatgagaagctggacaagaccaaggccgagctggaccaggaggccctgatcagcggcaacctggccacagaggcccacctgatcatcctggacatgcaggagaacatcatccaggccagcagcgccctggactgcaaggacagcctgctgggcggcgtgctgcgggtgctggtgaacagcctgaactgtgaccagagcaccacctacctgacccactgctttgccaccctgcgggccctgattgccaagtttggagacctgctgtttgaggaggaggtggagcagtgctttgacctgtgccaccaggtgctgcaccactgcagcagctccatggatgtgaccaggagccaggcctgtgccaccctgtacctgctgatgaggttctcctttggagccaccagcaactttgcccgggtgaagatgcaggtgaccatgagcctggccagcctggtgggccgggccccagacttcaatgaggagcacctgcggcgcagcctgcggaccatcctggcctacagcgaggaggacacagccatgcagatgacccccttccccacccaggtggaggagctgctgtgcaacctgaacagcatcctgtatgacacagtgaagatgagggagttccaggaggaccctgagatgctgatggacctgatgtaccgcatcgccaagagctaccaggccagcccagacctgcggctgacctggctgcagaacatggccgagaagcacaccaagaagaagtgctacacagaagctgccatgtgcctggtgcacgccgccgccctggtggccgagtacctgtccatgctggaggaccacagctacctgcctgtgggctctgtgtccttccagaacatcagcagcaatgtgctggaggagagcgtggtgtctgaggacaccctgagcccagatgaagatggagtgtgtgccggccagtacttcacagagagcggcctggtgggcctgctggagcaggccgctgagctgttcagcactggaggcctgtatgaaacagtgaatgaggtgtacaagctggtgatccccatcctggaggcccaccgggagttcaggaagctgaccctgacccacagcaagctgcagagggcctttgacagcatcgtgaacaaggaccacaagaggatgtttggcacctacttccgggtgggcttcttcggcagcaagtttggagacctggatgagcaggagtttgtgtacaaggagcccgccatcaccaagctgcctgagatcagccaccggctggaggccttctacggccagtgctttggagctgagtttgtggaggtgatcaaggacagcacccctgtggacaagaccaagctggaccccaacaaggcctacatccagatcacctttgtggagccctactttgatgaatatgagatgaaggacagagtgacctactttgagaagaacttcaacctgcggcgcttcatgtacaccacccccttcaccctggagggccggcccagaggagagctgcacgagcagtacagaagaaacacagtgctgaccaccatgcacgccttcccctacatcaagacccgcatcagcgtcatccagaaggaggagtttgtgctgacccccatcgaggtggccatcgaggacatgaagaagaagaccctgcagctggccgtggccatcaaccaggagcccccagatgccaagatgctgcagatggtgctgcagggctctgtgggcgccaccgtgaaccagggccccctggaggtggcccaggtgttcctggccgagatcccagctgaccccaagctgtaccgccaccacaacaagctgcggctgtgcttcaaggagttcatcatgagatgtggggaggccgtggagaagaacaagaggctcatcacagctgaccagcgggagtaccagcaggagctgaagaagaactacaacaagctgaaggagaacctgcggcccatgattgaaaggaagatccctgagctgtacaagcccatcttccgggtggagagccagaagagggacagcttccacaggagcagcttcagaaaatgtgagacccagctgagccagggcagctag

SEQ ID NO: 149663 - DNA, 6000 bp, synthetic construct
  misc_feature 1..6000: note = Description of Artificial Sequence: Synthetic coding sequence
  source 1..6000: mol_type = other DNA
atgacccacctgaacagcctggatgtgcagctggcccaggagctgggggacttcacagatgatgacctggatgtggtgttcacccccaaggaatgtaggaccctgcagcccagcctgcctgaggagggcgtggagctggacccccacgtgcgggactgtgtgcagacctacatccgggagtggctgattgtgaacaggaagaaccagggcagccctgagatctgtggcttcaagaagacaggcagcaggaaggacttccacaagaccctgcccaagcagacctttgaaagtgagaccctggagtgcagcgagcctgctgcccaggccggccccaggcacctgaatgtgctgtgtgatgtgtctggaaaaggacctgtgacagcctgtgactttgacctgcggagcctgcagcctgacaagaggctggagaacctgctgcagcaggtgtctgctgaggactttgagaagcagaatgaggaggcccggaggaccaaccggcaggccgagctgtttgccctgtaccccagcgtggatgaggaggatgctgtggagatccggcctgtgcctgagtgccccaaggagcacctgggcaaccgcatcctggtgaagctgctgaccctgaagtttgaaattgaaattgagcccctgtttgccagcatcgccctgtatgatgtgaaggagaggaagaagatcagcgagaacttccactgtgacctgaacagcgaccagttcaagggcttcctgcgggcccacacccccagcgtggccgccagcagccaggcccggtctgctgtgttttctgtgacctaccccagcagtgacatctacctggtggtgaagattgagaaggtgctgcagcagggcgagatcggggactgtgccgagccctacaccgtcatcaaggagagtgatggcggcaagagcaaggagaagattgagaagctgaagctgcaggccgagagcttctgccagaggctgggcaagtacaggatgccctttgcctgggcccccatcagcctgagcagcttcttcaacgtgtccaccctggagcgggaggtgacagatgtggacagcgtggtgggccgcagctctgtgggggagaggaggaccctggcccagagccggcggctgtctgagcgggccctgagcctggaggagaatggagtgggcagcaacttcaagaccagcaccctgtctgtgagcagcttcttcaagcaggagggggaccggctgagtgatgaggacctcttcaagttcctggccgactacaagaggagcagcagcctgcagaggagagtgaagagcatccctggcctgctgcggctggagatcagcacagcccctgagatcatcaactgctgcctgaccccagagatgctgcctgtgaagcccttcccagaaaatagaacccggccccacaaggagatcctggagttccccacccgggaggtgtatgtgccccacacagtgtacagaaacctgctgtatgtgtacccccagaggctgaactttgtgaacaagctggccagcgccaggaacatcaccatcaagatccagttcatgtgtggggaggatgccagcaatgccatgcctgtgatctttgggaagagcagcggccctgagttcctgcaggaggtgtacacagctgtgacctaccacaacaagagcccagacttctatgaggaggtgaagatcaagctgcctgccaagctgactgtgaaccaccacctgctcttcaccttctaccacatcagctgccagcagaagcagggcgcctctgtggagaccctgctgggctacagctggctgcccatcctgctgaatgaaaggctgcagacaggcagctactgcctgcctgtggccctggagaagctgccccccaactacagcatgcacagcgctgagaaggtgcccctgcagaacccccccatcaagtgggccgagggccacaagggcgtcttcaacatcgaggtgcaggccgtgtcctctgtgcacacccaggacaaccacctggagaagttcttcaccctgtgccacagcctggagagccaggtgaccttccccatccgggtgctggaccagaagatcagcgagatggccctggagcacgagctgaagctgagcatcatctgcctgaacagcagccggctggagcccctggtgctcttcctgcacctggtgctggacaagctgttccagctgtctgtgcagcccatggtgattgctggccagacagccaacttcagccagtttgcctttgaatctgtggtggccatcgccaacagcctgcacaacagcaaggacctgagcaaggaccagcacggcaggaactgcctgctggccagctatgtgcactacgtgttccggctgcctgaggtgcagagagatgtgcccaagagcggggcccccacagccctgctggaccccaggagctaccacacctacggccgcaccagcgctgctgctgtgagcagcaagctgctgcaggcccgggtgatgagcagcagcaacccagacctggccggcacccacagcgctgctgatgaggaggtgaagaacatcatgagcagcaagcacttccacgaggagctggccctgcagatggtggtgtccacaggcatggtgcgggagaccgtcttcaagtatgcctggttcttctttgagctgctggtgaagtccatggcccagcacgtgcacaacatggacaagagggacagcttccggaggacccgcttcagtgaccgcttcatggatgacatcaccaccatcgtgaatgtggtgaccagcgagattgctgccctgctggtgaagccccagaaggaaaatgagcaggccgagaagatgaacatcagcctggccttcttcctgtatgacctgctgagcctgatggaccggggctttgtgttcaacctgatccgccactactgcagccagctgagcgccaagctgagcaacctgcccaccctcatctccatgaggctggagttcctgcgcatcctgtgcagccatgagcactacctgaacctgaacctcttcttcatgaatgctgacacagcccccaccagcccctgccccagcatcagcagccagaacagcagcagctgcagcagcttccaggaccagaagatcgcctccatgtttgacctgaccagcgagtaccggcagcagcacttcctgaccggcctgctcttcacagagctggccgccgccctggatgctgagggggagggcatcagcaaggtgcagaggaaggctgtgtctgccatccacagcctgctgagcagccatgacctggacccccgctgtgtgaagccagaggtgaaggtgaagattgctgccctgtacctgcccctggtgggcatcatcctggatgccctgccccagctgtgtgacttcaccgtggccgacacccggcgctaccgcaccagcggcagtgatgaggagcaggagggcgctggggccatcaaccagaatgtggccctggccatcgccggcaacaacttcaacctgaagaccagcggcatcgtgctgagcagcctgccctacaagcagtacaacatgctgaatgctgacaccaccaggaacctgatgatctgcttcctgtggatcatgaagaatgctgaccagagcctcatcaggaagtggattgctgacctgcccagcacccagctgaaccgcatcctggacctgctcttcatctgtgtgctgtgctttgagtacaagggcaagcagagcagtgacaaggtgtccacccaggtgctgcagaagagcagagatgtgaaggcccggctggaggaggccctgctgcggggggagggcgcccggggggagatgatgagaagaagagcccctggaaatgaccgcttccctggcctgaatgaaaacctgcgctggaagaaggagcagacccactggaggcaggccaatgagaagctggacaagaccaaggccgagctggaccaggaggccctgatcagcggcaacctggccacagaggcccacctgatcatcctggacatgcaggagaacatcatccaggccagcagcgccctggactgcaaggacagcctgctgggcggcgtgctgcgggtgctggtgaacagcctgaactgtgaccagagcaccacctacctgacccactgctttgccaccctgcgggccctgattgccaagtttggagacctgctgtttgaggaggaggtggagcagtgctttgacctgtgccaccaggtgctgcaccactgcagcagctccatggatgtgaccaggagccaggcctgtgccaccctgtacctgctgatgaggttctcctttggagccaccagcaactttgcccgggtgaagatgcaggtgaccatgagcctggccagcctggtgggccgggccccagacttcaatgaggagcacctgcggcgcagcctgcggaccatcctggcctacagcgaggaggacacagccatgcagatgacccccttccccacccaggtggaggagctgctgtgcaacctgaacagcatcctgtatgacacagtgaagatgagggagttccaggaggaccctgagatgctgatggacctgatgtaccgcatcgccaagagctaccaggccagcccagacctgcggctgacctggctgcagaacatggccgagaagcacaccaagaagaagtgctacacagaagctgccatgtgcctggtgcacgccgccgccctggtggccgagtacctgtccatgctggaggaccacagctacctgcctgtgggctctgtgtccttccagaacatcagcagcaatgtgctggaggagagcgtggtgtctgaggacaccctgagcccagatgaagatggagtgtgtgccggccagtacttcacagagagcggcctggtgggcctgctggagcaggccgctgagctgttcagcactggaggcctgtatgaaacagtgaatgaggtgtacaagctggtgatccccatcctggaggcccaccgggagttcaggaagctgaccctgacccacagcaagctgcagagggcctttgacagcatcgtgaacaaggaccacaagaggatgtttggcacctacttccgggtgggcttcttcggcagcaagtttggagacctggatgagcaggagtttgtgtacaaggagcccgccatcaccaagctgcctgagatcagccaccggctggaggccttctacggccagtgctttggagctgagtttgtggaggtgatcaaggacagcacccctgtggacaagaccaagctggaccccaacaaggcctacatccagatcacctttgtggagccctactttgatgaatatgagatgaaggacagagtgacctactttgagaagaacttcaacctgcggcgcttcatgtacaccacccccttcaccctggagggccggcccagaggagagctgcacgagcagtacagaagaaacacagtgctgaccaccatgcacgccttcccctacatcaagacccgcatcagcgtcatccagaaggaggagtttgtgctgacccccatcgaggtggccatcgaggacatgaagaagaagaccctgcagctggccgtggccatcaaccaggagcccccagatgccaagatgctgcagatggtgctgcagggctctgtgggcgccaccgtgaaccagggccccctggaggtggcccaggtgttcctggccgagatcccagctgaccccaagctgtaccgccaccacaacaagctgcggctgtgcttcaaggagttcatcatgagatgtggggaggccgtggagaagaacaagaggctcatcacagctgaccagcgggagtaccagcaggagctgaagaagaactacaacaagctgaaggagaacctgcggcccatgattgaaaggaagatccctgagctgtacaagcccatcttccgggtggagagccagaagagggacagcttccacaggagcagcttcagaaaatgtgagacccagctgagccagggcagctag

SEQ ID NO: 149664 - DNA, 1182 bp, synthetic construct
  misc_feature 1..1182: note = Description of Artificial Sequence: Synthetic coding sequence
  source 1..1182: mol_type = other DNA
atgaagaggaccagagatgaggtggatgccaccctgcagatcgccaagctgaatgctgctgagctgctgcctgctgtgcactgcctgggctttggacctggggccagcggggctgctgctggggacttctgcctgctggagctggagcccaccctgtgccagcagctggaggatggccacagcctggtgatccggggggacaaggatgagcaggccgtgctgtgcagcaaggacaagacctatgacctgaagattgctgacaccagcaacatgctgctcttcatccctggctgcaagaccccagaccagctgaagaaggaggacagccactgcaacatcatccacacagagatcttcggcttcagcaacaactactgggagctgcggaggagaagacccaagctgaagaagctgaagaagctgctgatggagaacccctatgagggccctgacagccagaaggagaaggacagcaacagcagcaagtacaccacagaggacctgctggaccagatccaggccagcgaggaggagatcatgacccagctgcaggtgctgaatgcctgcaagattggaggctactggaggatcctggagtttgattatgagatgaagctgctgaaccacgtgacccagctggtggacagcgagagctggagctttgggaaggtgcccctgaacacctgcctgcaggagctgggccccctggagcctgaggagatgattgagcactgcctgaagtgctacggcaagaagtatgtggatgaaggagaggtgtactttgagctggatgctgacaagatctgcagagctgctgccaggatgctgctgcagaatgctgtgaagttcaacctggccgagttccaggaggtgtggcagcagagcgtgcctgagggcatggtgaccagcctggaccagctgaagggcctggccctggtggacagacacagcaggcctgagatcatcttcctgctgaaggtggatgacctgcctgaggacaaccaggagcgcttcaacagcctcttcagcctgcgggagaagtggacagaagaagatattgccccctacatccaggacctgtgtggggagaagcagaccatcggggccctgctgaccaagtacagccacagctccatgcagaatggagtgaaggtgtacaacagcagaagacccatctcctag

SEQ ID NO: 149665 - DNA, 342 bp, synthetic construct
  misc_feature 1..342: note = Description of Artificial Sequence: Synthetic coding sequence
  source 1..342: mol_type = other DNA
atgtctgcctctgtggtgtctgtcatcagccgcttcctggaggagtacctgagcagcaccccccagaggctgaagctgctggatgcctacctgctgtacatcctgctgactggagccctgcagtttggctactgcctgctggtgggcaccttccccttcaacagcttcctgagcggcttcatcagctgtgtgggcagcttcatcctggccgtgtgcctgcgcatccagatcaacccccagaacaaggctgacttccagggcatcagccctgagcgggcctttgctgacttcctgtttgccagcaccatcctgcacctggtggtgatgaactttgtgggctag

SEQ ID NO: 149666 - DNA, 285 bp, synthetic construct
  misc_feature 1..285: note = Description of Artificial Sequence: Synthetic coding sequence
  source 1..285: mol_type = other DNA
atgaggaccctggccatcctggccgccatcctgctggtggccctgcaggcccaggccgagcccctgcaggcccgggcagatgaggtggccgccgcccctgagcagattgctgctgacatccctgaggtggtggtgtccctggcctgggatgagagcctggcccccaagcaccctggcagcaggaagaacatggcctgctactgccgcatcccagcctgcatcgccggggagcggcgctatggcacctgcatctaccagggccgcctgtgggccttctgctgctag

SEQ ID NO: 149667 - DNA, 285 bp, synthetic construct; identical to SEQ ID NO: 149666
  misc_feature 1..285: note = Description of Artificial Sequence: Synthetic coding sequence
  source 1..285: mol_type = other DNA

SEQ ID NO: 149668 - DNA, 294 bp, synthetic construct
  misc_feature 1..294: note = Description of Artificial Sequence: Synthetic coding sequence
  source 1..294: mol_type = other DNA
atgaggatcatcgccctgctggccgccatcctgctggtggccctgcaggtgcgggccggccccctgcaggcccggggagatgaggcccctggccaggagcagaggggccctgaggaccaggacatcagcatcagctttgcctgggacaagagcagcgccctgcaggtgtctggcagcacccggggcatggtgtgcagctgccgcctggtgttctgcagaagaacagagctgcgggtgggcaactgcctgattggaggagtgtccttcacctactgctgcaccagggtggactag

SEQ ID NO: 149669 - DNA, 285 bp, synthetic construct
  misc_feature 1..285: note = Description of Artificial Sequence: Synthetic coding sequence
  source 1..285: mol_type = other DNA
atgaggaccatcgccatcctggccgccatcctgctggtggccctgcaggcccaggccgagagcctgcaggagcgggcagatgaggccaccacccagaagcagagcggggaggacaaccaggacctggccatcagctttgctggaaatggcctgagcgccctgcggaccagcggcagccaggcccgggccacctgctactgcaggacaggccgctgtgccacccgggagagcctgtctggagtgtgtgagatcagcggccgcctgtaccgcctgtgctgcaggtag

SEQ ID NO: 149670 - DNA, 303 bp, synthetic construct
  misc_feature 1..303: note = Description of Artificial Sequence: Synthetic coding sequence
  source 1..303: mol_type = other DNA
atgaggaccctgaccatcctgacagctgtgctgctggtggccctgcaggccaaggccgagcccctgcaggctgaagatgaccccctgcaggccaaggcctatgaagcagatgcccaggagcagagaggagccaatgaccaggactttgctgtgtcctttgctgaagatgccagcagcagcctgcgggccctgggcagcacccgggccttcacctgccactgcagaagaagctgctacagcacagagtacagctatggcacctgcaccgtgatgggcatcaaccaccgcttctgctgcctgtag

SEQ ID NO: 149671 - DNA, 207 bp, synthetic construct
  misc_feature 1..207: note = Description of Artificial Sequence: Synthetic coding sequence
  source 1..207: mol_type = other DNA
atgaggaccagctacctgctgctcttcaccctgtgcctgctgctgtctgagatggccagcggcggcaacttcctgaccggcctgggccacagaagtgaccactacaactgtgtgagcagcggcggccagtgcctgtacagcgcctgccccatcttcaccaagatccagggcacctgctaccggggcaaggccaagtgctgcaagtag

SEQ ID NO: 149672 - DNA, 372 bp, synthetic construct
  misc_feature 1..372: note = Description of Artificial Sequence: Synthetic coding sequence
  source 1..372: mol_type = other DNA
atgaagctgctgctgctggccctgcccatgctggtgctgctgccccaggtgatcccagcctacagcggggagaagaagtgctggaacagaagtggccactgcaggaagcagtgcaaggatggagaggccgtgaaggacacctgcaagaacctgcgggcctgctgcatccccagcaatgaagaccacagaagagtgcctgccaccagccccacccccctgagtgacagcaccccaggcatcattgatgacatcctgactgtgcgcttcaccacagactactttgaggtgagcagcaagaaggacatggtggaggagagcgaggccggccggggcacagagaccagcctgcccaacgtgcaccacagcagctag

SEQ ID NO: 149673 - DNA, 1002 bp, synthetic construct
  misc_feature 1..1002: note = Description of Artificial Sequence: Synthetic coding sequence
  source 1..1002: mol_type = other DNA
atgtcctggatcaaggagggggagctgagcctgtgggagcgcttctgtgccaacatcatcaaggccggccccatgcccaagcacatcgccttcatcatggatggcaacagaagatatgccaagaagtgccaggtggagcggcaggagggccacagccagggcttcaacaagctggccgagaccctgcgctggtgcctgaacctgggcatcctggaggtgacagtgtatgccttcagcattgagaacttcaagaggagcaagtctgaggtggatggcctgatggacctggcccggcagaagttcagccggctgatggaggagaaggagaagctgcagaagcacggcgtgtgcatccgggtgctgggggacctgcacctgctgcccctggacctgcaggagctgattgcccaggccgtgcaggccaccaagaactacaacaagtgcttcctgaatgtgtgctttgcctacaccagcagacatgagatcagcaatgctgtgcgggagatggcctggggcgtggagcagggcctgctggaccccagcgacatcagcgagagcctgctggacaagtgcctgtacaccaacagaagcccccacccagacatcctgatccgcaccagcggggaggtgcggctgagtgacttcctgctgtggcagaccagccacagctgcctggtgttccagcctgtgctgtggccagagtacaccttctggaacctgtttgaggccatcctgcagttccagatgaaccacagcgtgctgcagaaggcccgggacatgtatgcagaggagaggaagaggcagcagctggagcgggaccaggccaccgtgacagagcagctgctgcgggagggcctgcaggccagcggagatgcccagctgcggaggacccggctgcacaagctgagcgcccggcgggaggagcgggtgcagggcttcctgcaggccctggagctgaagagagctgactggctggcccggctgggcacagccagcgcctag

SEQ ID NO: 149674 - DNA, 1005 bp, synthetic construct
  misc_feature 1..1005: note = Description of Artificial Sequence: Synthetic coding sequence
  source 1..1005: mol_type = other DNA
atgtcctggatcaaggagggggagctgagcctgtgggagcgcttctgtgccaacatcatcaaggccggccccatgcccaagcacatcgccttcatcatggatggcaacagaagatatgccaagaagtgccaggtggagcggcaggagggccacagccagggcttcaacaagctggccgagaccctgcgctggtgcctgaacctgggcatcctggaggtgacagtgtatgccttcagcattgagaacttcaagaggagcaagtctgaggtggatggcctgatggacctggcccggcagaagttcagccggctgatggaggagaaggagaagctgcagaagcacggcgtgtgcatccgggtgctgggggacctgcacctgctgcccctggacctgcaggagctgattgcccaggccgtgcaggccaccaagaactacaacaagtgcttcctgaatgtgtgctttgcctacaccagcagacatgagatcagcaatgctgtgcgggagatggcctggggcgtggagcagggcctgctggaccccagcgacatcagcgagagcctgctggacaagtgcctgtacaccaacagaagcccccacccagacatcctgatccgcaccagcggggaggtgcggctgagtgacttcctgctgtggcagaccagccacagctgcctggtgttccagcctgtgctgtggccagagtacaccttctggaacctgtttgaggccatcctgcagttccagatgaaccacagcgtgctgcagcagaaggcccgggacatgtatgcagaggagaggaagaggcagcagctggagcgggaccaggccaccgtgacagagcagctgctgcgggagggcctgcaggccagcggagatgcccagctgcggaggacccggctgcacaagctgagcgcccggcgggaggagcgggtgcagggcttcctgcaggccctggagctgaagagagctgactggctggcccggctgggcacagccagcgcctag

SEQ ID NO: 149675 - DNA, 516 bp, synthetic construct
  misc_feature 1..516: note = Description of Artificial Sequence: Synthetic coding sequence
  source 1..516: mol_type = other DNA
atggacctggcccggcagaagttcagccggctgatggaggagaaggagaagctgcagaagcatggagtgtgcatccgggtgctgggggacctgcacctgctgcccctggacctgcaggagctgattgcccaggccgtgcaggccaccaagaactacaacaatgacatcagcgagagcctgctggacaagtgcctgtacaccaacagaagcccccacccagacatcctgatccgcaccagcggggaggtgcggctgagtgacttcctgctgtggcagcagaaggcccgggacatgtatgcagaggagaggaagaggcagcagctggagcgggaccaggccaccgtgacagagcagctgctgcgggagggcctgcaggccagcggagatgcccagctgcggaggacccggctgcacaagctgagcgcccggcgggaggagcgggtgcagggcttcctgcaggccctggagctgaagagagctgactggctggcccggctgggcacagccagcgcctag

SEQ ID NO: 149676 - DNA, 501 bp, synthetic construct
  misc_feature 1..501: note = Description of Artificial Sequence: Synthetic coding sequence
  source 1..501: mol_type = other DNA
atggatggcaacagaagatatgccaagaagtgccaggtggagcggcaggagggccacagccagggcttcaacaagctggccgagaccctgcgctggtgcctgaacctgggcatcctggaggtgacagtgtatgccttcagcattgagaacttcaagaggagcaagtctgaggtggatggcctgatggacctggcccggcagaagttcagccggctgatggaggagaaggagaagctgcagaagcacggcgtgtgcatccgggtgctgggggacctgcacctgctgcccctggacctgcaggagctgattgcccaggccgtgcaggccaccaagaactacaacaagtgcttcctgaatgtgtgctttgcctacaccagcagacatgagatcagcaatgctgtgcgggagatggcctggggcgtggagcagggcctgctggaccccagccgggaccgcttccaccacatcggccaggccagcctggagctgctgaccagctag

SEQ ID NO: 149677 - DNA, 546 bp, synthetic construct
  misc_feature 1..546: note = Description of Artificial Sequence: Synthetic coding sequence
  source 1..546: mol_type = other DNA
atggaggagaaggagaagctgcagaagcacggcgtgtgcatccgggtgctgggggacctgcacctgctgcccctggacctgcaggagctgattgcccaggccgtgcaggccaccaagaactacaacaagtgcttcctgaatgtgtgctttgcctacaccagcagacatgagatcagcaatgctgtgcgggagatggcctggggcgtggagcagggcctgctggaccccagcgacatcagcgagagcctgctggacaagtgcctgtacaccaacagaagcccccacccagacatcctgatccgcaccagcggggaggtgcggctgagtgacttcctgctgtggcagaccagccacagctgcctggtgttccagcctgtgctgtggccagagtacaccttctggaacctgtttgaggccatcctgcagttccagatgaaccacagcgtgctgcagcaccctggcagcctgctgaccaaggcctggaagaagcccttccagcaggatggagagctgtatggcaactgcagcagccccaagagcagctag

SEQ ID NO: 149678 - DNA, 669 bp, synthetic construct
  misc_feature 1..669: note = Description of Artificial Sequence: Synthetic coding sequence
  source 1..669: mol_type = other DNA
atgtcctggatcaaggagggggagctgagcctgtgggagcgcttctgtgccaacatcatcaaggccggccccatgcccaagcacatcgccttcatcatggatggcaacagaagatatgccaagaagtgccaggtggagcggcaggagggccacagccagggcttcaacaagctggccgagaccctgcgctggtgcctgaacctgggcatcctggaggtgacagtgtatgccttcagcattgagaacttcaagaggagcaagtctgaggtggatggcctgatggacctggcccggcagaagttcagccggctgatggaggagaaggagaagctgcagaagcacggcgtgtgcatccgggtgctgggggacctgcacctgctgcccctggacctgcaggagctgattgcccaggccgtgcaggccaccaagaactacaacaagtgcttcctgaatgtgtgctttgcctacaccagcagacatgagatcagcaatgctgtgcgggagatggcctggggcgtggagcagggcctgctggacccccgctacccagatgacatcagcgagagcctgctggacaagtgcctgtacaccaacagaagcccccacccagacatcctgatccgcaccagcggggaggtgcggctgagtgacttcctgctgtggcagtag

SEQ ID NO: 149679 - DNA, 369 bp, synthetic construct
  misc_feature 1..369: note = Description of Artificial Sequence: Synthetic coding sequence
  source 1..369: mol_type = other DNA
atgtcctggatcaaggagggggagctgagcctgtgggagcgcttctgtgccaacatcatcaaggccggccccatgcccaagcacatcgccttcatcatggatggcaacagaagatatgccaagaagtgccaggtggagcggcaggagggccacagccagggcttcaacaagctggccgagaccctgcgctggtgcctgaacctgggcatcctggaggtgacagtgtatgccttcagcattgagaacttcaagaggagcaagtctgaggtggatggcctgatggacctggcccggcagaagttcagccggctgatggaggagaaggagaagctgcagaagcacggcgtgtgcatccgggtgctgggctag

SEQ ID NO: 149680 - DNA, 216 bp, synthetic construct
  misc_feature 1..216: note = Description of Artificial Sequence: Synthetic coding sequence
  source 1..216: mol_type = other DNA
atgtcctggatcaaggagggggagctgagcctgtgggagcgcttctgtgccaacatcatcaaggccggccccatgcccaagcacatcgccttcatcatggatggcaacagaagatatgccaagaagtgccaggtggagcggcaggagggccacagccagggcttcaacaagctggccgagaccctgcgctggtgcctgaacctgggcatcctgtag

SEQ ID NO: 149681 - DNA, 258 bp, synthetic construct
  misc_feature 1..258: note = Description of Artificial Sequence: Synthetic coding sequence
  source 1..258: mol_type = other DNA
atgtcctggatcaaggagggggagctgagcctgtgggagcgcttctgtgccaacatcatcaaggccggccccatgcccaagcacatcgccttcatcatggatggcaacagaagatatgccaagaagtgccaggtggagcggcaggagggccacagccagggcttcaacaagctggccgagaccctgcgctggtgcctgaacctgggcatcctggaggtgacagtgtatgccttcagcattgagaacttcaagaggtag

SEQ ID NO: 149682 - DNA, 885 bp, synthetic construct
  misc_feature 1..885: note = Description of Artificial Sequence: Synthetic coding sequence
  source 1..885: mol_type = other DNA
atgtcctggatcaaggagggggagctgagcctgtgggagcgcttctgtgccaacatcatcaaggccggccccatgcccaagcacatcgccttcatcatggatggcaacagaagatatgccaagaagtgccaggtggagcggcaggagggccacagccagggcttcaacaagctggccgagaccctgcgctggtgcctgaacctgggcatcctggaggtgacagtgtatgccttcagcattgagaacttcaagaggagcaagtctgaggtggatggcctgatggacctggcccggcagaagttcagccggctgatggaggagaagtgcttcctgaatgtgtgctttgcctacaccagcagacatgagatcagcaatgctgtgcgggagatggcctggggcgtggagcagggcctgctggaccccagcgacatcagcgagagcctgctggacaagtgcctgtacaccaacagaagcccccacccagacatcctgatccgcaccagcggggaggtgcggctgagtgacttcctgctgtggcagaccagccacagctgcctggtgttccagcctgtgctgtggccagagtacaccttctggaacctgtttgaggccatcctgcagttccagatgaaccacagcgtgctgcagaaggcccgggacatgtatgcagaggagaggaagaggcagcagctggagcgggaccaggccaccgtgacagagcagctgctgcgggagggcctgcaggccagcggagatgcccagctgcggaggacccggctgcacaagctgagcgcccggcgggaggagcgggtgcagggcttcctgcaggccctggagctgaagagagctgactggctggcccggctgggcacagccagcgcctag

SEQ ID NO: 149683 - DNA, 183 bp, synthetic construct
  misc_feature 1..183: note = Description of Artificial Sequence: Synthetic coding sequence
  source 1..183: mol_type = other DNA
atgtcctggatcaaggagggggagctgagcctgtgggagcgcttctgtgccaacatcatcaaggccggccccatgcccaagcacatcgccttcatcatggatggcaacagaagatatgccaagaagtgccaggtggagcggcaggagggccacagccagggcttcaacaagctggccgagtag

SEQ ID NO: 149684 - DNA, 396 bp, synthetic construct
  misc_feature 1..396: note = Description of Artificial Sequence: Synthetic coding sequence
  source 1..396: mol_type = other DNA
atgtcctggatcaaggagggggagctgagcctgtgggagcgcttctgtgccaacatcatcaaggccggccccatgcccaagcacatcgccttcatcatggatggcaacagaagatatgccaagaagtgccaggtggagcggcaggagggccacagccagggcttcaacaagctggccgagaccctgcgctggtgcctgaacctgggcatcctggaggtgacagtgtatgccttcagcattgagaacttcaagaggagcaagtctgaggtggatggcctgatggacctggcccggcagaagttcagccggctgatggaggagaaggagaagctgcagaagcacggcgtgtgcatccgggtgctgggggacctgcacctgctgcccctggacctgtag

SEQ ID NO: 149685 - DNA, 501 bp, synthetic construct
  misc_feature 1..501: note = Description of Artificial Sequence: Synthetic coding sequence
  source 1..501: mol_type = other DNA
atgtcctggatcaaggagggggagctgagcctgtgggagcgcttctgtgccaacatcatcaaggccggccccatgcccaagcacatcgccttcatcatggatggcaacagaagatatgccaagaagtgccaggtggagcggcaggagggccacagccagggcttcaacaagctggccgagaccctgcgctggtgcctgaacctgggcatcctggaggtgacagtgtatgccttcagcattgagaacttcaagaggagcaagtctgaggtggatggcctgatggacctggcccggcagaagttcagccggctgatggaggagaaggagaagctgcagaagcacggcgtgtgcatccgggtgctgggggacctgcacctgctgcccctggacctgcaggagctgattgcccaggccgtgcaggccaccaagaactacaacaagtgcttcctgaatgtgtgctttgcctacaccagcagacatgagatcagcaatgctgtgtag

SEQ ID NO: 149686 - DNA, 909 bp, synthetic construct
  misc_feature 1..909: note = Description of Artificial Sequence: Synthetic coding sequence
  source 1..909: mol_type = other DNA
atggtgtggaagaggctgggcgccctggtgatgttccccctgcagatgatctacctggtggtgaaggctgctgtgggcctggtgctgcctgccaagctgcgggacctgagcagagaaaatgtgctgatcaccggcggcggccggggcatcggccggcagctggcccgggagtttgctgagcggggggccaggaagatcgtgctgtggggccgcacagagaagtgcctgaaggagaccacagaggagatccggcagatgggcacagagtgccactacttcatctgtgatgtgggcaaccgggaggaggtgtaccagacagccaaggctgtgcgggagaaggtgggggacatcaccatcctggtgaacaatgctgctgtggtgcacggcaagagcctgatggacagtgatgatgatgccctgctgaagagccagcacatcaacaccctgggccagttctggaccaccaaggccttcctgcccaggatgctggagctgcagaatggccacatcgtgtgcctgaacagcgtgctggccctgagcgccatccctggggccatcgactactgcaccagcaaggccagcgcctttgccttcatggagagcctgaccctgggcctgctggactgccctggggtgtctgccaccaccgtgctgcccttccacaccagcacagagatgttccagggcatgagggtgcgcttccccaacctcttcccccccctgaagccagagaccgtggcccggaggacagtggaggccgtgcagctgaaccaggccctgctgctgctgccctggaccatgcacgccctggtgatcctgaagagcatcctgccccaggccgccctggaggagatccacaagttcagcggcacctacacctgcatgaacaccttcaagggccgcacctag

SEQ ID NO: 149687 - DNA, 444 bp, synthetic construct
  misc_feature 1..444: note = Description of Artificial Sequence: Synthetic coding sequence
  source 1..444: mol_type = other DNA
atgggcacagagtgccactacttcatctgtgatgtgggcaaccgggaggaggtgtaccagacagccaaggctgtgcgggagaaggtgggggacatcaccatcctggtgaacaatgctgctgtggtgcacggcaagagcctgatggacagtgatgatgatgccctgctgaagagccagcacatcaacaccctgggccagttctggaccaccaaggccttcctgcccaggatgctggagctgcagaatggccacatcgtgtgcctgaacagcgtgctggccctgagcgccatccctggggccatcgactactgcaccagcaaggccagcgcctttgccttcatggagagcctgaccctgggcctgctggactgccctggggtgtctgccaccaccgtgctgcccttccacaccagcacagagatgttccagggcatgagggtgtag

SEQ ID NO: 149688 - DNA, 423 bp, synthetic construct
  misc_feature 1..423: note = Description of Artificial Sequence: Synthetic coding sequence
  source 1..423: mol_type = other DNA
atggccagcagcggcatgacccggcgggaccccctggccaacaaggtggccctggtgacagccagcacagatggcatcggctttgccatcgcccggcggctggcccaggatggagcccacgtggtggtgagcagcaggaagcagcagaatgtggaccaggccgtggccaccctgcagggcgagggcctgtctgtgacaggcaccgtgtgccacgtgggcaaggccgaggaccgggagcggctggtggccaccctgtggatggacaaggagaaggaggagagcatgaaggagaccctgcgcatccggcggctgggggagcctgaggactgtgccggcatcgtgtccttcctgtgcagtgaagatgccagctacatcaccggggagaccgtggtggtgggcggcggcacccccagccggctgtag

SEQ ID NO: 149689 - DNA, 837 bp, synthetic construct
  misc_feature 1..837: note = Description of Artificial Sequence: Synthetic coding sequence
  source 1..837: mol_type = other DNA
atgcacaaggccggcctgctgggcctgtgtgcccgggcctggaacagcgtgaggatggccagcagcggcatgacccggcgggaccccctggccaacaaggtggccctggtgacagccagcacagatggcatcggctttgccatcgcccggcggctggcccaggatggagcccacgtggtggtgagcagcaggaagcagcagaatgtggaccaggccgtggccaccctgcagggcgagggcctgtctgtgacaggcaccgtgtgccacgtgggcaaggccgaggaccgggagcggctggtggccacagctgtgaagctgcatggaggcatcgacatcctggtgtccaatgctgctgtgaaccccttcttcggcagcatcatggatgtgacagaggaggtgtgggacaagaccctggacatcaacgtgaaggccccagccctgatgaccaaggctgtggtgcctgagatggagaagaggggcggcggctctgtggtgattgtgagcagcattgctgccttcagccccagccctggcttcagcccctacaacgtgtccaagacagccctgctgggcctgaccaagaccctggccatcgagctggcccccaggaacatccgggtgaactgcctggcccctggcctcatcaagaccagcttcagcaggatgctgtggatggacaaggagaaggaggagagcatgaaggagaccctgcgcatccggcggctgggggagcctgaggactgtgccggcatcgtgtccttcctgtgcagtgaagatgccagctacatcaccggggagaccgtggtggtgggcggcggcacccccagccggctgtag

SEQ ID NO: 149690 - DNA, 513 bp, synthetic construct
  misc_feature 1..513: note = Description of Artificial Sequence: Synthetic coding sequence
  source 1..513: mol_type = other DNA
atggccagcagcggcatgacccggcgggaccccctggccaacaaggtggccctggtgacagccagcacagatggcatcggctttgccatcgcccggcggctggcccaggatggagcccacgtggtggtgagcagcaggaagcagcagaatgtggaccaggccgtggccaccctgcagggcgagggcctgtctgtgacaggcaccgtgtgccacgtgggcaaggccgaggaccgggagcggctggtggccacagctgtgaagctgcatggaggcatcgacatcctggtgtccaatgctgctgtgaaccccttcttcggcagcatcatggatgtgacagaggaggtgtgggacaagaggcggctgagcggggacagagtcttccacagcagcctgcagagcatcagcagcctggatggccagggcaagaggggcaagcatgagaggaacccagctgacaagaaggtgcggcgggcccggggcctgtgctggcacagggtcttccctgtgctgtag

SEQ ID NO: 149691 - DNA, 546 bp, synthetic construct
  misc_feature 1..546: note = Description of Artificial Sequence: Synthetic coding sequence
  source 1..546: mol_type = other DNA
atggccagcagcggcatgacccggcgggaccccctggccaacaaggtggccctggtgacagccagcacagatggcatcggctttgccatcgcccggcggctggcccaggatggagcccacgtggtggtgagcagcaggaagcagcagaatgtggaccaggccgtggccaccctgcagggcgagggcctgtctgtgacaggcaccgtgtgccacgtgggcaaggccgaggaccgggagcggctggtggccaccaccctggacatcaacgtgaaggccccagccctgatgaccaaggctgtggtgcctgagatggagaagaggggcggcggctctgtggtgattgtgagcagcattgctgccttcagccccagccccctgtggatggacaaggagaaggaggagagcatgaaggagaccctgcgcatccggcggctgggggagcctgaggactgtgccggcatcgtgtccttcctgtgcagtgaagatgccagctacatcactggagagaccgtggtggtgggcggcggcacccccagccggctgtag

SEQ ID NO: 149692 - DNA, 477 bp, synthetic construct
  misc_feature 1..477: note = Description of Artificial Sequence: Synthetic coding sequence
  source 1..477: mol_type = other DNA
atgcacaaggccggcctgctgggcctgtgtgcccgggcctggaacagcgtgaggatggccagcagcggcatgacccggcgggaccccctggccaacaaggtggccctggtgacagccagcacagatggcatcggctttgccatcgcccggcggctggcccaggatggagcccacgtggtggtgagcagcaggaagcagcagaatgtggaccaggccgtggccaccctgcagggcgagggcctgtctgtgacaggcaccgtgtgccacgtgggcaaggccgaggaccgggagcggctggtggccaccctgtggatggacaaggagaaggaggagagcatgaaggagaccctgcgcatccggcggctgggggagcctgaggactgtgccggcatcgtgtccttcctgtgcagtgaagatgccagctacatcaccggggagaccgtggtggtgggcggcggcacccccagccggctgtag

SEQ ID NO: 149693 - DNA, 579 bp, synthetic construct
  misc_feature 1..579: note = Description of Artificial Sequence: Synthetic coding sequence
  source 1..579: mol_type = other DNA
atgcacaaggccggcctgctgggcctgtgtgcccgggcctggaacagcgtgaggatggccagcagcggcatgacccggcgggaccccctggccaacaaggtggccctggtgacagccagcacagatggcatcggctttgccatcgcccggcggctggcccaggatggagcccacgtggtggtgagcagcaggaagcagcagaatgtggaccaggccgtggccaccctgcagggcgagggcctgtctgtgacaggcaccgtgtgccacgtgggcaaggccgaggaccgggagcggctggtggccacagctgtgaagctgcatggaggcatcgacatcctggtgtccaatgctgctgtgaaccccttcttcggcagcatcatggatgtgacagaggaggtgtgggacaagctgtggatggacaaggagaaggaggagagcatgaaggagaccctgcgcatccggcggctgggggagcctgaggactgtgccggcatcgtgtccttcctgtgcagtgaagatgccagctacatcaccggggagaccgtggtggtgggcggcggcacccccagccggctgtag

SEQ ID NO: 149694 - DNA, 681 bp, synthetic construct
  misc_feature 1..681: note = Description of Artificial Sequence: Synthetic coding sequence
  source 1..681: mol_type = other DNA
atggccagcagcggcatgacccggcgggaccccctggccaacaaggtggccctggtgacagccagcacagatggcatcggctttgccatcgcccggcggctggcccaggatggagcccacgtggtggtgagcagcaggaagcagcagaatgtggaccaggccgtggccaccctgcagggcgagggcctgtctgtgacaggcaccgtgtgccacgtgggcaaggccgaggaccgggagcggctggtggccaccaccctggacatcaacgtgaaggccccagccctgatgaccaaggctgtggtgcctgagatggagaagaggggcggcggctctgtggtgattgtgagcagcattgctgccttcagccccagccctggcttcagcccctacaacgtgtccaagacagccctgctgggcctgaccaagaccctggccatcgagctggcccccaggaacatccgggtgaactgcctggcccctggcctcatcaagaccagcttcagcaggatgctgtggatggacaaggagaaggaggagagcatgaaggagaccctgcgcatccggcggctgggggagcctgaggactgtgccggcatcgtgtccttcctgtgcagtgaagatgccagctacatcaccggggagaccgtggtggtgggcggcggcacccccagccggctgtag

SEQ ID NO: 149695 - DNA, 567 bp, synthetic construct
  misc_feature 1..567: note = Description of Artificial Sequence: Synthetic coding sequence
  source 1..567: mol_type = other DNA
atgcacaaggccggcctgctgggcctgtgtgcccgggcctggaacagcgtgaggatggccagcagcggcatgacccggcgggaccccctggccaacaaggtggccctggtgacagccagcacagatggcatcggctttgccatcgcccggcggctggcccaggatggagcccacgtggtggtgagcagcaggaagcagcagaatgtggaccaggccgtggccaccctgcagggcgagggcctgtctgtgacaggcaccgtgtgccacgtgggcaaggccgaggaccgggagcggctggtggccacagctgtgaagctgcatggaggcatcgacatcctggtgtccaatgctgctgtgaaccccttcttcggcagcatcatggatgtgacagaggaggtgtgggacaagaggcggctgagcggggacagagtcttccacagcagcctgcagagcatcagcagcctggatggccagggcaagaggggcaagcatgagaggaacccagctgacaagaaggtgcggcgggcccggggcctgtgctggcacagggtcttccctgtgctgtag

SEQ ID NO: 149696 - DNA, 600 bp, synthetic construct
  misc_feature 1..600: note = Description of Artificial Sequence: Synthetic coding sequence
  source 1..600: mol_type = other DNA
atgcacaaggccggcctgctgggcctgtgtgcccgggcctggaacagcgtgaggatggccagcagcggcatgacccggcgggaccccctggccaacaaggtggccctggtgacagccagcacagatggcatcggctttgccatcgcccggcggctggcccaggatggagcccacgtggtggtgagcagcaggaagcagcagaatgtggaccaggccgtggccaccctgcagggcgagggcctgtctgtgacaggcaccgtgtgccacgtgggcaaggccgaggaccgggagcggctggtggccaccaccctggacatcaacgtgaaggccccagccctgatgaccaaggctgtggtgcctgagatggagaagaggggcggcggctctgtggtgattgtgagcagcattgctgccttcagccccagccccctgtggatggacaaggagaaggaggagagcatgaaggagaccctgcgcatccggcggctgggggagcctgaggactgtgccggcatcgtgtccttcctgtgcagtgaagatgccagctacatcactggagagaccgtggtggtgggcggcggcacccccagccggctgtag

SEQ ID NO: 149697 - DNA, 1374 bp, synthetic construct
  misc_feature 1..1374: note = Description of Artificial Sequence: Synthetic coding sequence
  source 1..1374: mol_type = other DNA
atgaggtctgctgctgtgctggccctgctgctgtgtgccggccaggtgacagccctgcctgtgaacagccccatgaacaagggggacacagaggtgatgaagtgcatcgtggaggtgatcagtgacaccctgagcaagcccagccccatgcctgtgtcccaggagtgctttgagaccctgcggggagatgagcgcatcctgagcatcctgcggcaccagaacctgctgaaggagctgcaggacctggccctgcagggcgccaaggagcgggcccaccagcagaagaagcacagcggctttgaagatgagctgtctgaggtgctggagaaccagagcagccaggccgagctgaaggaggccgtggaggagcccagcagcaaggatgtgatggagaagcgggaggacagcaaggaggccgagaagagcggggaggccacagatggagcccggccccaggccctgcctgagcccatgcaggagagcaaggccgagggcaacaaccaggcccctggagaggaggaggaggaggaggaggaggccaccaacacccaccccccagccagcctgcccagccagaagtacccaggcccccaggccgagggggacagcgagggcctgagccagggcctggtggaccgggagaagggcctgtctgctgagcccggctggcaggccaagcgggaggaggaggaggaggaggaggaggaggccgaggccggggaggaggccgtgcctgaggaggagggccccaccgtggtgctgaacccccaccccagcctgggctacaaggagatcagaaaaggagagagccgctctgaggccctggccgtggatggagctgggaagccaggagctgaggaggcccaggaccctgagggcaagggggagcaggagcacagccagcagaaggaggaggaggaggagatggctgtggtgccccagggcctcttccggggcggcaagagcggggagctggagcaggaggaggagcggctgagcaaggagtgggaggacagcaagcgctggagcaagatggaccagctggccaaggagctgacagctgagaagaggctggagggccaggaggaggaggaggacaacagagacagctccatgaagctgtccttccgggcccgggcctacggcttccggggccctggcccccagctgcggcggggctggaggcccagcagccgggaggacagcctggaggccggcctgcccctgcaggtgcggggctacccagaggagaagaaggaggaggagggcagcgccaacagaagacctgaggaccaggagctggagagcctgagcgccatcgaggccgagctggagaaggtggcccaccagctgcaggccctgcggcggggctag

SEQ ID NO: 149698 - DNA, 1128 bp, synthetic construct
  misc_feature 1..1128: note = Description of Artificial Sequence: Synthetic coding sequence
  source 1..1128: mol_type = other DNA
atgaactgggagctgctgctgtggctgctggtgctgtgtgccctgctgctgctgctggtgcagctgctgcgcttcctgcgggcagatggagacctgaccctgctgtgggccgagtggcagggccggcggcctgagtgggagctgacagacatggtggtgtgggtgactggagccagcagcggcatcggggaggagctggcctaccagctgagcaagctgggcgtgtccctggtgctgagcgcccggcgggtgcatgagctggagcgggtgaagaggcgctgcctggagaatggaaacctgaaggagaaggacatcctggtgctgcccctggacctgacagacaccggcagccatgaggccgccaccaaggctgtgctgcaggagtttggaagaattgacatcctggtgaacaacggcggcatgagccagaggagcctgtgcatggacaccagcctggatgtgtacaggaagctgattgagctgaactacctgggcaccgtgtccctgaccaagtgtgtgctgccccacatgattgaaaggaagcagggcaagatcgtgacagtgaacagcatcctgggcatcatctctgtgcccctgagcatcggctactgtgccagcaagcacgccctgcggggcttcttcaacggcctgaggacagagctggccacctacccaggcatcatcgtgagcaacatctgccccggccctgtgcagagcaacatcgtggagaacagcctggccggggaggtgaccaagaccatcggcaacaatggagaccagagccacaagatgaccaccagccgctgtgtgcggctgatgctgatctccatggccaatgacctgaaggaggtgtggatcagcgagcagcccttcctgctggtgacctacctgtggcagtacatgcccacctgggcctggtggatcacccgctggggcaggaagggcctgcggaccctgcgggtggtgtggatgcagaccctgctgatcctgaagagcctgcggcagaacatgacagagaagagcacctgcaccttccaggccaccggcggcagaaatggcaagcatgagaacagcaacctgctgatgctgctgaacaaccagaggctcatctgtgacttcaccttctag

SEQ ID NO: 149699 - DNA, 870 bp, synthetic construct
  misc_feature 1..870: note = Description of Artificial Sequence: Synthetic coding sequence
  source 1..870: mol_type = other DNA
atggtggtgtgggtgactggagccagcagcggcatcggggaggagctggcctaccagctgagcaagctgggcgtgtccctggtgctgagcgcccggcgggtgcatgagctggagcgggtgaagaggcgctgcctggagaatggaaacctgaaggagaaggacatcctggtgctgcccctggacctgacagacaccggcagccatgaggccgccaccaaggctgtgctgcaggagtttggaagaattgacatcctggtgaacaacggcggcatgagccagaggagcctgtgcatggacaccagcctggatgtgtacaggaagctgattgagctgaactacctgggcaccgtgtccctgaccaagtgtgtgctgccccacatgattgaaaggaagcagggcaagatcgtgacagtgaacagcatcctgggcatcatctctgtgcccctgagcatcggctactgtgccagcaagcacgccctgcggggcttcttcaacggcctgaggacagagctggccacctacccaggcatcatcgtgagcaacatctgccccggccctgtgcagagcaacatcgtggagaacagcctggccggggaggtgaccaagaccatcggcaacaatggagaccagagccacaagatgaccaccagccgctgtgtgcggctgatgctgatctccatggccaatgacctgaaggaggtgtggatcagcgagcagcccttcctgctggtgacctacctgtggcagtacatgcccacctgggcctggtggatcaccaacaagatgggcaagaagagaattgagaacttcaagagcggcgtggatgctgacagcagctacttcaagatcttcaagaccaagcatgactag

SEQ ID NO: 149700 - DNA, 1020 bp, synthetic construct
  misc_feature 1..1020: note = Description of Artificial Sequence: Synthetic coding sequence
  source 1..1020: mol_type = other DNA
atgaactgggagctgctgctgtggctgctggtgctgtgtgccctgctgctgctgctggtgcagctgctgcgcttcctgcgggcagatggagacctgaccctgctgtgggccgagtggcagggccggcggcctgagtgggagctgacagacatggtggtgtgggtgactggagccagcagcggcatcggggaggagctggcctaccagctgagcaagctgggcgtgtccctggtgctgagcgcccggcgggtgcatgagctggagcgggtgaagaggcgctgcctggagaatggaaacctgaaggagaaggacatcctggtgctgcccctggacctgacagacaccggcagccatgaggccgccaccaaggctgtgctgcaggagtttggaagaattgacatcctggtgaacaacggcggcatgagccagaggagcctgtgcatggacaccagcctggatgtgtacaggaagctgattgagctgaactacctgggcaccgtgtccctgaccaagtgtgtgctgccccacatgattgaaaggaagcagggcaagatcgtgacagtgaacagcatcctgggcatcatctctgtgcccctgagcatcggctactgtgccagcaagcacgccctgcggggcttcttcaacggcctgaggacagagctggccacctacccaggcatcatcgtgagcaacatctgccccggccctgtgcagagcaacatcgtggagaacagcctggccggggaggtgaccaagaccatcggcaacaatggagaccagagccacaagatgaccaccagccgctgtgtgcggctgatgctgatctccatggccaatgacctgaaggaggtgtggatcagcgagcagcccttcctgctggtgacctacctgtggcagtacatgcccacctgggcctggtggatcaccaacaagatgggcaagaagagaattgagaacttcaagagcggcgtggatgctgacagcagctacttcaagatcttcaagaccaagcatgactag

SEQ ID NO: 149701 - DNA, 186 bp, synthetic construct
  misc_feature 1..186: note = Description of Artificial Sequence: Synthetic coding sequence
  source 1..186: mol_type = other DNA
atgaactgggagctgctgctgtggctgctggtgctgtgtgccctgctgctgctgctggtgcagctgctgcgcttcctgcgggcagatggagacctgaccctgctgtgggccgagtggcagggccggcggcctgagtgggagctgacagacatggtggtgtgggtgactggagccagcagcggctag

SEQ ID NO: 149702 - DNA, 960 bp, synthetic construct
  misc_feature 1..960: note = Description of Artificial Sequence: Synthetic coding sequence
  source 1..960: mol_type = other DNA
atgctgttctgggtgctgggcctgctgatcctgtgtggcttcctgtggaccaggaagggcaagctgaagattgaggacatcacagacaagtacatcttcatcaccggctgtgacagcggctttggaaacctggccgcccggacctttgacaagaagggcttccacgtgattgctgcctgcctgacagagagcggcagcacagccctgaaggccgagaccagcgagcggctgaggacagtgctgctggatgtgacagatcctgaaaatgtgaagaggacagcccagtgggtgaagaaccaggtgggggagaagggcctgtggggcctcatcaacaatgccggcgtgcctggggtgctggcccccacagactggctgaccctggaggactaccgggagcccatcgaggtgaacctgtttggcctcatctctgtgaccctgaacatgctgcccctggtgaagaaggcccagggccgggtcatcaacgtgtcctctgtgggcggccgcctggccatcgtgggcggcggctacacccccagcaaatatgctgtggagggcttcaatgacagcctgcggcgggacatgaaggcctttggagtgcacgtgtcctgcatcgagcccggcctcttcaagaccaacctggccgaccctgtgaaggtgattgagaagaagctggccatctgggagcagctgagcccagacatcaagcagcagtacggggagggctacatcgagaagagcctggacaagctgaagggcaacaagagctatgtgaacatggacctgagccctgtggtggagtgcatggaccacgccctgaccagcctcttccccaagacccactacgccgccggcaaggatgccaagatcttctggatccccctgagccacatgcctgctgccctgcaggacttcctgctgctgaagcagaaggccgagctggccaaccccaaggctgtgtag

SEQ ID NO: 149703 - DNA, 960 bp, synthetic construct; identical to SEQ ID NO: 149702
  misc_feature 1..960: note = Description of Artificial Sequence: Synthetic coding sequence
  source 1..960: mol_type = other DNA

SEQ ID NO: 149704 - DNA, 960 bp, synthetic construct; identical to SEQ ID NO: 149702
  misc_feature 1..960: note = Description of Artificial Sequence: Synthetic coding sequence
  source 1..960: mol_type = other DNA

SEQ ID NO: 149705 - DNA, 519 bp, synthetic construct
  misc_feature 1..519: note = Description of Artificial Sequence: Synthetic coding sequence
  source 1..519: mol_type = other DNA
atgctgcccctggtgaagaaggcccagggccgggtcatcaacgtgtcctctgtgggcggccgcctggccatcgtgggcggcggctacacccccagcaaatatgctgtggagggcttcaatgacagcctgcggcgggacatgaaggccttcggcgtgcacgtgtcctgcatcgagcccggcctcttcaagaccaacctggccgaccctgtgaaggtgattgagaagaagctggccatctgggagcagctgagcccagacatcaagcagcagtatggagagggctacatcgagaagagcctggacaagctgaagggcaacaagagctatgtgaacatggacctgagccctgtggtggagtgcatggaccacgccctgaccagcctcttccccaagacccactatgctgctgggaaggatgccaagatcttctggatccccctgagccacatgcctgctgccctgcaggacttcctgctgctgaagcagaaggccgagctggccaaccccaaggctgtgtag

SEQ ID NO: 149706 - DNA, 960 bp, synthetic construct; identical to SEQ ID NO: 149702
  misc_feature 1..960: note = Description of Artificial Sequence: Synthetic coding sequence
  source 1..960: mol_type = other DNA

SEQ ID NO: 149707 - DNA, 1140 bp, synthetic construct
  misc_feature 1..1140: note = Description of Artificial Sequence: Synthetic coding sequence
  source 1..1140: mol_type = other DNA
atgcctgagggccgcagccactgtgcctgcagcatcaccagcctgaccctgctggtgtccctgaccagggtgaccctggacatcctgcagaagctggaccccccccagcctgcccactggaggcaccacctgctggtgctgtacaagaagggcgtgtacctgagccacactggaggcaagatgctgttctgggtgctgggcctgctgatcctgtgtggcttcctgtggaccaggaagggcaagctgaagattgaggacatcacagacaagtacatcttcatcaccggctgtgacagcggctttggaaacctggccgcccggacctttgacaagaagggcttccacgtgattgctgcctgcctgacagagagcggcagcacagccctgaaggccgagaccagcgagcggctgaggacagtgctgctggatgtgacagatcctgaaaatgtgaagaggacagcccagtgggtgaagaaccaggtgggggagaagggcctgtggggcctcatcaacaatgccggcgtgcctggggtgctggcccccacagactggctgaccctggaggactaccgggagcccatcgaggtgaacctgtttggcctcatctctgtgaccctgaacatgctgcccctggtgaagaaggcccagggccgggtcatcaacgtgtcctctgtgggcggccgcctggccatcgtgggcggcggctacacccccagcaaatatgctgtggagggcttcaatgacagcctgcggcgggacatgaaggcctttggagtgcacgtgtcctgcatcgagcccggcctcttcaagaccaacctggccgaccctgtgaaggtgattgagaagaagctggccatctgggagcagctgagcccagacatcaagcagcagtacggggagggctacatcgagaagagcctggacaagctgaagggcaacaagagctatgtgaacatggacctgagccctgtggtggagtgcatggaccacgccctgaccagcctcttccccaagacccactacgccgccggcaaggatgccaagatcttctggatccccctgagccacatgcctgctgccctgcaggacttcctgctgctgaagcagaaggccgagctggccaaccccaaggctgtgtag

SEQ ID NO: 149708 - DNA, 960 bp, synthetic construct; identical to SEQ ID NO: 149702
  misc_feature 1..960: note = Description of Artificial Sequence: Synthetic coding sequence
  source 1..960: mol_type = other DNA

SEQ ID NO: 149709 - DNA, 201 bp, synthetic construct
  misc_feature 1..201: note = Description of Artificial Sequence: Synthetic coding sequence
  source 1..201: mol_type = other DNA
atgctgttctgggtgctgggcctgctgatcctgtgtggcttcctgtggaccaggaagggcaagctgaagattgaggacatcacagacaagtacatcttcatcaccggctgtgacagcggctttggaaacctggccgcccggacctttgacaagaagggcttccacgtgattgctgcctgcctgacagagagcggcagctag

SEQ ID NO: 149710 - DNA, 480 bp, synthetic construct
  misc_feature 1..480: note = Description of Artificial Sequence: Synthetic coding sequence
  source 1..480: mol_type = other DNA
atgggcctgccccagcccggcctgtggctgaagaggctgtgggtgctgctggaggtggccgtgcacgtggtggtgggcaaggtgctgctgatcctcttcccagacagagtgaagaggaacatcctggccatgggagagaagacaggcatgaccaggaacccccacttcagccatgacaactggatccccaccttcttcagcacccagtacttctggtttgtgctgaaggtgcgctggcagaggctggaggacaccacagagctgggcggcctggcccccaactgccctgtggtgcggctgagcggccagcgctgcaacatctgggagttcatgcagggcaaccggcccctggtgctgaactttggcagctgccccagcttcatgttcaagtttgaccagttcaagaggctgattgaggacttcagcagcattgctgacttcctggtgatctacatcgaggaggcccacgccagcggctag

SEQ ID NO: 149711 - DNA, 744 bp, synthetic construct
  misc_feature 1..744: note = Description of Artificial Sequence: Synthetic coding sequence
  source 1..744: mol_type = other DNA
atgggcctgccccagcccggcctgtggctgaagaggctgtgggtgctgctggaggtggccgtgcacgtggtggtgggcaaggtgctgctgatcctcttcccagacagagtgaagaggaacatcctggccatgggagagaagacaggcatgaccaggaacccccacttcagccatgacaactggatccccaccttcttcagcacccagtacttctggtttgtgctgaaggtgcgctggcagaggctggaggacaccacagagctgggcggcctggcccccaactgccctgtggtgcggctgagcggccagcgctgcaacatctgggagttcatgcagggcaaccggcccctggtgctgaactttggcagctgccccagcttcatgttcaagtttgaccagttcaagaggctgattgaggacttcagcagcattgctgacttcctggtgatctacatcgaggaggcccacgccagtgatggctgggccttcaagaacaacatggacatccggaaccaccagaacctgcaggaccggctgcaggccgcccacctgctgctggcccggagcccccagtgccctgtggtggtggacaccatgcagaaccagagcagccagctgtatgctgccctgcctgagcggctgtacatcatccaggagggccgcatcctgtacaagggcaagagcggcccctggaactacaaccctgaggaggtgcgggctgtgctggagaagctgcacagctag

SEQ ID NO: 149712 - DNA, 606 bp, synthetic construct
  misc_feature 1..606: note = Description of Artificial Sequence: Synthetic coding sequence
  source 1..606: mol_type = other DNA
atgggcctgccccagcccggcctgtggctgaagaggctgtgggtgctgctggaggtggccgtgcacgtggtggtgggcaaggtgctgctgatcctcttcccagacagagtgaagaggaacatcctggccatgggagagaagacaggcatgaccaggaacccccacttcagccatgacaactggatccccaccttcttcagcacccagtacttctggtttgtgctgaaggtgcgctggcagaggctggaggacaccacagagctgggcggcctggcccccaactgccctgtggtgcggctgagcggccagcgctgcaacatctgggagttcatgcaggacggctgggccttcaagaacaacatggacatccggaaccaccagaacctgcaggaccggctgcaggccgcccacctgctgctggcccggagcccccagtgccctgtggtggtggacaccatgcagaaccagagcagccagctgtatgctgccctgcctgagcggctgtacatcatccaggagggccgcatcctgtacaagggcaagagcggcccctggaactacaaccctgaggaggtgcgggctgtgctggagaagctgcacagctag

SEQ ID NO: 149713 - DNA, 363 bp, synthetic construct
  misc_feature 1..363: note = Description of Artificial Sequence: Synthetic coding sequence
  source 1..363: mol_type = other DNA
atgttcaagtttgaccagttcaagaggctgattgaggacttcagcagcattgctgacttcctggtgatctacatcgaggaggcccacgccagtgatggctgggccttcaagaacaacatggacatccggaaccaccagaacctgcaggaccggctgcaggccgcccacctgctgctggcccggagcccccagtgccctgtggtggtggacaccatgcagaaccagagcagccagctgtatgctgccctgcctgagcggctgtacatcatccaggagggccgcatcctgtacaagggcaagagcggcccctggaactacaaccctgaggaggtgcgggctgtgctggagaagctgcacagctag

SEQ ID NO: 149714 - DNA, 552 bp, synthetic construct
  misc_feature 1..552: note = Description of Artificial Sequence: Synthetic coding sequence
  source 1..552: mol_type = other DNA
atgggcctgccccagcccggcctgtggctgaagaggctgtgggtgctgctggaggtggccgtgcacgtggtggtgggcaaggtgctgctgatcctcttcccagacagagtgaagaggaacatcctggccatgggagagaagacaggcaaccggcccctggtgctgaactttggcagctgccccagcttcatgttcaagtttgaccagttcaagaggctgattgaggacttcagcagcattgctgacttcctggtgatctacatcgaggaggcccacgccagtgatggctgggccttcaagaacaacatggacatccggaaccaccagaacctgcaggaccggctgcaggccgcccacctgctgctggcccggagcccccagtgccctgtggtggtggacaccatgcagaaccagagcagccagctgtatgctgccctgcctgagcggctgtacatcatccaggagggccgcatcctgtacaagggcaagagcggcccctggaactacaaccctgaggaggtgcgggctgtgctggagaagctgcacagctag

SEQ ID NO: 149715 - DNA, 342 bp, synthetic construct
  misc_feature 1..342: note = Description of Artificial Sequence: Synthetic coding sequence
  source 1..342: mol_type = other DNA
atgggcctgccccagcccggcctgtggctgaagaggctgtgggtgctgctggaggtggccgtgcacgtggtggtgggcaaggtgctgctgatcctcttcccagacagagtgaagaggaacatcctggccatgggagagaagacaggcatgaccaggaacccccacttcagccatgacaactggatccccaccttcttcagcacccagtacttctggtttgtgctgaaggtgcgctggcagaggctggaggacaccacagagctgggcggcctggcccccaactgccctgtggtgcggctgagcggccagcgctgcaacatctgggagttcatgcagggctag

SEQ ID NO: 149716 - DNA, 270 bp, synthetic construct
  misc_feature 1..270: note = Description of Artificial Sequence: Synthetic coding sequence
  source 1..270: mol_type = other DNA
atgggcatcctgtctgtggacctgctgatcaccctgcagatcctgcccgtcttcttcagcaactgcctcttcctggccctgtatgacagcgtcatcctgctgaagcacgtggtgctgctgctgagccgcagcaagagcaccagaggagagtggaggaggatgctgaccagcgagggcctgcgctgtgtgtggaagagcttcctgctggatgcctacaagcagctgaactgcccccccagcggcttcagcaaggatggccacatcctgtag

SEQ ID NO: 149717 - DNA, 399 bp, synthetic construct
  misc_feature 1..399: note = Description of Artificial Sequence: Synthetic coding sequence
  source 1..399: mol_type = other DNA
atgggcatcctgtctgtggacctgctgatcaccctgcagatcctgcccgtcttcttcagcaactgcctcttcctggccctgtatgacagcgtcatcctgctgaagcacgtggtgctgctgctgagccgcagcaagagcaccagaggagagtggaggaggatgctgaccagcgagggcctgcgctgtgtgtggaagagcttcctgctggatgcctacaagcaggtgaagctgggagaagatgcccccaacagctctgtggtgcacgtgagcagcacagagggcggggacaacagcggaaatggcacccaggagaagattgctgagggcgccacctgccacctgctggactttgccagccctgagcggcccctggtggtgaactttggcagcgccacctag

SEQ ID NO: 149718 - DNA, 810 bp, synthetic construct
  misc_feature 1..810: note = Description of Artificial Sequence: Synthetic coding sequence
  source 1..810: mol_type = other DNA
atgggcatcctgtctgtggacctgctgatcaccctgcagatcctgcccgtcttcttcagcaactgcctcttcctggccctgtatgacagcgtcatcctgctgaagcacgtggtgctgctgctgagccgcagcaagagcaccagaggagagtggaggaggatgctgaccagcgagggcctgcgctgtgtgtggaagagcttcctgctggatgcctacaagcaggtgaagctgggagaagatgcccccaacagctctgtggtgcacgtgagcagcacagagggcggggacaacagcggaaatggcacccaggagaagattgctgagggcgccacctgccacctgctggactttgccagccctgagcggcccctggtggtgaactttggcagcgccacccccttcaccagccagctgcctgccttcaggaagctggtggaggagttcagctctgtggccgacttcctgctggtgtacattgatgaggcccaccccagtgatggctgggccatccctggggacagcagcctgagctttgaggtgaagaagcaccagaaccaggaggacagatgtgccgccgcccagcagctgctggagcgcttcagcctgcccccccagtgccgggtggtggccgacaggatggacaacaatgccaacatcgcctatggagtggcctttgagcgggtgtgcatcgtgcagaggcagaagatcgcctacctgggcggcaagggccccttctcctacaacctgcaggaggtgcgccactggctggagaagaacttcagcaagaagaagacccggctggccggctag

SEQ ID NO: 149719 - DNA, 21 bp, synthetic construct
  misc_feature 1..21: note = Description of Artificial Sequence: Synthetic coding sequence
  source 1..21: mol_type = other DNA
atgggcatcctgtctgtgtag

SEQ ID NO: 149720 - DNA, 21 bp, synthetic construct
  misc_feature 1..21: note = Description of Artificial Sequence: Synthetic coding sequence
  source 1..21: mol_type = other DNA
atgggcatcctgtctgtgtag

SEQ ID NO: 149721 - DNA, 168 bp, synthetic construct
  misc_feature 1..168: note = Description of Artificial Sequence: Synthetic coding sequence
  source 1..168: mol_type = other DNA
atgggcatcctgtctgtggacctgctgatcaccctgcagatcctgcccgtcttcttcagcaactgcctcttcctggccctgtatgacagcgtcatcctgctgaagcacgtggtgctgctgctgagccgcagcaagagcaccagaggagagtggaggaggatgctgtag

SEQ ID NO: 149722 - DNA, 912 bp, synthetic construct
  misc_feature 1..912: note = Description of Artificial Sequence: Synthetic coding sequence
  source 1..912: mol_type = other DNA
atgggcatcctgtctgtggacctgctgatcaccctgcagatcctgcccgtcttcttcagcaactgcctcttcctggccctgtatgacagcgtcatcctgctgaagcacgtggtgctgctgctgagccgcagcaagagcaccagaggagagtggaggaggatgctgaccagcgagggcctgcgctgtgtgtggaagagcttcctgctggatgcctacaagcagctgaactgcccccccagcggcttcagcaaggatggccacatcctggtgtatgaggcctacaagagccggctgctggtgtacagccacctggacctgtggatggtgaagctgggagaagatgcccccaacagctctgtggtgcacgtgagcagcacagagggcggggacaacagcggaaatggcacccaggagaagattgctgagggcgccacctgccacctgctggactttgccagccctgagcggcccctggtggtgaactttggcagcgccacccccttcaccagccagctgcctgccttcaggaagctggtggaggagttcagctctgtggccgacttcctgctggtgtacattgatgaggcccaccccagtgatggctgggccatccctggggacagcagcctgagctttgaggtgaagaagcaccagaaccaggaggacagatgtgccgccgcccagcagctgctggagcgcttcagcctgcccccccagtgccgggtggtggccgacaggatggacaacaatgccaacatcgcctatggagtggcctttgagcgggtgtgcatcgtgcagaggcagaagatcgcctacctgggcggcaagggccccttctcctacaacctgcaggaggtgcgccactggctggagaagaacttcagcaagaagaagacccggctggccggctag

SEQ ID NO: 149723 - DNA, 810 bp, synthetic construct; identical to SEQ ID NO: 149718
  misc_feature 1..810: note = Description of Artificial Sequence: Synthetic coding sequence
  source 1..810: mol_type = other DNA

SEQ ID NO: 149724 - DNA, 909 bp, synthetic construct
  misc_feature 1..909: note = Description of Artificial Sequence: Synthetic coding sequence
  source 1..909: mol_type = other DNA
atgccccggcaggccaccagccggctggtggtgggggagggggagggcagccagggcgccagcggccctgctgccaccatgctgcggagcctgctgctgcacagcctgcggctgtgtgcccagacagccagctgcctggtgctcttcccccgcttcctgggcacagccttcatgctgtggctgctggacttcctgtgcatcaggaagcacttcctgggcagaagaagaagaggccagcctgagcctgaggtggagctgaacagcgagggggaggaggtgcccccagatgacccccccatctgtgtgtctgatgacaaccggctgtgcaccctggccagcctgaaggctgtgtggcacggccagaagctggacttcttcaagcaggcccacgagggcggccctgcccccaacagcgaggtggtgctgcctgatggcttccagagccagcacatcctggactatgcccagggcaaccggcccctggtgctgaactttggcagctgcccccccttcatggccaggatgtctgccttccagaggctggtgaccaagtaccagagagatgtggacttcctgatcatctacatcgaggaggcccaccccagtgatggctgggtgaccacagacagcccctacatcatcccccagcacaggagcctggaggacagagtgtctgctgcccgggtgctgcagcagggcgcccctggctgtgccctggtgctggacaccatggccaacagcagcagcagcgcctacggggcctactttgagcggctgtatgtgatccagagcggcaccatcatgtaccagggcggccggggcccagatggctaccaggtgtctgagctgcggacctggctggagagatatgatgagcagctgcatggagcccggccccggcgggtgtag

SEQ ID NO: 149725 - DNA, 1026 bp, synthetic construct
  misc_feature 1..1026: note = Description of Artificial Sequence: Synthetic coding sequence
  source 1..1026: mol_type = other DNA
atgtctgccagcgccccagctgctgagggggagggcacccccacccagcctgccagcgagaaggagcctgagatgcctggcccccgggaggagagcgaggaggaggaggatgaagatgatgaggaggaggaggaggaggagaagggcaagggccagaagctgtgtgaaattgagcgcatccacttcttcctgagcaagaagaagacagatgagctgaggaacctgcacaagctgctgtacaacagacctggcaccgtgagcagcctgaagaagaatgtgggccagttcagcggcttcccctttgagaagggctctgtgcagtacaagaagaaggaggagatgctgaagaagttcagaaatgccatgctgaagagcatctgtgaggtgctggacctggagaggtctggagtgaacagcgagctggtgaagaggatcctgaacttcctgatgcaccccaagcccagcggcaagcccctgcccaagagcaagaagacctgcagcaagggcagcaagaaggagaggaacagcagcggcatggccaggaaggccaagaggaccaagtgcccagagatcctgagtgatgagagcagcagtgatgaagatgagaagaagaacaaggaggagagcagtgatgatgaggacaaggagagcgaggaggagccccccaagaagacagccaagcgggagaagcccaagcagaaggccaccagcaagagcaagaagtctgtgaagagcgccaacgtgaagaaggctgacagcagcaccaccaagaagaaccagaacagcagcaagaaggagagcgagagcgaggacagcagtgatgatgagcccctcatcaagaagctgaagaagcccccaacagatgaggagctgaaggagaccatcaagaagctgctggccagcgccaacctggaggaggtgaccatgaagcagatctgcaagaaggtgtatgagaactaccccacctatgacctgacagagaggaaggacttcatcaagaccaccgtgaaggagctgatctcctag

SEQ ID NO: 149726 - DNA, 1128 bp, synthetic construct
  misc_feature 1..1128: note = Description of Artificial Sequence: Synthetic coding sequence
  source 1..1128: mol_type = other DNA
atgtctgccagcgccccagctgctgagggggagggcacccccacccagcctgccagcgagaaggagcctgagatgcctggcccccgggaggagagcgaggaggaggaggatgaagatgatgaggaggaggaggaggaggagaaggagaagagcctgattgtggagggcaagcgggagaagaagaaggtggagcggctgaccatgcaggtgagcagcctgcagcgggagcccttcaccatcgcccagggcaagggccagaagctgtgtgaaattgagcgcatccacttcttcctgagcaagaagaagacagatgagctgaggaacctgcacaagctgctgtacaacagacctggcaccgtgagcagcctgaagaagaatgtgggccagttcagcggcttcccctttgagaagggctctgtgcagtacaagaagaaggaggagatgctgaagaagttcagaaatgccatgctgaagagcatctgtgaggtgctggacctggagaggtctggagtgaacagcgagctggtgaagaggatcctgaacttcctgatgcaccccaagcccagcggcaagcccctgcccaagagcaagaagacctgcagcaagggcagcaagaaggagaggaacagcagcggcatggccaggaaggccaagaggaccaagtgcccagagatcctgagtgatgagagcagcagtgatgaagatgagaagaagaacaaggaggagagcagtgatgatgaggacaaggagagcgaggaggagccccccaagaagacagccaagcgggagaagcccaagcagaaggccaccagcaagagcaagaagtctgtgaagagcgccaacgtgaagaaggctgacagcagcaccaccaagaagaaccagaacagcagcaagaaggagagcgagagcgaggacagcagtgatgatgagcccctcatcaagaagctgaagaagcccccaacagatgaggagctgaaggagaccatcaagaagctgctggccagcgccaacctggaggaggtgaccatgaagcagatctgcaagaaggtgtatgagaactaccccacctatgacctgacagagaggaaggacttcatcaagaccaccgtgaaggagctgatctcctag

SEQ ID NO: 149727 - DNA, 1101 bp, synthetic construct
  misc_feature 1..1101: note = Description of Artificial Sequence: Synthetic coding sequence
  source 1..1101: mol_type = other DNA
atgtctgctgccaaccctgagacccccaacagcaccatcagccgggaggccagcacccagagcagcagcgctgctgccagccagggctgggtgctgcctgagggcaagatcgtgcccaacacagtgtttgtgggcggcattgatgccaggatggatgaaacagagatcggcagctgcttcggccgctatggctctgtgaaggaggtgaagatcatcaccaacagaactggagtgtccaagggctacggctttgtgtcctttgtgaatgatgtggatgtgcagaagatcgtgggcagccagatccacttccacggcaagaagctgaagctgggccctgccatcaggaagcagaagctgtgtgcccggcacgtgcagccccggcccctggtggtgaaccccccacctccaccccagttccagaatgtgtggaggaaccccaacacagagacctacctgcagccccagatcacccccaaccctgtgacccagcacgtgcaggcctacagcgcctacccccacagccctggccaggtgatcaccggctgccagctgctggtgtacaactaccaggagtaccccacctacccagacagcgccttccaggtgaccaccggctaccagctgcctgtgtacaactaccagcccttccctgcctaccccagcagccccttccaggtgacagctggctaccagctgcctgtgtacaactaccaggccttccctgcctaccccagcagccccttccaggtgaccaccggctaccagctgcctgtgtacaactaccaggccttccctgcctaccccagcagccccttccaggtgaccaccggctaccagctgcctgtgtacaactaccaggccttccctgcctaccccagcagccccttccaggtgaccaccggctaccagctgcctgtgtacaactaccaggccttccctgcctaccccaacagcgctgtgcaggtgaccaccggctaccagttccacgtgtacaactaccagatgccaccccagtgccctgtgggggagcagaggaggaacctgtggacagaggcctacaagtggtggtacctggtgtgcctgatccagaggcgggactag

SEQ ID NO: 149728 - DNA, 1605 bp, synthetic construct
  misc_feature 1..1605: note = Description of Artificial Sequence: Synthetic coding sequence
  source 1..1605: mol_type = other DNA
atgtctgctgccaaccctgagacccccaacagcaccatcagccgggaggccagcacccagagcagcagcgctgctgccagccagggctgggtgctgcctgagggcaagatcgtgcccaacacagtgtttgtgggcggcattgatgccaggatggatgaaacagagatcggcagctgcttcggccgctatggctctgtgaaggaggtgaagatcatcaccaacagaactggagtgtccaagggctacggctttgtgtcctttgtgaatgatgtggatgtgcagaagatcgtgggcagccagatccacttccacggcaagaagctgaagctgggccctgccatcaggaagcagaagctgtgtgcccggcacgtgcagccccggcccctggtggtgaaccccccacctccaccccagttccagaatgtgtggaggaaccccaacacagagacctacctgcagccccagatcacccccaaccctgtgacccagcacgtgcaggcctacagcgcctacccccacagccctggccaggtgatcaccggctgccagctgctggtgtacaactaccaggagtaccccacctacccagacagcgccttccaggtgaccaccggctaccagctgcctgtgtacaactaccagcccttccctgcctaccccaggagccccttccaggtgacagctggctaccagctgcctgtgtacaactaccaggccttccctgcctaccccaacagccccttccaggtggccaccggctaccagtttcctgtgtacaactaccagcccttccctgcctaccccagcagccccttccaggtgacagctggctaccagctgcctgtgtacaactaccaggccttccctgcctaccccaacagccccttccaggtggccaccggctaccagtttcctgtgtacaactaccaggccttccctgcctaccccaacagccctgtgcaggtgaccaccggctaccagctgcctgtgtacaactaccaggccttccctgcctaccccagcagccccttccaggtgaccaccggctaccagctgcctgtgtacaactaccaggccttccctgcctaccccagcagccccttccaggtgaccaccggctaccagctgcctgtgtacaactaccaggccttccctgcctaccccagcagccccttccaggtgaccaccggctaccagctgcctgtgtacaactaccaggccttccctgcctaccccagcagccccttccaggtgaccaccggctaccagctgcctgtgtacaactaccaggccttccctgcctaccccagcagccccttccaggtgaccaccggctaccagctgcctgtgtacaactaccaggccttccctgcctaccccagcagccccttccaggtgaccaccggctaccagctgcctgtgtacaactaccaggccttccctgcctaccccaacagcgctgtgcaggtgaccaccggctaccagttccacgtgtacaactaccagatgccaccccagtgccctgtgggggagcagaggaggaacctgtggacagaggcctacaagtggtggtacctggtgtgcctgatccagaggcgggactag

SEQ ID NO: 149729 - DNA, 1821 bp, synthetic construct
  misc_feature 1..1821: note = Description of Artificial Sequence: Synthetic coding sequence
  source 1..1821: mol_type = other DNA
atgtctgctgccaaccctgagacccccaacagcaccatcagccgggaggccagcacccagagcagcagcgctgctgccagccagggctgggtgctgcctgagggcaagatcgtgcccaacacagtgtttgtgggcggcattgatgccaggatggatgaaacagagatcggcagctgcttcggccgctatggctctgtgaaggaggtgaagatcatcaccaacagaactggagtgtccaagggctacggctttgtgtcctttgtgaatgatgtggatgtgcagaagatcgtgggcagccagatccacttccacggcaagaagctgaagctgggccctgccatcaggaagcagaagctgtgtgcccggcacgtgcagccccggcccctggtggtgaaccccccacctccaccccagttccagaatgtgtggaggaaccccaacacagagacctacctgcagccccagatcacccccaaccctgtgacccagcacgtgcaggcctacagcgcctacccccacagccctggccaggtgatcaccggctgccagctgctggtgtacaactaccaggagtaccccacctacccagacagcgccttccaggtgaccaccggctaccagctgcctgtgtacaactaccagcccttccctgcctaccccaggagccccttccaggtgacagctggctaccagctgcctgtgtacaactaccaggccttccctgcctaccccaacagccccttccaggtggccaccggctaccagtttcctgtgtacaactaccagcccttccctgcctaccccagcagccccttccaggtgacagctggctaccagctgcctgtgtacaactaccaggccttccctgcctaccccaacagccccttccaggtggccaccggctaccagtttcctgtgtacaactaccagcccttccctgcctaccccagcagccccttccaggtgacagctggctaccagctgcctgtgtacaactaccaggccttccctgcctaccccaacagccccttccaggtggccaccggctaccagtttcctgtgtacaactaccaggccttccctgcctaccccaacagccctgtgcaggtgaccaccggctaccagctgcctgtgtacaactaccaggccttccctgcctaccccaacagccctgtgcaggtgaccaccggctaccagctgcctgtgtacaactaccaggccttccctgcctaccccagcagccccttccaggtgaccaccggctaccagctgcctgtgtacaactaccaggccttccctgcctaccccagcagccccttccaggtgaccaccggctaccagctgcctgtgtacaactaccaggccttccctgcctaccccagcagccccttccaggtgaccaccggctaccagctgcctgtgtacaactaccaggccttccctgcctaccccagcagccccttccaggtgaccaccggctaccagctgcctgtgtacaactaccaggccttccctgcctaccccagcagccccttccaggtgaccaccggctaccagctgcctgtgtacaactaccaggccttccctgcctaccccagcagccccttccaggtgaccaccggctaccagctgcctgtgtacaactaccaggccttccctgcctaccccaacagcgctgtgcaggtgaccaccggctaccagttccacgtgtacaactaccagatgccaccccagtgccctgtgggggagcagaggaggaacctgtggacagaggcctacaagtggtggtacctggtgtgcctgatccagaggcgggactag

SEQ ID NO: 149730 - DNA, 1461 bp, synthetic construct
  misc_feature 1..1461: note = Description of Artificial Sequence: Synthetic coding sequence
  source 1..1461: mol_type = other DNA
atgtctgctgccaaccctgagacccccaacagcaccatcagccgggaggccagcacccagagcagcagcgctgctgccagccagggctgggtgctgcctgagggcaagatcgtgcccaacacagtgtttgtgggcggcattgatgccaggatggatgaaacagagatcggcagctgcttcggccgctatggctctgtgaaggaggtgaagatcatcaccaacagaactggagtgtccaagggctacggctttgtgtcctttgtgaatgatgtggatgtgcagaagatcgtgggcagccagatccacttccacggcaagaagctgaagctgggccctgccatcaggaagcagaagctgtgtgcccggcacgtgcagccccggcccctggtggtgaaccccccacctccaccccagttccagaatgtgtggaggaaccccaacacagagacctacctgcagccccagatcacccccaaccctgtgacccagcacgtgcaggcctacagcgcctacccccacagccctggccaggtgatcaccggctgccagctgctggtgtacaactaccaggagtaccccacctacccagacagcgccttccaggtgaccaccggctaccagctgcctgtgtacaactaccagcccttccctgcctaccccaggagccccttccaggtgacagctggctaccagctgcctgtgtacaactaccaggccttccctgcctaccccaacagccccttccaggtggccaccggctaccagtttcctgtgtacaactaccagcccttccctgcctaccccagcagccccttccaggtgacagctggctaccagctgcctgtgtacaactaccaggccttccctgcctaccccaacagccccttccaggtggccaccggctaccagtttcctgtgtacaactaccagcccttccctgcctaccccagcagccccttccaggtgacagctggctaccagctgcctgtgtacaactaccaggccttccctgcctaccccaacagccccttccaggtggccaccggctaccagtttcctgtgtacaactaccaggccttccctgcctaccccaacagccctgtgcaggtgaccaccggctaccagctgcctgtgtacaactaccaggccttccctgcctaccccaacagccccttccaggtggccaccggctaccagtttcctgtgtacaactaccaggccttccctgcctaccccaacagccctgtgcaggtgaccaccggctaccagctgcctgtgtacaactaccaggccttccctgcctaccccaacagcgctgtgcaggtgaccaccggctaccagttccacgtgtacaactaccagatgccaccccagtgccctgtgggggagcagaggaggaacctgtggacagaggcctacaagtggtggtacctggtgtgcctgatccagaggcgggactag

SEQ ID NO: 149731 - DNA, 1677 bp, synthetic construct
  misc_feature 1..1677: note = Description of Artificial Sequence: Synthetic coding sequence
  source 1..1677: mol_type = other DNA
atgtctgctgccaaccctgagacccccaacagcaccatcagccgggaggccagcacccagagcagcagcgctgctgccagccagggctgggtgctgcctgagggcaagatcgtgcccaacacagtgtttgtgggcggcattgatgccaggatggatgaaacagagatcggcagctgcttcggccgctatggctctgtgaaggaggtgaagatcatcaccaacagaactggagtgtccaagggctacggctttgtgtcctttgtgaatgatgtggatgtgcagaagatcgtgggcagccagatccacttccacggcaagaagctgaagctgggccctgccatcaggaagcagaagctgtgtgcccggcacgtgcagccccggcccctggtggtgaaccccccacctccaccccagttccagaatgtgtggaggaaccccaacacagagacctacctgcagccccagatcacccccaaccctgtgacccagcacgtgcaggcctacagcgcctacccccacagccctggccaggtgatcaccggctgccagctgctggtgtacaactaccaggagtaccccacctacccagacagcgccttccaggtgaccaccggctaccagctgcctgtgtacaactaccagcccttccctgcctaccccaggagccccttccaggtgacagctggctaccagctgcctgtgtacaactaccaggccttccctgcctaccccaacagccccttccaggtggccaccggctaccagtttcctgtgtacaactaccagcccttccctgcctaccccagcagccccttccaggtgacagctggctaccagctgcctgtgtacaactaccaggccttccctgcctaccccaacagccccttccaggtggccaccggctaccagtttcctgtgtacaactaccaggccttccctgcctaccccaacagccctgtgcaggtgaccaccggctaccagctgcctgtgtacaactaccaggccttccctgcctaccccaacagccctgtgcaggtgaccaccggctaccagctgcctgtgtacaactaccaggccttccctgcctaccccagcagccccttccaggtgaccaccggctaccagctgcctgtgtacaactaccaggccttccctgcctaccccagcagccccttccaggtgaccaccggctaccagctgcctgtgtacaactaccaggccttccctgcctaccccagcagccccttccaggtgaccaccggctaccagctgcctgtgtacaactaccaggccttccctgcctaccccagcagccccttccaggtgaccaccggctaccagctgcctgtgtacaactaccaggccttccctgcctaccccagcagccccttccaggtgaccaccggctaccagctgcctgtgtacaactaccaggccttccctgcctaccccagcagccccttccaggtgaccaccggctaccagctgcctgtgtacaactaccaggccttccctgcctaccccaacagcgctgtgcaggtgaccaccggctaccagttccacgtgtacaactaccagatgccaccccagtgccctgtgggggagcagaggaggaacctgtggacagaggcctacaagtggtggtacctggtgtgcctgatccagaggcgggactag

SEQ ID NO: 149732 - DNA, 1086 bp, synthetic construct
  misc_feature 1..1086: note = Description of Artificial Sequence: Synthetic coding sequence
  source 1..1086: mol_type = other DNA
atgtctgctgccaaccctgagacccccaacagcaccatcagccgggaggccagcacccagagcagcagcgctgctgccagccagggctgggtgctgcctgagggcaagatcgtgcccaacacagtgtttgtgggcggcattgatgccaggatggatgaaacagagatcggcagctgcttcggccgctatggctctgtgaaggaggtgaagatcatcaccaacagaactggagtgtccaagggctacggctttgtgtcctttgtgaatgatgtggatgtgcagaagatcgtgggcagccagatccacttccacggcaagaagctgaagctgggccctgccatcaggaagcagaagctgtgtgcccggcacgtgcagccccggcccctggtggtgaaccccccacctccaccccagttccagaatgtgtggaggaaccccaacacagagacctacctgcagccccagatcacccccaaccctgtgacccagcacgtgcaggcctacagcgcctacccccacagccctggccaggtgatcaccggctgccagctgctggtgtacaactaccaggagtaccccacctacccagacagcgccttccaggtgaccaccggctaccagctgcctgtgtacaactaccagcccttccctgcctaccccaggagccccttccaggtgacagctggctaccagctgcctgtgtacaactaccaggccttccctgcctaccccaacagccccttccaggtggccaccggctaccagtttcctgtgtacaactaccagcccttccctgcctaccccagcagccccttccaggtgacagctggctaccagctgcctgtgtacaactaccaggccttccctgcctaccccaacagccccttccaggtggccaccggctaccagtttcctgtgtacaactaccaggccttccctgcctaccccaacagccccttccaggtggccaccggctaccagtttcctgtgtacaactaccaggccttccctgcctaccccaacagccctgtgcaggtgaccaccggctaccagctgcctgtgtacaactaccagatgccaccctag

SEQ ID NO: 149733 - DNA, 1965 bp, synthetic construct
  misc_feature 1..1965: note = Description of Artificial Sequence: Synthetic coding sequence
  source 1..1965: mol_type = other DNA
atgtctgctgccaaccctgagacccccaacagcaccatcagccgggaggccagcacccagagcagcagcgctgctgccagccagggctgggtgctgcctgagggcaagatcgtgcccaacacagtgtttgtgggcggcattgatgccaggatggatgaaacagagatcggcagctgcttcggccgctatggctctgtgaaggaggtgaagatcatcaccaacagaactggagtgtccaagggctacggctttgtgtcctttgtgaatgatgtggatgtgcagaagatcgtgggcagccagatccacttccacggcaagaagctgaagctgggccctgccatcaggaagcagaagctgtgtgcccggcacgtgcagccccggcccctggtggtgaaccccccacctccaccccagttccagaatgtgtggaggaaccccaacacagagacctacctgcagccccagatcacccccaaccctgtgacccagcacgtgcaggcctacagcgcctacccccacagccctggccaggtgatcaccggctgccagctgctggtgtacaactaccaggagtaccccacctacccagacagcgccttccaggtgaccaccggctaccagctgcctgtgtacaactaccagcccttccctgcctaccccaggagccccttccaggtgacagctggctaccagctgcctgtgtacaactaccaggccttccctgcctaccccaacagccccttccaggtggccaccggctaccagtttcctgtgtacaactaccagcccttccctgcctaccccagcagccccttccaggtgacagctggctaccagctgcctgtgtacaactaccaggccttccctgcctaccccaacagccccttccaggtggccaccggctaccagtttcctgtgtacaactaccagcccttccctgcctaccccagcagccccttccaggtgacagctggctaccagctgcctgtgtacaactaccaggccttccctgcctaccccaacagccccttccaggtggccaccggctaccagtttcctgtgtacaactaccaggccttccctgcctaccccaacagccctgtgcaggtgaccaccggctaccagctgcctgtgtacaactaccagcccttccctgcctaccccaggagccccttccaggtgacagctggctaccagctgcctgtgtacaactaccaggccttccctgcctaccccaacagccccttccaggtggccaccggctaccagtttcctgtgtacaactaccaggccttccctgcctaccccaacagccctgtgcaggtgaccaccggctaccagctgcctgtgtacaactaccaggccttccctgcctaccccagcagccccttccaggtgaccaccggctaccagctgcctgtgtacaactaccaggccttccctgcctaccccagcagccccttccaggtgaccaccggctaccagctgcctgtgtacaactaccaggccttccctgcctaccccagcagccccttccaggtgaccaccggctaccagctgcctgtgtacaactaccaggccttccctgcctaccccagcagccccttccaggtgaccaccggctaccagctgcctgtgtacaactaccaggccttccctgcctaccccagcagccccttccaggtgaccaccggctaccagctgcctgtgtacaactaccaggccttccctgcctaccccagcagccccttccaggtgaccaccggctaccagctgcctgtgtacaactaccaggccttccctgcctaccccaacagcgctgtgcaggtgaccaccggctaccagttccacgtgtacaactaccagatgccaccccagtgccctgtgggggagcagaggaggaacctgtggacagaggcctacaagtggtggtacctggtgtgcctgatccagaggcgggactag

SEQ ID NO: 149734 - DNA, 1605 bp, synthetic construct; identical to SEQ ID NO: 149728
  misc_feature 1..1605: note = Description of Artificial Sequence: Synthetic coding sequence
  source 1..1605: mol_type = other DNA

SEQ ID NO: 149735 - DNA, 1317 bp, synthetic construct
  misc_feature 1..1317: note = Description of Artificial Sequence: Synthetic coding sequence
  source 1..1317: mol_type = other DNA
atgtctgctgccaaccctgagacccccaacagcaccatcagccgggaggccagcacccagagcagcagcgctgctgccagccagggctgggtgctgcctgagggcaagatcgtgcccaacacagtgtttgtgggcggcattgatgccaggatggatgaaacagagatcggcagctgcttcggccgctatggctctgtgaaggaggtgaagatcatcaccaacagaactggagtgtccaagggctacggctttgtgtcctttgtgaatgatgtggatgtgcagaagatcgtgggcagccagatccacttccacggcaagaagctgaagctgggccctgccatcaggaagcagaagctgtgtgcccggcacgtgcagccccggcccctggtggtgaaccccccacctccaccccagttccagaatgtgtggaggaaccccaacacagagacctacctgcagccccagatcacccccaaccctgtgacccagcacgtgcaggcctacagcgcctacccccacagccctggccaggtgatcaccggctgccagctgctggtgtacaactaccaggagtaccccacctacccagacagcgccttccaggtgaccaccggctaccagctgcctgtgtacaactaccagcccttccctgcctaccccaggagccccttccaggtgacagctggctaccagctgcctgtgtacaactaccaggccttccctgcctaccccaacagccccttccaggtggccaccggctaccagtttcctgtgtacaactaccaggccttccctgcctaccccaacagccccttccaggtggccaccggctaccagtttcctgtgtacaactaccaggccttccctgcctaccccaacagccccttccaggtggccaccggctaccagtttcctgtgtacaactaccaggccttccctgcctaccccaacagccctgtgcaggtgaccaccggctaccagctgcctgtgtacaactaccaggccttccctgcctaccccaacagccccttccaggtggccaccggctaccagtttcctgtgtacaactaccaggccttccctgcctaccccaacagccctgtgcaggtgaccaccggctaccagctgcctgtgtacaactaccaggccttccctgcctaccccaacagcgctgtgcaggtgaccaccggctaccagttccacgtgtacaactaccagatgccaccccagtgccctgtgggggagcagaggaggaacctgtggacagaggcctacaagtggtggtacctggtgtgcctgatccagaggcgggactag

SEQ ID NO: 149736 - DNA, 1173 bp, synthetic construct
  misc_feature 1..1173: note = Description of Artificial Sequence: Synthetic coding sequence
  source 1..1173: mol_type = other DNA
atgtctgctgccaaccctgagacccccaacagcaccatcagccgggaggccagcacccagagcagcagcgctgctgccagccagggctgggtgctgcctgagggcaagatcgtgcccaacacagtgtttgtgggcggcattgatgccaggatggatgaaacagagatcggcagctgcttcggccgctatggctctgtgaaggaggtgaagatcatcaccaacagaactggagtgtccaagggctacggctttgtgtcctttgtgaatgatgtggatgtgcagaagatcgtgggcagccagatccacttccacggcaagaagctgaagctgggccctgccatcaggaagcagaagctgtgtgcccggcacgtgcagccccggcccctggtggtgaaccccccacctccaccccagttccagaatgtgtggaggaaccccaacacagagacctacctgcagccccagatcacccccaaccctgtgacccagcacgtgcaggcctacagcgcctacccccacagccctggccaggtgatcaccggctgccagctgctggtgtacaactaccaggagtaccccacctacccagacagcgccttccaggtgaccaccggctaccagctgcctgtgtacaactaccagcccttccctgcctaccccaggagccccttccaggtgacagctggctaccagctgcctgtgtacaactaccaggccttccctgcctaccccaacagccccttccaggtggccaccggctaccagtttcctgtgtacaactaccagcccttccctgcctaccccagcagccccttccaggtgacagctggctaccagctgcctgtgtacaactaccaggccttccctgcctaccccaacagccccttccaggtggccaccggctaccagtttcctgtgtacaactaccaggccttccctgcctaccccaacagccctgtgcaggtgaccaccggctaccagctgcctgtgtacaactaccaggccttccctgcctaccccaacagcgctgtgcaggtgaccaccggctaccagttccacgtgtacaactaccagatgccaccccagtgccctgtgggggagcagaggaggaacctgtggacagaggcctacaagtggtggtacctggtgtgcctgatccagaggcgggactag

SEQ ID NO: 149737 - DNA, 1746 bp, synthetic construct
  misc_feature 1..1746: note = Description of Artificial Sequence: Synthetic coding sequence
  source 1..1746: mol_type = other DNA
atgatggatgaaacagaaattggcagctgcttcggccgctatggctctgtgaaggaggtgaagatcatcaccaacagaactggagtgtccaagggctacggctttgtgtcctttgtgaatgatgtggatgtgcagaagatcgtgggcagccagatccacttccacggcaagaagctgaagctgggccctgccatcaggaagcagaagctgtgtgcccggcacgtgcagccccggcccctggtggtgaaccccccacctccaccccagttccagaatgtgtggaggaaccccaacacagagacctacctgcagccccagatcacccccaaccctgtgacccagcacgtgcaggcctacagcgcctacccccacagccctggccaggtgatcaccggctgccagctgctggtgtacaactaccaggagtaccccacctacccagattctgccttccaggtgaccaccggctaccagctgcctgtgtacaactaccagcccttccctgcctaccccaggagccccttccaggtgacagctggctaccagctgcctgtgtacaactaccaggccttccctgcctaccccaacagccccttccaggtggccaccggctaccagtttcctgtgtacaactaccagcccttccctgcctaccccagcagccccttccaggtgacagctggctaccagctgcctgtgtacaactaccaggccttccctgcctaccccaacagccccttccaggtggccaccggctaccagtttcctgtgtacaactaccaggccttccctgcctaccccaacagccccttccaggtggccaccggctaccagtttcctgtgtacaactaccaggccttccctgcctaccccaacagccctgtgcaggtgaccaccggctaccagctgcctgtgtacaactaccagcccttccctgcctaccccaggagccccttccaggtgacagctggctaccagctgcctgtgtacaactaccaggccttccctgcctaccccaacagccccttccaggtggccaccggctaccagtttcctgtgtacaactaccaggccttccctgcctaccccaacagccctgtgcaggtgaccaccggctaccagctgcctgtgtacaactaccaggccttccctgcctaccccagcagccccttccaggtgaccaccggctaccagctgcctgtgtacaactaccaggccttccctgcctaccccagcagccccttccaggtgaccaccggctaccagctgcctgtgtacaactaccaggccttccctgcctaccccagcagccccttccaggtgaccaccggctaccagctgcctgtgtacaactaccaggccttccctgcctaccccagcagccccttccaggtgaccaccggctaccagctgcctgtgtacaactaccaggccttccctgcctaccccagcagccccttccaggtgaccaccggctaccagctgcctgtgtacaactaccaggccttccctgcctaccccagcagccccttccaggtgaccaccggctaccagctgcctgtgtacaactaccaggccttccctgcctaccccaacagcgctgtgcaggtgaccaccggctaccagttccacgtgtacaactaccagatgccaccccagtgccctgtgggggagcagaggaggaacctgtggacagaggcctacaagtggtggtacctggtgtgcctgatccagaggcgggactag

SEQ ID NO: 149738 - DNA, 1014 bp, synthetic construct
  misc_feature 1..1014: note = Description of Artificial Sequence: Synthetic coding sequence
  source 1..1014: mol_type = other DNA
atgtctgctgccaaccctgagacccccaacagcaccatcagccgggaggccagcacccagagcagcagcgctgctgccagccagggctgggtgctgcctgagggcaagatcgtgcccaacacagtgtttgtgggcggcattgatgccaggatggatgaaacagagatcggcagctgcttcggccgctatggctctgtgaaggaggtgaagatcatcaccaacagaactggagtgtccaagggctacggctttgtgtcctttgtgaatgatgtggatgtgcagaagatcgtgggcagccagatccacttccacggcaagaagctgaagctgggccctgccatcaggaagcagaagctgtgtgcccggcacgtgcagccccggcccctggtggtgaaccccccacctccaccccagttccagaatgtgtggaggaaccccaacacagagacctacctgcagccccagatcacccccaaccctgtgacccagcacgtgcaggcctacagcgcctacccccacagccctggccaggtgatcaccggctgccagctgctggtgtacaactaccaggagtaccccacctacccagacagcgccttccaggtgaccaccggctaccagctgcctgtgtacaactaccagcccttccctgcctaccccaggagccccttccaggtgacagctggctaccagctgcctgtgtacaactaccaggccttccctgcctaccccaacagccccttccaggtggccaccggctaccagtttcctgtgtacaactaccaggccttccctgcctaccccaacagccctgtgcaggtgaccaccggctaccagctgcctgtgtacaactaccaggccttccctgcctaccccaacagccccttccaggtggccaccggctaccagtttcctgtgtacaactaccaggccttccctgcctaccccaacagccctgtgcaggtgaccaccggctaccagctgcctgtgtacaactaccagatgccaccctag

SEQ ID NO: 149739 - DNA, 1101 bp, synthetic construct
  misc_feature 1..1101: note = Description of Artificial Sequence: Synthetic coding sequence
  source 1..1101: mol_type = other DNA
atgtctgctgccaaccctgagacccccaacagcaccatcagccgggaggccagcacccagagcagcagcgctgctgccagccagggctgggtgctgcctgagggcaagatcgtgcccaacacagtgtttgtgggcggcattgatgccaggatggatgaaacagagatcggcagctgcttcggccgctatggctctgtgaaggaggtgaagatcatcaccaacagaactggagtgtccaagggctacggctttgtgtcctttgtgaatgatgtggatgtgcagaagatcgtgggcagccagatccacttccacggcaagaagctgaagctgggccctgccatcaggaagcagaagctgtgtgcccggcacgtgcagccccggcccctggtggtgaaccccccacctccaccccagttccagaatgtgtggaggaaccccaacacagagacctacctgcagccccagatcacccccaaccctgtgacccagcacgtgcaggcctacagcgcctacccccacagccctggccaggtgatcaccggctgccagctgctggtgtacaactaccaggagtaccccacctacccagacagcgccttccaggtgaccaccggctaccagctgcctgtgtacaactaccagcccttccctgcctaccccaggagccccttccaggtgacagctggctaccagctgcctgtgtacaactaccaggccttccctgcctaccccaacagccctgtgcaggtgaccaccggctaccagctgcctgtgtacaactaccaggccttccctgcctaccccaacagccctgtgcaggtgaccaccggctaccagctgcctgtgtacaactaccaggccttccctgcctaccccaacagccctgtgcaggtgaccaccggctaccagctgcctgtgtacaactaccaggccttccctgcctaccccaacagcgctgtgcaggtgaccaccggctaccagttccacgtgtacaactaccagatgccaccccagtgccctgtgggggagcagaggaggaacctgtggacagaggcctacaagtggtggtacctggtgtgcctgatccagaggcgggactag

SEQ ID NO: 149740 - DNA, 1317 bp, synthetic construct
  misc_feature 1..1317: note = Description of Artificial Sequence: Synthetic coding sequence
  source 1..1317: mol_type = other DNA
atgtctgctgccaaccctgagacccccaacagcaccatcagccgggaggccagcacccagagcagcagcgctgctgccagccagggctgggtgctgcctgagggcaagatcgtgcccaacacagtgtttgtgggcggcattgatgccaggatggatgaaacagagatcggcagctgcttcggccgctatggctctgtgaaggaggtgaagatcatcaccaacagaactggagtgtccaagggctacggctttgtgtcctttgtgaatgatgtggatgtgcagaagatcgtgggcagccagatccacttccacggcaagaagctgaagctgggccctgccatcaggaagcagaagctgtgtgcccggcacgtgcagccccggcccctggtggtgaaccccccacctccaccccagttccagaatgtgtggaggaaccccaacacagagacctacctgcagccccagatcacccccaaccctgtgacccagcacgtgcaggcctacagcgcctacccccacagccctggccaggtgatcaccggctgccagctgctggtgtacaactaccaggagtaccccacctacccagacagcgccttccaggtgaccaccggctaccagctgcctgtgtacaactaccagcccttccctgcctaccccaggagccccttccaggtgacagctggctaccagctgcctgtgtacaactaccaggccttccctgcctaccccaacagccccttccaggtggccaccggctaccagtttcctgtgtacaactaccaggccttccctgcctaccccaacagccctgtgcaggtgaccaccggctaccagctgcctgtgtacaactaccaggccttccctgcctaccccaacagccccttccaggtggccaccggctaccagtttcctgtgtacaactaccaggccttccctgcctaccccaacagccctgtgcaggtgaccaccggctaccagctgcctgtgtacaactaccaggccttccctgcctaccccaacagccccttccaggtggccaccggctaccagtttcctgtgtacaactaccaggccttccctgcctaccccaacagccctgtgcaggtgaccaccggctaccagctgcctgtgtacaactaccaggccttccctgcctaccccaacagcgctgtgcaggtgaccaccggctaccagttccacgtgtacaactaccagatgccaccccagtgccctgtgggggagcagaggaggaacctgtggacagaggcctacaagtggtggtacctggtgtgcctgatccagaggcgggactag

SEQ ID NO: 149741 - DNA, 1086 bp, synthetic construct
  misc_feature 1..1086: note = Description of Artificial Sequence: Synthetic coding sequence
  source 1..1086: mol_type = other DNA
atgtctgctgccaaccctgagacccccaacagcaccatcagccgggaggccagcacccagagcagcagcgctgctgccagccagggctgggtgctgcctgagggcaagatcgtgcccaacacagtgtttgtgggcggcattgatgccaggatggatgaaacagagatcggcagctgcttcggccgctatggctctgtgaaggaggtgaagatcatcaccaacagaactggagtgtccaagggctacggctttgtgtcctttgtgaatgatgtggatgtgcagaagatcgtgggcagccagatccacttccacggcaagaagctgaagctgggccctgccatcaggaagcagaagctgtgtgcccggcacgtgcagccccggcccctggtggtgaaccccccacctccaccccagttccagaatgtgtggaggaaccccaacacagagacctacctgcagccccagatcacccccaaccctgtgacccagcacgtgcaggcctacagcgcctacccccacagccctggccaggtgatcaccggctgccagctgctggtgtacaactaccaggagtaccccacctacccagacagcgccttccaggtgaccaccggctaccagctgcctgtgtacaactaccagcccttccctgcctaccccaggagccccttccaggtgacagctggctaccagctgcctgtgtacaactaccaggccttccctgcctaccccaacagccccttccaggtggccaccggctaccagtttcctgtgtacaactaccaggccttccctgcctaccccaacagccctgtgcaggtgaccaccggctaccagctgcctgtgtacaactaccaggccttccctgcctaccccaacagccccttccaggtggccaccggctaccagtttcctgtgtacaactaccaggccttccctgcctaccccaacagccctgtgcaggtgaccaccggctaccagctgcctgtgtacaactaccaggccttccctgcctaccccaacagccctgtgcaggtgaccaccggctaccagctgcctgtgtacaactaccagatgccaccctag

SEQ ID NO: 149742 - DNA, 1173 bp, synthetic construct
  misc_feature 1..1173: note = Description of Artificial Sequence: Synthetic coding sequence
  source 1..1173: mol_type = other DNA
atgtctgctgccaaccctgagacccccaacagcaccatcagccgggaggccagcacccagagcagcagcgctgctgccagccagggctgggtgctgcctgagggcaagatcgtgcccaacacagtgtttgtgggcggcattgatgccaggatggatgaaacagagatcggcagctgcttcggccgctatggctctgtgaaggaggtgaagatcatcaccaacagaactggagtgtccaagggctacggctttgtgtcctttgtgaatgatgtggatgtgcagaagatcgtgggcagccagatccacttccacggcaagaagctgaagctgggccctgccatcaggaagcagaagctgtgtgcccggcacgtgcagccccggcccctggtggtgaaccccccacctccaccccagttccagaatgtgtggaggaaccccaacacagagacctacctgcagccccagatcacccccaaccctgtgacccagcacgtgcaggcctacagcgcctacccccacagccctggccaggtgatcaccggctgccagctgctggtgtacaactaccaggagtaccccacctacccagacagcgccttccaggtgaccaccggctaccagctgcctgtgtacaactaccagcccttccctgcctaccccaggagccccttccaggtgacagctggctaccagctgcctgtgtacaactaccaggccttccctgcctaccccaacagccccttccaggtggccaccggctaccagtttcctgtgtacaactaccaggccttccctgcctaccccaacagccctgtgcaggtgaccaccggctaccagctgcctgtgtacaactaccaggccttccctgcctaccccaacagccccttccaggtggccaccggctaccagtttcctgtgtacaactaccaggccttccctgcctaccccaacagccctgtgcaggtgaccaccggctaccagctgcctgtgtacaactaccaggccttccctgcctaccccaacagcgctgtgcaggtgaccaccggctaccagttccacgtgtacaactaccagatgccaccccagtgccctgtgggggagcagaggaggaacctgtggacagaggcctacaagtggtggtacctggtgtgcctgatccagaggcgggactag

SEQ ID NO: 149743 - DNA, 948 bp, synthetic construct
  misc_feature 1..948: note = Description of Artificial Sequence: Synthetic coding sequence
  source 1..948: mol_type = other DNA
atggccgcccccagctgtggcggggacaggaaggcccggctgacccccagcctgccccatgagagcacagccaaccctgagacccccaacagcaccatcagccgggaggccagcacccagagcagcagcgctgccaccagccagggctacatcctgcctgagggcaagatcatgcccaacacagtgtttgtgggcggcattgatgtgaggatggatgaaacagagatccgctccttctttgcccgctatggctctgtgaaggaggtgaagatcatcacagacagaactggagtgtccaagggctacggctttgtgtccttcttcaatgatgtggatgtgcagaagatcgtggagagccagatcaacttccacggcaagaagctgaagctgggccctgccatcaggaagcagaacctgtgtgcctaccacgtgcagccccggcccctggtgttcaaccaccccccaccaccccagttccagaatgtgtggaccaaccccaacacagagacctacatgcagcccaccaccaccatgaaccccatcacccagtatgtgcaggcctaccccacctaccccaacagccctgtgcaggtgatcaccggctaccagctgcctgtgtacaactaccagatgccaccccagtggcctgtgggggagcagaggagctatgtggtgcccccagcctacagcgctgtgaactaccactgcaatgaggtggaccctggagctgaggtggtgcccaatgaatgttctgtgcatgaggccaccccaccttctggaaatggcccccagaagaagtctgtggacaggagcatccagacagtggtgtcctgcctcttcaacccagaaaatcggctgagaaattctgtggtgacccaggatgactacttcaaggacaagagggtgcaccacttccgccgcagccgggccatgctgaagtctgtgtag

SEQ ID NO: 149744 - DNA, 888 bp, synthetic construct
  misc_feature 1..888: note = Description of Artificial Sequence: Synthetic coding sequence
  source 1..888: mol_type = other DNA
atgagcacagccaaccctgagacccccaacagcaccatcagccgggaggccagcacccagagcagcagcgctgccaccagccagggctacatcctgcctgagggcaagatcatgcccaacacagtgtttgtgggcggcattgatgtgaggatggatgaaacagagatccgctccttctttgcccgctatggctctgtgaaggaggtgaagatcatcacagacagaactggagtgtccaagggctacggctttgtgtccttcttcaatgatgtggatgtgcagaagatcgtggagagccagatcaacttccacggcaagaagctgaagctgggccctgccatcaggaagcagaacctgtgtgcctaccacgtgcagccccggcccctggtgttcaaccaccccccaccaccccagttccagaatgtgtggaccaaccccaacacagagacctacatgcagcccaccaccaccatgaaccccatcacccagtatgtgcaggcctaccccacctaccccaacagccctgtgcaggtgatcaccggctaccagctgcctgtgtacaactaccagatgccaccccagtggcctgtgggggagcagaggagctatgtggtgcccccagcctacagcgctgtgaactaccactgcaatgaggtggaccctggagctgaggtggtgcccaatgaatgttctgtgcatgaggccaccccaccttctggaaatggcccccagaagaagtctgtggacaggagcatccagacagtggtgtcctgcctcttcaacccagaaaatcggctgagaaattctgtggtgacccaggatgactacttcaaggacaagagggtgcaccacttccgccgcagccgggccatgctgaagtctgtgtag

SEQ ID NO: 149745 - DNA, 2286 bp, synthetic construct
  misc_feature 1..2286: note = Description of Artificial Sequence: Synthetic coding sequence
  source 1..2286: mol_type = other DNA
atgaactggaggtttgtggagctgctgtacttcctgttcatctggggccgcatctctgtgcagcccagccaccaggagcccgccggcacagaccagcacgtgtccaaggagtttgactggctgatcagtgaccggggccccttccaccacagccgcagctacctgagctttgtggagcggcaccggcagggcttcaccacccgctacaagatctaccgggagtttgcccgctggaaggtgaggaacacagccattgaaagaagagacctggtgcgccaccctgtgcccctgatgcctgagttccagaggagcatccggctgctgggccggcggcccaccacccagcagttcatcgacaccatcatcaagaagtatggcacccacctgctgatcagcgccaccctgggcggggaggaggccctgaccatgtacatggacaagagccggctggacaggaagtctggaaatgccacccagagcgtggaggccctgcaccagctggccagcagctactttgtggacagagatggcaccatgaggcggctgcacgagatccagatcagcactggagccatcaaggtgacagagaccaggacaggccccctgggctgcaacagctatgacaacctggacagcgtgtcctctgtgctgctgcagagcacagagagcaagctgcacctgcagggcctgcagatcatcttcccccagtacctgcaggagaagtttgtgcagagcgccctgagctacatcatgtgcaatggagagggggagtacctgtgccagaacagccagtgccgctgccagtgtgccgaggagttcccccagtgcaactgccccatcacagacatccagatcatggagtacaccctggccaacatggccaagtcctgggccgaggcctacaaggacctggagaacagtgatgagttcaagagcttcatgaagaggctgcccagcaaccacttcctgaccatcggcagcatccaccagcactggggcaatgactgggacctgcagaaccgctacaagctgctgcagagcgccacagaggcccagaggcagaagatccagaggacagccaggaagctgtttggcctgtctgtgcgctgccgccacaaccccaaccaccagctgccccgggagaggaccatccagcagtggctggcccgggtgcagagcctgctgtactgcaatgaaaatggcttctggggcaccttcctggagagccagaggagctgtgtgtgccacggcagcaccaccctgtgccagaggcccatcccctgcgtcatcggcggcaacaacagctgtgccatgtgcagcctggccaacatcagcctgtgtggcagctgcaacaagggctacaagctgtaccggggccgctgtgagccccagaatgtggacagcgagaggtctgagcagttcatcagctttgaaacagacctggacttccaggacctggagctgaagtacctgctgcagaagatggacagccggctgtatgtgcacaccaccttcatcagcaatgagatccggctggacaccttctttgacccccgctggaggaagaggatgagcctgaccctgaagagcaacaagaacaggatggacttcatccacatggtgattggcatgtccatgaggatctgccagatgaggaacagcagcctggaccccatgttctttgtgtatgtgaaccccttcagcggcagccacagcgagggctggaacatgccctttggagaatttggctacccccgctgggagaagatccggctgcagaacagccagtgctacaactggaccctgctgctgggcaaccgctggaagaccttctttgagaccgtgcacatctacctgcggagcaggacccggctgcccaccctgctgagaaatgaaacaggccagggccctgtggacctgagtgaccccagcaagaggcagttctacatcaagatcagtgatgtgcaggtgtttggctacagcctgcgcttcaatgctgacctgctgcggtctgctgtgcagcaggtgaaccagagctacacccagggcggccagttctacagcagcagctctgtgatgctgctgctgctggacatccgggaccgcatcaaccggctggcccctcctgtggcccctgggaagccccagctggacctcttcagctgcatgctgaagcaccggctgaagctgaccaacagcgagatcatccgggtgaaccacgccctggacctgtacaacacagagatcctgaagcagagcgaccagatgacagccaagctgtgctag

SEQ ID NO: 149746 - DNA, 963 bp, synthetic construct
  misc_feature 1..963: note = Description of Artificial Sequence: Synthetic coding sequence
  source 1..963: mol_type = other DNA
atgaactggaggtttgtggagctgctgtacttcctgttcatctggggccgcatctctgtgcagcccagccaccaggagcccgccggcacagaccagcacgtgtccaaggagtttgactggctgatcagtgaccggggccccttccaccacagccgcagctacctgagctttgtggagcggcaccggcagggcttcaccacccgctacaagatctaccgggagtttgcccgctggaaggtgaggaacacagccattgaaagaagagacctggtgcgccaccctgtgcccctgatgcctgagttccagaggagcatccggctgctgggccggcggcccaccacccagcagttcatcgacaccatcatcaagaagtatggcacccacctgctgatcagcgccaccctgggcggggaggaggccctgaccatgtacatggacaagagccggctggacaggaagtctggaaatgccacccagagcgtggaggccctgcaccagctggccagcagctactttgtggacagagatggcaccatgaggcggctgcacgagatccagatcagcactggagccatcaaggtgacagagaccaggacaggccccctgggctgcaacagctatgacaacctggacagcgtgtcctctgtgctgctgcagagcacagagagcaagctgcacctgcagggcctgcagatcatcttcccccagtacctgcaggagaagtttgtgcagagcgccctgagctacatcatgtgcaatggagagggggagtacctgtgccagaacagccagtgccgctgccagtgtgccgaggagttcccccagtgcaactgccccatcacagacatccagatcatggagtacaccctggccaacatggccaagtcctgggccgaggcctacaaggacctggagaacagcggccgggagagccacagcgtgcccctgcacgagtggccctag

SEQ ID NO: 149747 - DNA, 2286 bp, synthetic construct; identical to SEQ ID NO: 149745
  misc_feature 1..2286: note = Description of Artificial Sequence: Synthetic coding sequence
  source 1..2286: mol_type = other DNA

SEQ ID NO: 149748 - DNA, 1404 bp, synthetic construct
  misc_feature 1..1404: note = Description of Artificial Sequence: Synthetic coding sequence
  source 1..1404: mol_type = other DNA
atgaagaggatcaaggtgcctgactacaaggacagatctgtgtttggagtgcccctgactgtgaatgtgcagaggacaggccagcccctgccccagagcatccagcaggccatgagatacctgaggaaccactgcctggaccaggtgggcctcttcaggaagtctggagtgaagagccgcatccaggccctgcggcagatgaatgaaggagccatcgactgtgtgaactatgagggccagagcgcctatgatgtggccgacatgctgaagcagtacttccgggacctgcctgagcccctgatgaccaacaagctgtctgagaccttcctgcagatctaccagtatgtgcccaaggaccagaggctgcaggccatcaaggccgccatcatgctgctgcctgatgaaaatcgggaggtgctgcagaccctgctgtacttcctgagtgatgtgacagctgctgtgaaggagaaccagatgacccccaccaacctggccgtgtgcctggcccccagcctcttccacctgaacaccctgaagcgggagaacagcagcccccgggtgatgcagaggaagcagagcctgggcaagccagaccagaaggacctgaatgaaaacctggccgccacccagggcctggcccacatgattgctgagtgcaagaagctgttccaggtgcctgaggagatgagccgctgcagaaattcctacacagagcaggagctgaagcccctgaccctggaggccctgggccacctgggcaatgatgattctgctgactaccagcacttcctgcaggactgtgtggatggcctcttcaaggaggtgaaggagaagttcaagggctgggtgtcctacagcaccagcgagcaggccgagctgagctacaagaaggtgtctgagggcccccccctgcggctgtggaggtctgtgattgaggtgcctgctgtgcctgaggagatcctgaagaggctgctgaaggagcagcacctgtgggatgtggacctgctggacagcaaggtgattgagatcctggacagccagacagagatctaccagtatgtgcagaacagcatggccccccacccagcccgggactatgtggtgctgcggacctggaggaccaacctgcccaagggggcctgtgccctgctgctgacctctgtggaccatgaccgggcccctgtggtgggcgtgcgggtgaatgtgctgctgagccgctacctgattgagccctgtggccctgggaagagcaagctgacctacatgtgccgggtggacctgcggggccacatgcctgagtggtacaccaagagctttggccacctgtgtgccgctgaggtggtgaagatccgggacagcttcagcaaccagaacacagagaccaaggacaccaagagcaggtag

SEQ ID NO: 149749 - DNA, 3378 bp, synthetic construct
  misc_feature 1..3378: note = Description of Artificial Sequence: Synthetic coding sequence
  source 1..3378: mol_type = other DNA
atgggagaccccaaggcccacgtgatggcccggcccctgcgggcccccctgcggcgctccttcagtgaccacatccgggacagcacagcccgggccctggatgtgatctggaagaacacccgggaccggcggctggccgagattgaggccaaggaggcctgtgactggctgcgggccaccggcttcccccagtatgcccagctgtatgaggacttcctgttccccatcgacatcagcctggtgaagcgggagcatgacttcctggacagagatgccatcgaggccctgtgccggcggctgaacaccctgaacaagtgtgctgtgatgaagctggagatcagcccccacaggaagagaagtgatgacagtgatgaagatgagccctgtgccatcagcggcaagtggaccttccagagggacagcaagcgctggagccggctggaggagtttgatgtgttcagccccaagcaggacctggtgcccggcagcccagatgacagccaccccaaggatggccccagccctgggggcaccctgatggacctgtctgagcggcaggaggtgtcctctgtgcgcagcctgagcagcacaggcagcctgcccagccacgcccctccttctgaagatgctgccacccccaggaccaacagcgtcatctctgtgtgcagcagcagcaacctggccggaaatgatgacagctttggcagcctgcccagccccaaggagctgagcagcttctccttctccatgaagggccacgagaagacagccaagagcaagaccaggagcctgctgaagaggatggagagcctgaagctgaagagcagccaccacagcaagcacaaggcccccagcaagctgggcctcatcatcagcggccccatcctgcaggagggcatggatgaggagaagctgaagcagctgaactgtgtggagatcagcgccctgaatggaaaccgcatcaacgtgcccatggtgaggaagaggtctgtgagcaacagcacccagaccagcagcagcagcagccagagcgagaccagcagcgctgtgtccacccccagccctgtgaccaggaccaggagcctgagcgcctgcaacaagagggtgggcatgtacctggagggctttgaccccttcaaccagagcaccttcaacaacgtggtggagcagaacttcaagaaccgggagagctacccagaggacaccgtcttctacatccctgaggaccacaagccaggcaccttccccaaggccctgaccaacggcagcttcagccccagcggcaacaacggctctgtgaactggaggacaggcagcttccacggccctggccacatcagcctgcggcgggagaacagcagtgacagccccaaggagctgaagagaagaaacagcagcagctccatgagcagccggctgagcatctatgacaacgtgcccggcagcatcctgtacagcagcagcggggacctggccgacctggagaatgaagacatcttccctgagctggatgacatcctgtaccacgtgaagggcatgcagagaattgtgaaccagtggagcgagaagttcagtgatgaaggagacagcgacagcgccctggacagcgtgagcccctgccccagcagccccaagcagatccacctggatgtggacaatgacaggaccacccccagcgacctggacagcacaggcaacagcctgaatgaacctgaggagcccagcgagatccctgagcggcgggacagcggcgtgggcgccagcctgaccaggagcaacagacaccggctgcgctggcacagcttccagagcagccaccggcccagcctgaacagcgtgtccctgcagatcaactgccagagcgtggcccagatgaacctgctgcagaagtacagcctgctgaagctgacagccctgctggagaagtacacccccagcaacaagcacggcttctcctgggccgtgcccaagttcatgaagaggatcaaggtgcctgactacaaggacagatctgtgtttggagtgcccctgactgtgaatgtgcagaggacaggccagcccctgccccagagcatccagcaggccatgagatacctgaggaaccactgcctggaccaggtgggcctcttcaggaagtctggagtgaagagccgcatccaggccctgcggcagatgaatgaaggagccatcgactgtgtgaactatgagggccagagcgcctatgatgtggccgacatgctgaagcagtacttccgggacctgcctgagcccctgatgaccaacaagctgtctgagaccttcctgcagatctaccagtatgtgcccaaggaccagaggctgcaggccatcaaggccgccatcatgctgctgcctgatgaaaatcgggaggtgctgcagaccctgctgtacttcctgagtgatgtgacagctgctgtgaaggagaaccagatgacccccaccaacctggccgtgtgcctggcccccagcctcttccacctgaacaccctgaagcgggagaacagcagcccccgggtgatgcagaggaagcagagcctgggcaagccagaccagaaggacctgaatgaaaacctggccgccacccagggcctggcccacatgattgctgagtgcaagaagctgttccaggtgcctgaggagatgagccgctgcagaaattcctacacagagcaggagctgaagcccctgaccctggaggccctgggccacctgggcaatgatgattctgctgactaccagcacttcctgcaggactgtgtggatggcctcttcaaggaggtgaaggagaagttcaagggctgggtgtcctacagcaccagcgagcaggccgagctgagctacaagaaggtgtctgagggcccccccctgcggctgtggaggtctgtgattgaggtgcctgctgtgcctgaggagatcctgaagaggctgctgaaggagcagcacctgtgggatgtggacctgctggacagcaaggtgattgagatcctggacagccagacagagatctaccagtatgtgcagaacagcatggccccccacccagcccgggactatgtggtgctgcggacctggaggaccaacctgcccaagggggcctgtgccctgctgctgacctctgtggaccatgaccgggcccctgtggtgggcgtgcgggtgaatgtgctgctgagccgctacctgattgagccctgtggccctgggaagagcaagctgacctacatgtgccgggtggacctgcggggccacatgcctgagtggtacaccaagagctttggccacctgtgtgccgctgaggtggtgaagatccgggacagcttcagcaaccagaacacagagaccaaggacaccaagagcaggtag

SEQ ID NO: 149750 - DNA, 3054 bp, synthetic construct
  misc_feature 1..3054: note = Description of Artificial Sequence: Synthetic coding sequence
  source 1..3054: mol_type = other DNA
atgaagctggagatcagcccccacaggaagagaagtgatgacagtgatgaagatgagccctgtgccatcagcggcaagtggaccttccagagggacagcaagcgctggagccggctggaggagtttgatgtgttcagccccaagcaggacctggtgcccggcagcccagatgacagccaccccaaggatggccccagccctgggggcaccctgatggacctgtctgagcggcaggaggtgtcctctgtgcgcagcctgagcagcacaggcagcctgcccagccacgcccctccttctgaagatgctgccacccccaggaccaacagcgtcatctctgtgtgcagcagcagcaacctggccggaaatgatgacagctttggcagcctgcccagccccaaggagctgagcagcttctccttctccatgaagggccacgagaagacagccaagagcaagaccaggagcctgctgaagaggatggagagcctgaagctgaagagcagccaccacagcaagcacaaggcccccagcaagctgggcctcatcatcagcggccccatcctgcaggagggcatggatgaggagaagctgaagcagctgaactgtgtggagatcagcgccctgaatggaaaccgcatcaacgtgcccatggtgaggaagaggtctgtgagcaacagcacccagaccagcagcagcagcagccagagcgagaccagcagcgctgtgtccacccccagccctgtgaccaggaccaggagcctgagcgcctgcaacaagagggtgggcatgtacctggagggctttgaccccttcaaccagagcaccttcaacaacgtggtggagcagaacttcaagaaccgggagagctacccagaggacaccgtcttctacatccctgaggaccacaagccaggcaccttccccaaggccctgaccaacggcagcttcagccccagcggcaacaacggctctgtgaactggaggacaggcagcttccacggccctggccacatcagcctgcggcgggagaacagcagtgacagccccaaggagctgaagagaagaaacagcagcagctccatgagcagccggctgagcatctatgacaacgtgcccggcagcatcctgtacagcagcagcggggacctggccgacctggagaatgaagacatcttccctgagctggatgacatcctgtaccacgtgaagggcatgcagagaattgtgaaccagtggagcgagaagttcagtgatgaaggagacagcgacagcgccctggacagcgtgagcccctgccccagcagccccaagcagatccacctggatgtggacaatgacaggaccacccccagcgacctggacagcacaggcaacagcctgaatgaacctgaggagcccagcgagatccctgagcggcgggacagcggcgtgggcgccagcctgaccaggagcaacagacaccggctgcgctggcacagcttccagagcagccaccggcccagcctgaacagcgtgtccctgcagatcaactgccagagcgtggcccagatgaacctgctgcagaagtacagcctgctgaagctgacagccctgctggagaagtacacccccagcaacaagcacggcttctcctgggccgtgcccaagttcatgaagaggatcaaggtgcctgactacaaggacagatctgtgtttggagtgcccctgactgtgaatgtgcagaggacaggccagcccctgccccagagcatccagcaggccatgagatacctgaggaaccactgcctggaccaggtgggcctcttcaggaagtctggagtgaagagccgcatccaggccctgcggcagatgaatgaaggagccatcgactgtgtgaactatgagggccagagcgcctatgatgtggccgacatgctgaagcagtacttccgggacctgcctgagcccctgatgaccaacaagctgtctgagaccttcctgcagatctaccagtatgtgcccaaggaccagaggctgcaggccatcaaggccgccatcatgctgctgcctgatgaaaatcgggaggtgctgcagaccctgctgtacttcctgagtgatgtgacagctgctgtgaaggagaaccagatgacccccaccaacctggccgtgtgcctggcccccagcctcttccacctgaacaccctgaagcgggagaacagcagcccccgggtgatgcagaggaagcagagcctgggcaagccagaccagaaggacctgaatgaaaacctggccgccacccagggcctggcccacatgattgctgagtgcaagaagctgttccaggtgcctgaggagatgagccgctgcagaaattcctacacagagcaggagctgaagcccctgaccctggaggccctgggccacctgggcaatgatgattctgctgactaccagcacttcctgcaggactgtgtggatggcctcttcaaggaggtgaaggagaagttcaagggctgggtgtcctacagcaccagcgagcaggccgagctgagctacaagaaggtgtctgagggcccccccctgcggctgtggaggtctgtgattgaggtgcctgctgtgcctgaggagatcctgaagaggctgctgaaggagcagcacctgtgggatgtggacctgctggacagcaaggtgattgagatcctggacagccagacagagatctaccagtatgtgcagaacagcatggccccccacccagcccgggactatgtggtgctgcggacctggaggaccaacctgcccaagggggcctgtgccctgctgctgacctctgtggaccatgaccgggcccctgtggtgggcgtgcgggtgaatgtgctgctgagccgctacctgattgagccctgtggccctgggaagagcaagctgacctacatgtgccgggtggacctgcggggccacatgcctgagtggtacaccaagagctttggccacctgtgtgccgctgaggtggtgaagatccgggacagcttcagcaaccagaacacagagaccaaggacaccaagagcaggtag

SEQ ID NO: 149751 - DNA, 972 bp, synthetic construct
  misc_feature 1..972: note = Description of Artificial Sequence: Synthetic coding sequence
  source 1..972: mol_type = other DNA
atgggcaacagcgccagcagaagtgactttgagtgggtgtacacagaccagccccacacccagaggaggaaggagatcctggccaagtacccagccatcaaggccctgatgaggccagacccccggctgaagtgggccgtgctggtgctggtgctggtgcagatgctggcctgctggctggtgcggggcctggcctggcgctggctgctcttctgggcctatgccttcggcggctgtgtgaaccacagcctgaccctggccatccatgacatcagccacaatgctgcctttggaacaggccgggccgccaggaaccgctggctggccgtgtttgccaacctgcctgtgggcgtgccctatgctgccagcttcaagaagtaccacgtggaccaccaccgctacctgggcggagatggcctggatgtggatgtgcccacccggctggagggctggttcttctgcaccccagccaggaagctgctgtggctggtgctgcagcccttcttctacagcctgcggcccctgtgtgtgcaccccaaggctgtgaccaggatggaggtgctgaacaccctggtgcagctggccgctgacctggccatctttgccctgtggggcctgaagcctgtggtgtacctgctggccagcagcttcctgggcctgggcctgcaccccatcagcggccactttgtggccgagcactacatgttcctgaagggccacgagacctacagctactacggccccctgaactggatcaccttcaacgtgggctaccacgtggagcaccacgacttccccagcatccctggctacaacctgcccctggtgaggaagatcgcccctgagtactatgaccacctgccccagcaccacagctgggtgaaggtgctgtgggactttgtgtttgaggacagcctgggcccctatgcccgggtgaagagggtgtaccgcctggccaaggatggcctgtag

SEQ ID NO: 149752 - DNA, 2214 bp, synthetic construct
  misc_feature 1..2214: note = Description of Artificial Sequence: Synthetic coding sequence
  source 1..2214: mol_type = other DNA
atgcagccccggcgggcccaggcccctggggcccagctgctgcctgccctggccctgctgctgctgctgctgggcgccggcccccggggcagcagcctggccaaccctgtgcctgctgcccccctgagcgcccctggcccctgtgccgcccagccctgcagaaatggaggagtgtgcaccagcaggcctgagccagacccccagcacccagccccagctggggagcccggctacagctgcacctgcccagctggcatcagcggggccaactgccagctggtggccgacccctgtgccagcaacccctgccaccacggcaactgcagcagcagcagcagcagcagcagtgatggctacctgtgcatctgcaatgaaggctatgagggccccaactgtgagcaggccctgcccagcctgcctgccaccggctggacagagagcatggccccccggcagctgcagcctgtgcctgccacccaggagccagacaagatcctgcccaggagccaggccaccgtgaccctgcccacctggcagcccaagacaggccagaaggtggtggagatgaagtgggaccaggtggaggtgatcccagacatcgcctgtggaaatgccagcagcaacagcagcgctgggggccgcctggtgtcctttgaggtgccccagaacacctctgtgaagatccggcaggatgccacagccagcctcatcctgctgtggaaggtgacagccaccggcttccagcagtgcagcctgattgatggccgctctgtgacccccctgcaggccagcggcggcctggtgctgctggaggagatgctggccctgggcaacaaccacttcatcggctttgtgaatgacagcgtgaccaagagcatcgtggccctgcggctgaccctggtggtgaaggtgtccacctgtgtgcctggagagagccacgccaatgacctggagtgcagcggcaagggcaagtgcaccaccaagcccagcgaggccaccttcagctgcacctgtgaggagcagtatgtgggcaccttctgtgaggagtatgatgcctgccagaggaagccctgccagaacaatgccagctgcattgatgccaatgagaagcaggacggcagcaacttcacctgtgtgtgcctgcccggctacacaggagagctgtgccagagcaagattgactactgcatcctggacccctgcagaaatggagccacctgcatcagcagcctgagcggcttcacctgccagtgcccagagggctactttggaagtgcctgtgaggagaaggtggacccctgtgccagcagcccctgccagaacaacggcacctgctacgtggatggagtgcacttcacctgcaactgcagccctggcttcaccggccccacctgtgcccagctgattgacttctgtgccctgagcccctgtgcccacggcacctgccgctctgtgggcaccagctacaagtgcctgtgtgaccccggctaccacggcctgtactgtgaggaggagtacaatgaatgtctgagcgccccctgcctgaatgctgccacctgccgggacctggtgaatggctatgaatgtgtgtgcctggccgagtacaagggcacccactgtgagctgtacaaggacccctgtgccaacgtgtcctgcctgaatggagccacctgtgacagtgatggcctgaatggcacctgcatctgtgcccctggcttcaccggggaggagtgtgacatcgacatcaatgaatgtgacagcaacccctgccaccacggcggcagctgcctggaccagcccaacggctacaactgccactgcccccacggctgggtgggcgccaactgtgagatccacctgcagtggaagagcggccacatggccgagagcctgaccaacatgcccaggcacagcctgtacatcatcattggagccctgtgtgtggccttcatcctgatgctgatcatcctgattgtgggcatctgccgcatcagcagaattgagtaccagggcagcagcaggcctgcctatgaggagttctacaactgccgcagcattgacagcgagttcagcaatgccatcgccagcatcagacatgccaggtttgggaagaagagcaggcctgccatgtatgatgtgagccccatcgcctatgaggactacagcccagatgacaagcccctggtgaccctcatcaagaccaaggacctgtag

SEQ ID NO: 149753 - DNA, 1368 bp, synthetic construct
  misc_feature 1..1368: note = Description of Artificial Sequence: Synthetic coding sequence
  source 1..1368: mol_type = other DNA
atgctggccctgggcaacaaccacttcatcggctttgtgaatgacagcgtgaccaagagcatcgtggccctgcggctgaccctggtggtgaaggtgtccacctgtgtgcctggagagagccacgccaatgacctggagtgcagcggcaagggcaagtgcaccaccaagcccagcgaggccaccttcagctgcacctgtgaggagcagtatgtgggcaccttctgtgaggagtatgatgcctgccagaggaagccctgccagaacaatgccagctgcattgatgccaatgagaagcaggacggcagcaacttcacctgtgtgtgcctgcccggctacacaggagagctgtgccagagcaagattgactactgcatcctggacccctgcagaaatggagccacctgcatcagcagcctgagcggcttcacctgccagtgcccagagggctactttggaagtgcctgtgaggagaaggtggacccctgtgccagcagcccctgccagaacaacggcacctgctgcagccctggcttcaccggccccacctgtgcccagctgattgacttctgtgccctgagcccctgtgcccacggcacctgccgctctgtgggcaccagctacaagtgcctgtgtgaccccggctaccacggcctgtactgtgaggaggagtacaatgaatgtctgagcgccccctgcctgaatgctgccacctgccgggacctggtgaatggctatgaatgtgtgtgcctggccgagtacaagggcacccactgtgagctgtacaaggacccctgtgccaacgtgtcctgcctgaatggagccacctgtgacagtgatggcctgaatggcacctgcatctgtgcccctggcttcaccggggaggagtgtgacatcgacatcaatgaatgtgacagcaacccctgccaccacggcggcagctgcctggaccagcccaacggctacaactgccactgcccccacggctgggtgggcgccaactgtgagatccacctgcagtggaagagcggccacatggccgagagcctgaccaacatgcccaggcacagcctgtacatcatcattggagccctgtgtgtggccttcatcctgatgctgatcatcctgattgtgggcatctgccgcatcagcagaattgagtaccagggcagcagcaggcctgcctatgaggagttctacaactgccgcagcattgacagcgagttcagcaatgccatcgccagcatcagacatgccaggtttgggaagaagagcaggcctgccatgtatgatgtgagccccatcgcctatgaggactacagcccagatgacaagcccctggtgaccctcatcaagaccaaggacctgtag

SEQ ID NO: 149754 - DNA, 933 bp, synthetic construct
  misc_feature 1..933: note = Description of Artificial Sequence: Synthetic coding sequence
  source 1..933: mol_type = other DNA
atgacagccacagaggccctgctgcgggtgctgctgctgctgctggccttcggccacagcacctacggggctgagtgcttccctgcctgcaacccccagaatggcttctgtgaagatgacaacgtgtgccgctgccagcccggctggcagggccccctgtgtgaccagtgtgtgaccagccctggctgcctgcacggcctgtgtggggagcccggccagtgcatctgcacagatggctgggatggagagctgtgtgacagagatgtgcgggcctgcagcagcgccccctgtgccaacaacagaacctgtgtgtccctggatgatggcctgtatgagtgcagctgtgcccctggctacagcggcaaggactgccagaagaaggatggcccctgtgtgatcaatggcagcccctgccagcacggcggcacctgtgtggatgatgagggccgggccagccacgccagctgcctgtgccccccaggcttcagcggcaacttctgtgaaattgtggccaacagctgcacccccaacccctgtgaaaatgatggagtgtgcacagacatcggcggggacttccgctgccgctgcccagctggcttcatcgacaagacctgcagcaggcctgtgaccaactgtgccagcagcccctgccagaatggaggcacctgcctgcagcacacccagggccaggccatctgcttcaccatcctgggcgtgctgaccagcctggtggtgctgggcaccgtgggcatcgtgttcctgaacaagtgtgagacctgggtgagcaacctgcgctacaaccacatgctgaggaagaagaagaacctgctgctgcagtacaacagcggggaggacctggccgtgaacatcatcttccctgagaagattgacatgaccaccttcagcaaggaggccggagatgaggagatctag

SEQ ID NO: 149755 - DNA, 1152 bp, synthetic construct
  misc_feature 1..1152: note = Description of Artificial Sequence: Synthetic coding sequence
  source 1..1152: mol_type = other DNA
atgacagccacagaggccctgctgcgggtgctgctgctgctgctggccttcggccacagcacctacggggctgagtgcttccctgcctgcaacccccagaatggcttctgtgaagatgacaacgtgtgccgctgccagcccggctggcagggccccctgtgtgaccagtgtgtgaccagccctggctgcctgcacggcctgtgtggggagcccggccagtgcatctgcacagatggctgggatggagagctgtgtgacagagatgtgcgggcctgcagcagcgccccctgtgccaacaacagaacctgtgtgtccctggatgatggcctgtatgagtgcagctgtgcccctggctacagcggcaaggactgccagaagaaggatggcccctgtgtgatcaatggcagcccctgccagcacggcggcacctgtgtggatgatgagggccgggccagccacgccagctgcctgtgccccccaggcttcagcggcaacttctgtgaaattgtggccaacagctgcacccccaacccctgtgaaaatgatggagtgtgcacagacatcggcggggacttccgctgccgctgcccagctggcttcatcgacaagacctgcagcaggcctgtgaccaactgtgccagcagcccctgccagaatggaggcacctgcctgcagcacacccaggtgtcctatgagtgcctgtgcaagccagagttcaccggcctgacctgtgtgaagaagagggccctgagcccccagcaggtgacccggctgcccagcggctacggcctggcctaccgcctgaccccaggagtgcatgagctgcctgtgcagcagcctgagcaccgcatcctgaaggtgtccatgaaggagctgaacaagaagacccccctgctgacagagggccaggccatctgcttcaccatcctgggcgtgctgaccagcctggtggtgctgggcaccgtgggcatcgtgttcctgaacaagtgtgagacctgggtgagcaacctgcgctacaaccacatgctgaggaagaagaagaacctgctgctgcagtacaacagcggggaggacctggccgtgaacatcatcttccctgagaagattgacatgaccaccttcagcaaggaggccggagatgaggagatctag

SEQ ID NO: 149756 - DNA, 294 bp, synthetic construct
  misc_feature 1..294: note = Description of Artificial Sequence: Synthetic coding sequence
  source 1..294: mol_type = other DNA
atgacagccacagaggccctgctgcgggtgctgctgctgctgctggccttcggccacagcacctacggggctgagtgcttccctgcctgcaacccccagaatggcttctgtgaagatgacaacgtgtgccgctgccagcccggctggcagggccccctgtgtgaccagtgtgtgaccagccctggctgcctgcacggcctgtgtggggagcccggccagtgcatctgcacagatggctgggatggagagctgtgtgacagagatgtgcgggcctgcagcagcgccccctgctag

SEQ ID NO: 149757 - DNA, 3612 bp, synthetic construct
  misc_feature 1..3612: note = Description of Artificial Sequence: Synthetic coding sequence
  source 1..3612: mol_type = other DNA
atggccgcctgtggccgggtgcggaggatgttccggctgtctgctgccctgcacctgctgctgctgtttgctgctggagctgagaagctgcccggccagggcgtgcacagccagggccagggccctggggccaactttgtgtcctttgtgggccaggccggcggcggcggccctgctggccagcagctgccccagctgccccagagcagccagctgcagcagcagcagcagcagcagcagcagcagcagcagccccagcccccccagccccccttccctgctgggggccccccagcccggcggggcggggccggggccggcggcggctggaagctggccgaggaggagagctgccgggaggatgtgaccagggtgtgccccaagcacacctggagcaacaacctggccgtgctggagtgcctgcaggatgtgcgggagccagaaaatgagatcagcagtgactgcaaccacctgctgtggaactacaagctgaacctgaccacagaccccaagtttgagagcgtggcccgggaggtgtgcaagagcaccatcacagagatcaaggaatgtgctgatgagcctgtgggcaagggctacatggtgtcctgcctggtggaccaccggggcaacatcacagagtaccagtgccaccagtacatcaccaagatgacagccatcatcttcagtgactaccgcctcatctgtggcttcatggatgactgcaagaatgacatcaacatcctgaagtgtggcagcatccggctgggggagaaggatgcccacagccagggcgaggtggtgtcctgcctggagaagggcctggtgaaggaggccgaggagcgggagcccaagatccaggtgtctgagctgtgcaagaaggccatcctgcgggtggccgagctgagcagtgatgacttccacctggacagacacctgtactttgcctgcagagatgaccgggagcgcttctgtgagaacacccaggccggggagggccgggtgtacaagtgcctcttcaaccacaagtttgaggagagcatgtctgagaagtgccgggaggccctgaccacccggcagaagctgattgcccaggactacaaggtgtcctacagcctggccaagagctgcaagagtgacctgaagaagtaccgctgcaatgtggagaacctgcccaggagccgggaggcccggctgagctacctgctgatgtgcctggagagcgctgtgcaccggggccggcaggtgtcctctgagtgccagggcgagatgctggactacagaaggatgctgatggaggacttcagcctgagccctgagatcatcctgagctgccgcggggagattgagcaccactgcagcggcctgcacaggaagggccgcaccctgcactgcctgatgaaggtggtgcggggggagaagggcaacctgggcatgaactgccagcaggccctgcagaccctcatccaggagacagatcctggagctgactacagaattgaccgggccctgaatgaggcctgtgagagcgtcatccagacagcctgcaagcacatccgcagcggggaccccatgatcctgagctgcctgatggagcacctgtacacagagaagatggtggaggactgtgagcaccggctgctggagctgcagtacttcatcagccgggactggaagctggaccctgtgctgtacaggaagtgccagggagatgccagccggctgtgccacacccacggctggaatgagaccagcgagttcatgccccagggcgctgtgttcagctgcctgtacagacatgcctacagaacagaggagcagggccggcggctgagcagagaatgtagagctgaggtgcagaggatcctgcaccagagggccatggatgtgaagctggaccctgccctgcaggacaagtgcctgattgacctgggcaagtggtgcagcgagaagacagaaacaggccaggagctggagtgcctgcaggaccacctggatgacctggtggtggagtgccgggacatcgtgggcaacctgacagagctggagagcgaggacatccagatcgaggccctgctgatgagggcctgtgagcccatcatccagaacttctgccatgatgtggccgacaaccagattgacagcggggacctgatggagtgcctgatccagaacaagcaccagaaggacatgaatgaaaaatgtgccatcggcgtgacccacttccagctggtgcagatgaaggacttccgcttctcctacaagttcaagatggcctgcaaggaggatgtgctgaagctgtgccccaacatcaagaagaaggtggatgtggtgatctgcctgagcaccaccgtgagaaatgacaccctgcaggaggccaaggagcaccgggtgtccctgaagtgccggcggcagctgcgggtggaggagctggagatgacagaggacatccggctggagccagacctgtatgaggcctgcaagagtgacatcaagaacttctgcagcgctgtgcagtatggaaatgcccagatcatcgagtgcctgaaggagaacaagaagcagctgagcacccgctgccaccagaaggtgttcaagctgcaggagacagagatgatggaccctgagctggactacaccctgatgagggtgtgcaagcagatgatcaagcgcttctgcccagaggccgacagcaagaccatgctgcagtgcctgaagcagaacaagaacagcgagctgatggaccccaagtgcaagcagatgatcaccaagaggcagatcacccagaacacagactaccgcctgaaccccatgctgaggaaggcctgcaaggctgacatccccaagttctgccacggcatcctgaccaaggccaaggatgattctgagctggagggccaggtgatcagctgcctgaagctgcgctatgctgaccagaggctgagcagtgactgtgaggaccagatccgcatcatcatccaggagagcgccctggactaccgcctggacccccagctgcagctgcactgcagtgatgagatcagcagcctgtgtgccgaggaggccgccgcccaggagcagacaggccaggtggaggagtgcctgaaggtgaacctgctgaagatcaagacagagctgtgcaagaaggaggtgctgaacatgctgaaggagagcaaggctgacatctttgtggaccctgtgctgcacacagcctgtgccctggacatcaagcaccactgtgccgccatcaccccaggccggggccggcagatgagctgcctgatggaggccctggaggacaagagggtgcggctgcagcctgagtgcaagaagaggctgaatgaccgcatcgagatgtggagctatgctgccaaggtggccccagcagatggcttcagtgacctggccatgcaggtgatgaccagccccagcaagaactacatcctgagcgtcatcagcggcagcatctgcatcctcttcctgattggcctgatgtgtggccgcatcaccaagagggtgacccgggagctgaaggaccggctgcagtacagaagtgagaccatggcctacaagggcctggtgtggagccaggatgtgacaggcagccctgcctag

SEQ ID NO: 149758 - DNA, 1764 bp, synthetic construct
  misc_feature 1..1764: note = Description of Artificial Sequence: Synthetic coding sequence
  source 1..1764: mol_type = other DNA
atggtgagccccaggatgagcggcctgctgagccagaccgtcatcctggccctgatcttcctgccccagaccaggcctgctggggtgtttgagctgcagatccacagctttggacctggccctggccctggggcccccaggagcccctgcagcgcccggctgccctgccgcctcttcttccgggtgtgcctgaagccaggcctgtctgaggaggccgctgagagcccctgtgccctgggcgccgccctgagcgcccggggccctgtgtacacagagcagcccggggccccagccccagacctgcccctgcctgatggcctgctgcaggtgcccttcagagatgcctggccaggcaccttctccttcatcatcgagacctggagggaggagctgggggaccagattggaggccctgcctggagcctgctggcccgggtggccggcagaagaaggctggccgccggcggcccctgggcccgggacatccagagagctggggcctgggagctgcgcttctcctaccgggcccgctgtgagcccccagctgtgggcacagcctgcacccggctgtgccggcccaggtctgcccccagccgctgtggccctggcctgcggccctgtgcccccctggaggatgaatgtgaggcccccctggtgtgccgggccggctgcagccctgagcacggcttctgtgagcagcccggggagtgccgctgcctggagggctggacaggccccctgtgcaccgtgcctgtgtccaccagcagctgcctgagcccccggggccccagcagcgccaccaccggctgcctggtgcccggccctggcccctgtgatggcaacccctgtgccaatggaggcagctgcagcgagacccccaggagctttgaatgtacctgcccccggggcttctacggcctgcgctgtgaggtgtctggagtgacctgtgctgatggcccctgcttcaatggaggcctgtgtgtgggcggcgctgaccctgattctgcctacatctgccactgccccccaggcttccagggcagcaactgtgagaagagggtggaccgctgcagcctgcagccctgcagaaatggaggcctgtgcctggacctgggccacgccctgcgctgccgctgcagagctggctttgctggcccccgctgtgaacatgacctggatgactgtgccggccgggcctgtgccaacggcggcacctgtgtggagggcggcggggcccaccgctgcagctgtgccctgggctttggaggccgggactgccgggagagagctgacccctgtgccgcccggccctgtgcccacggcggccgctgctacgcccacttcagcggcctggtgtgtgcctgtgcccctggctacatgggcgcccgctgtgagttccctgtgcacccagatggagccagcgccctgcctgctgcccctcctggcctgcggcctggggacccccagcgctacctgctgcccccagccctgggcctgctggtggccgccggcgtggccggggccgccctgctgctggtgcacgtgagaagaagaggccacagccaggatgctggcagccggctgctggccggcaccccagagcccagcgtgcacgccctgcctgatgccctgaacaacctgcggacccaggagggcagcggagatggccccagcagctctgtggactggaacagaccagaagatgtggacccccagggcatctacgtgatcagcgcccccagcatctatgcccgggaggcctag

SEQ ID NO: 149759 - DNA, 2058 bp, synthetic construct
  misc_feature 1..2058: note = Description of Artificial Sequence: Synthetic coding sequence
  source 1..2058: mol_type = other DNA
atggctgctgccagccgcagcgccagcggctgggccctgctgctgctggtggccctgtggcagcagagagctgctggcagcggggtcttccagctgcagctgcaggagttcatcaatgaaagaggagtgctggccagcggccggccctgtgagcccggctgcaggaccttcttccgggtgtgcctgaagcacttccaggccgtggtgtccccaggcccctgcaccttcggcaccgtgtccacccctgtgctgggcaccaacagctttgctgtgagagatgacagcagcggcggcggcaggaaccccctgcagctgcccttcaacttcacctggccaggcaccttcagcctcatcatcgaggcctggcacgcccctggagatgacctgcggcctgaggccctgcccccagatgccctgatcagcaagatcgccatccagggcagcctggccgtgggccagaactggctgctggatgagcagaccagcaccctgacccggctgcgctacagctacagagtcatctgcagcgacaactactacggggacaactgcagccggctgtgcaagaagagaaatgaccacttcggccactacgtgtgccagccagatggcaacctgagctgcctgcccggctggacaggagagtactgccagcagcccatctgcctgagcggctgccacgagcagaatggctactgcagcaagccagctgagtgcctgtgcaggcctggctggcagggccgcctgtgcaatgaatgcatcccccacaacggctgcagacatggcacctgcagcaccccctggcagtgcacctgtgatgagggctggggcggcctcttctgtgaccaggacctgaactactgcacccaccacagcccctgcaagaatggagccacctgcagcaacagcggccagaggagctacacctgcacctgccggcccggctacacaggagtggactgtgagctggagctgtctgaatgtgacagcaacccctgcagaaatggaggcagctgcaaggaccaggaggatggctaccactgcctgtgccccccaggctactacggcctgcactgtgagcacagcaccctgagctgtgccgacagcccctgcttcaatggaggcagctgccgggagaggaaccagggcgccaactatgcctgtgaatgtcctcccaacttcaccggcagcaactgtgagaagaaggtggaccgctgcaccagcaacccctgtgccaatggaggccagtgcctgaacagaggccccagcaggatgtgccgctgccggcccggcttcaccggcacctactgtgagctgcacgtgtctgactgtgccaggaacccctgtgcccatggaggcacctgccacgacctggagaatggcctgatgtgcacctgcccagctggcttctctggaagaagatgtgaggtgaggaccagcattgatgcctgtgccagcagcccctgcttcaacagagccacctgctacacagacctgagcacagacacctttgtgtgcaactgcccctacggctttgtgggcagccgctgtgagttccctgtgggcctgccccccagcttcccctgggtggccgtgtccctgggcgtgggcctggccgtgctgctggtgctgctgggcatggtggccgtggccgtgcggcagctgcggctgcggcggccagatgatggcagccgggaggccatgaacaacctgagtgacttccagaaggacaacctgatcccagctgcccagctgaagaacaccaaccagaagaaggagctggaggtggactgtggcctggacaagagcaactgtgggaagcagcagaaccacaccctggactacaacctggcccctggccccctgggccggggcaccatgcctgggaagttcccccacagcgacaagagcctgggggagaaggcccccctgcggctgcacagcgagaagccagagtgccgcatcagcgccatctgcagcccccgggacagcatgtaccagagcgtgtgcctgatcagcgaggagagaaatgaatgtgtgattgccacagaggtgtag

SEQ ID NO: 149760 - DNA, 2223 bp, synthetic construct
  misc_feature 1..2223: note = Description of Artificial Sequence: Synthetic coding sequence
  source 1..2223: mol_type = other DNA
atggccagccacctgcggccccccagccccctgctggtgcgggtgtacaagagcggcccccgggtgcggaggaagctggagagctacttccagagcagcaagagcagcggcggcggggagtgcaccgtgtccacccaggagcacgaggcccctggcaccttccgggtggagttcagcgagcgggccgccaaggagcgggtgctgaagaagggggagcaccagatcctggtggatgagaagcctgtgcccatcttcctggtgcccacagagaacagcatcaagaagaacacccggccccagatcagcagcctgacccagagccaggccgagaccccatctggggacatgcaccagcacgagggccacatccccaatgctgtggacagctgcctgcagaagatcttcctgactgtgacagctgacctgaactgcaacctcttcagcaaggagcagagggcctacatcaccaccctgtgccccagcatcaggaagatggagggccatgatggcatcgagaaggtgtgtggggacttccaggacatcgagcgcatccaccagttcctgtctgagcagttcctggagagcgagcagaagcagcagttcagccccagcatgacagagaggaagcccctgagccagcaggagcgggacagctgcatcagccccagcgagcctgagaccaaggccgagcagaagagcaactactttgaggtgcccctgccctactttgagtacttcaagtacatctgcccagacaagatcaacagcattgagaagagatttggagtgaacatcgagatccaggagagcagccccaacatggtgtgcctggacttcaccagcagccgcagcggggacctggaggccgcccgggagagctttgccagcgagttccagaagaacacagagcccctgaagcaggagtgtgtgtccctggccgacagcaagcaggccaacaagttcaagcaggagctgaaccaccagttcaccaagctgctgatcaaggagaagggcggggagctgaccctgctgggcacccaggatgacatctctgctgccaagcagaagatcagcgaggcctttgtgaagatccctgtgaagctgtttgctgccaactacatgatgaatgtcatcgaggtggacagcgcccactacaagctgctggagacagagctgctgcaggagatcagcgagattgagaagagatatgacatctgcagcaaggtgtctgagaagggccagaagacctgcatcctgtttgagagcaaggaccggcaggtggacctgtctgtgcacgcctatgccagcttcattgatgccttccagcacgccagctgccagctgatgagggaggtgctgctgctgaagagcctgggcaaggagaggaagcacctgcaccagaccaagtttgctgatgacttcaggaagaggcaccccaacgtgcactttgtgctgaaccaggagagcatgaccctgaccggcctgcccaaccacctggccaaggccaagcagtatgtgctgaagggcggcggcatgagcagcctggccggcaagaagctgaaggagggccacgagacccccatggacatcgacagtgatgacagcaaggccgccagcccccccctgaagggctctgtgagcagcgaggccagcgagctggacaagaaggagaagggcatctgtgtgatctgcatggacaccatcagcaacaagaaggtgctgcccaagtgcaagcatgagttctgtgccccctgcatcaacaaggccatgagctacaagcccatctgccccacctgccagaccagctatggcatccagaagggcaaccagcctgagggctccatggtgttcaccgtgtcccgggacagcctgcccggctatgagagctttggcaccatcgtcatcacctacagcatgaaggccggcatccagacagaggagcaccccaaccctgggaagcgctacccaggcatccagaggacagcctacctgcctgacaacaaggagggcaggaaggtgctgaagctgctgtaccgggcctttgaccagaagctgatcttcaccgtgggctacagccgggtgctgggcgtgtctgatgtgatcacctggaatgacatccaccacaagaccagcagatttggaggccctgagatgtatggctacccagaccccagctacctgaagagggtgaaggaggagctgaaggccaagggcattgaatag

SEQ ID NO: 149761 - DNA, 1863 bp, synthetic construct
  misc_feature 1..1863: note = Description of Artificial Sequence: Synthetic coding sequence
  source 1..1863: mol_type = other DNA
atgagccggcccggccacggcggcctgatgcctgtgaatggcctgggcttccccccccagaatgtggcccgggtggtggtgtgggagtggctgaatgagcacagccgctggaggccctacacagccaccgtgtgccaccacattgaaaatgtgctgaaggaggatgcccggggctctgtggtgctgggccaggtggatgcccagctggtgccctacatcatcgacctgcagagcatgcaccagttccggcaggacaccggcaccatgaggcctgtgagaagaaacttctatgaccccagcagcgcccctggaaaaggaattgtgtgggagtgggagaatgatggaggagcctggacagcctatgacatggacatctgcatcaccatccagaatgcctatgagaagcagcacccctggctggacctgagcagcctgggcttctgctacctgatctacttcaacagcatgagccagatgaaccggcagaccaggagaagaagaaggctgcggcggcggctggacctggcctaccccctgactgtgggcagcatccccaagagccagagctggcctgtgggcgccagcagcggccagccctgcagctgccagcagtgcctgctggtgaacagcaccagggctgccagcaatgccatcctggccagccagaggaggaaggcccccccagccccacccctgcccccacctcctcctcctgggggccccccaggggccctggccgtgcggcccagcgccaccttcaccggggccgccctgtgggccgccccagctgctggccctgctgagcccgcccctcctcctggggccccacccaggagccctggggcccctggaggagcccggaccccaggccagaacaacctgaacagacctggcccccagaggaccacctctgtgtctgcccgggccagcatccccccaggagtgcctgccctgcctgtgaagaacctgaatggcaccggccctgtgcacccagccctggccggcatgacaggcatcctgctgtgtgccgccggcctgcctgtgtgcctgacccgggcccccaagcccatcctgcaccccccacctgtgtccaagagtgatgtgaagcctgtgcctggggtgcctggggtgtgcaggaagaccaagaagaagcacctgaagaagagcaagaacccagaagatgtggtgcggcgctacatgcagaaggtgaagaaccccccagatgaggactgcaccatctgcatggagcggctggtgacagccagcggctatgagggcgtgctgcggcacaagggcgtgcggcctgagctggtgggccgcctgggccgctgtggccacatgtaccacctgctgtgcctggtggccatgtacagcaatggaaacaaggatggcagcctgcagtgccccacctgcaaggccatctatggagagaagacaggcacccagcccccaggcaagatggagttccacctgatcccccacagcctgcccggcttcccagacacccagaccatcagaattgtgtatgacatccccaccggcatccagggccctgagcaccccaaccctgggaagaagttcaccgcccggggcttccccaggcactgctacctgcccaacaatgaaaaaggaaggaaggtgctgcggctgctgatcacagcctgggagaggaggctcatcttcaccatcggcaccagcaacaccactggagagagtgacacagtggtgtggaatgagatccaccacaagacagaatttggcagcaacctgactggacatggctacccagatgccagctacctggacaacgtgctggccgagctgacagcccagggcgtgtctgaggccgccgccaaggcctag

SEQ ID NO: 149762 - DNA, 1044 bp, synthetic construct
  misc_feature 1..1044: note = Description of Artificial Sequence: Synthetic coding sequence
  source 1..1044: mol_type = other DNA
atgagctttgtgctgagcaggatggccgcctgtggcggcacctgcaagaacaaggtgacagtgtccaagcctgtgtgggacttcctgagcaaggagaccccagcccggctggcccggctgcgggaggagcaccgggtgtccatcctgattgatggagagaccagtgacatctacgtgctgcagctgagcccccagggccccccaccagcccccccaaatggcctgtacctggccaggaaggccctgaagggcctgctgaaggaggccgagaaggagctgaagaaggcccagaggcagggcgagctgatgggctgcctggccctgggcggcggcggggagcaccctgagatgcaccgggccggccccccacccctgcgggccgcccccctgctgcccccaggggcccggggcctgcccccacctcctccacccctgcccccacccctgcccccccggctgcgggaggaggccgaggagcaggagagcacctgccccatctgcctgggggagatccagaatgccaagaccctggagaagtgccgccacagcttctgtgagggctgcatcacccgggccctgcaggtgaagaaggcctgccccatgtgtggccgcttctacggccagctggtgggcaaccagccccagaatggccgcatgctggtgtccaaggatgccaccctgctgctgcccagctatgagaagtatggcaccatcgtcatccagtatgtgtttcctcctggggtgcagggcgctgagcaccccaaccctggggtgcgctacccaggcaccaccagggtggcctacctgcctgactgcccagagggcaacaaggtgctgaccctcttcaggaaggcctttgaccagaggctgaccttcaccatcggcacctccatgaccaccggccggcccaacgtcatcacctggaatgacatccaccacaagaccagctgcaccggcggcccccagctgtttggctacccagaccccacctacctgaccagggtgcaggaggagctgcgggccaagggcatcacagatgactag

SEQ ID NO: 149763 - DNA, 1044 bp, synthetic construct; identical to SEQ ID NO: 149762
  misc_feature 1..1044: note = Description of Artificial Sequence: Synthetic coding sequence
  source 1..1044: mol_type = other DNA

SEQ ID NO: 149764 - DNA, 1044 bp, synthetic construct; identical to SEQ ID NO: 149762
  misc_feature 1..1044: note = Description of Artificial Sequence: Synthetic coding sequence
  source 1..1044: mol_type = other DNA

SEQ ID NO: 149765 - DNA, 615 bp, synthetic construct
  misc_feature 1..615: note = Description of Artificial Sequence: Synthetic coding sequence
  source 1..615: mol_type = other DNA
atgcccatcctgagcagcagcggcagcaagatggccgcctgtggcggcacctgcaagaacaaggtgacagtgtccaagcctgtgtgggacttcctgagcaaggagaccccagcccggctggcccggctgcgggaggagcaccgggtgtccatcctgattgatggagagaccagtgacatctacgtgctgcagctgagcccccagggccccccaccagccccacccaacggcctgtacctggccaggaaggccctgaagggcctgctgaaggaggccgagaaggagctgaagaaggcccagaggcagggcgagctgatgggctgcctggccctgggcggcggcggggagcaccctgagatgcacagagctggccccccacccctgcgggccgcccccctgctgcccccaggggcccggggcctgcccccacctcctccacccctgcccccacccctgcccccccggctgcgggaggaggccgaggagcaggagagcacctgccccatctgcctgggggagatccagaatgccaagaccctggagaagtgccgccacagcttctgtgagggctgcatcacccgggccctgcaggtgaagaaggcctgccccatgtag

SEQ ID NO: 149766 - DNA, 24 bp, synthetic construct
  misc_feature 1..24: note = Description of Artificial Sequence: Synthetic coding sequence
  source 1..24: mol_type = other DNA
atgcccatcctgagcagcagctag

SEQ ID NO: 149767 - DNA, 1053 bp, synthetic construct
  misc_feature 1..1053: note = Description of Artificial Sequence: Synthetic coding sequence
  source 1..1053: mol_type = other DNA
atgcccatcctgagcagcagcggcagcaagatggccgcctgtggcggcacctgcaagaacaaggtgacagtgtccaagcctgtgtgggacttcctgagcaaggagaccccagcccggctggcccggctgcgggaggagcaccgggtgtccatcctgattgatggagagaccagtgacatctacgtgctgcagctgagcccccagggccccccaccagccccacccaacggcctgtacctggccaggaaggccctgaagggcctgctgaaggaggccgagaaggagctgaagaaggcccagaggcagggcgagctgatgggctgcctggccctgggcggcggcggggagcaccctgagatgcacagagctggccccccacccctgcgggccgcccccctgctgcccccaggggcccggggcctgcccccacctcctccacccctgcccccacccctgcccccccggctgcgggaggaggccgaggagcaggagagcacctgccccatctgcctgggggagatccagaatgccaagaccctggagaagtgccgccacagcttctgtgagggctgcatcacccgggccctgcaggtgaagaaggcctgccccatgtgtggccgcttctacggccagctggtgggcaaccagccccagaatggaaggatgctggtgtccaaggatgccaccctgctgctgcccagctatgagaagtatggcaccatcgtcatccagtatgtgttccccccaggagtgcagggcgctgagcaccccaaccctggggtgcgctacccaggcaccaccagggtggcctacctgcctgactgcccagagggcaacaaggtgctgaccctcttcaggaaggcctttgaccagaggctgaccttcaccatcggcacctccatgaccaccggccggcccaacgtcatcacctggaatgacatccaccacaagaccagctgcacaggaggcccccagctgtttggctacccagaccccacctacctgaccagggtgcaggaggagctgcgggccaagggcatcacagatgactag

SEQ ID NO: 149768 - DNA, 150 bp, synthetic construct
  misc_feature 1..150: note = Description of Artificial Sequence: Synthetic coding sequence
  source 1..150: mol_type = other DNA
atgagctttgtgctgagcaggatggccgcctgtggcggcacctgcaagaacaaggtgacagtgtccaagcctgtgtgggacttcctgagcaaggagaccccagcccggctggcccggctgcgggaggagcaccgggtgtccatcctgtag

SEQ ID NO: 149769 - DNA, 2136 bp, synthetic construct
  misc_feature 1..2136: note = Description of Artificial Sequence: Synthetic coding sequence
  source 1..2136: mol_type = other DNA
atgctggatggccccctcttcagcgagggccctgacagcccccgggagctgcaggatgaggagagcggcagctgcctgtgggtgcagaagagcaagctgctggtgattgaggtgaagaccatcagctgccactacagcagaagagcccccagccggcagcccatggacttccaggccagccactgggcccggggcttccagaacagaacctgtggccccaggcctggcagcccccagcccccaccaagaagaccctgggccagccgggtgctgcaggaggccaccaactggagggctggccccctggccgaggtgcgggcccgggagcaggagaagaggaaggccgccagccaggagcgggaggccaaggagacagagaggaagaggaggaaggccggcggggcccggcgcagccccccaggccggcccaggcctgagcccagaaatgccccccgggtggcccagctggccggcctgcctgcccccctgcggcctgagcggctggcccctgtgggccgggccccccggcccagcgcccagccccagagcgaccccggcagcgcctgggccggcccctggggcggccggcggcccggcccccccagctatgaggcccacctgctgctgcggggcagcgctggaacagccccccggcggcgctgggaccggcccccaccctacgtggccccacccagctatgagggcccccacaggaccctgggcaccaagaggggccctggcaacagccaggtgcccaccagcagcgccccagctgccaccccagccaggacagatggcggccgcaccaagaagaggctggacccccgcatctacagagatgtgctgggcgcctggggcctgcggcagggccagggcctgctgggcggcagccctggctgtggggccgcccgggcccggcctgagcctggaaaaggagtggtggagaagagcctgggcctggccgctgctgacctgaacagcggcagtgacagccacccccaggccaaggccaccggcagcgctggaacagaaattgccccagctggcagcgccacagctgccccctgtgccccccacccagcccccaggagccgccaccacctgaagggcagccgggagggcaaggagggggagcagatctggttccccaagtgctggatccccagccccaagaagcagccccccaggcacagccagaccctgccccggccctgggcccctgggggcaccggctggagggagagcctgggcctgggggagggcgccggccctgagaccctggagggctggaaggccacccggcgggcccacaccctgcccaggagcagccagggcctgagcagaggagaaggagtgtttgtgattgatgccacctgtgtggtgatccgcagccagtatgtgcccacccccaggacccagcaggtgcagctgctgcccagcggcgtgaccagggtggtgggggacagccccagccagagcaagccaggcaaggaggagggggagggcgccaccgtcttccccagcccctgccagaagaggctgagcagcagccggctgctgcaccagcccggcggcggccggggcggggaggccgagggcggccggcctggggacagcaccctggaggagaggaccttccgcatcctgggcctgcctgcccctgaggtgaacctgagagatgcccccacccagcccggcagccctgagcaccaggccctgggccctgctgccagcggggcccagggccgggcagagggcagcgaggtggccgtggtgcagaggcgggccggccggggctgggcccggaccccaggcccctatgctggggccctgcgggaggccgtgagccgcatcagaagacacacagccccagacagcgacacagatgaagctgaggagctgtctgtgcacagcggcagcagtgatggcagtgacacagaggcccctggggcctcctggagaaatgaaagaaccctgcctgaggtgggcaacagcagcccagaagaagatggcaagacagctgagctgagtgacagcgtgggggagatcctggatgtgatcagccagacagaggaggtgctgtttggagtgcgggacatccggggcacccagcagggcaacaggaagaggcagtag

SEQ ID NO: 149770 - DNA, 852 bp, synthetic construct
  misc_feature 1..852: note = Description of Artificial Sequence: Synthetic coding sequence
  source 1..852: mol_type = other DNA
atgggcatctggaccagcggcacagacatcttcctgagcctgtgggagatctacgtgagccccaggagccctggctggatggacttcatccagcacctgggcgtgtgctgcctggtggccctgatctctgtgggcctgctgtctgtggccgcctgctggttcctgcccagcatcatcgctgctgctgcctcctggatcatcacctgtgtgctgctgtgctgcagcaagcacgcccgctgcttcatcctgctggtgttcctgagctgtggcctgcgggagggcagaaatgccctgattgctgctggcactggaattgtcatcctgggccacgtggagaacatcttccacaacttcaagggcctgctggatggcatgacctgcaacctgcgggccaagagcttcagcatccacttccccctgctgaagaagtacatcgaggccatccagtggatctacggcctggccacccccctgtctgtgtttgatgacctggtgtcctggaaccagaccctggccgtgtccctcttcagccccagccacgtgctggaggcccagctgaatgacagcaagggggaggtgctgtctgtgctgtaccagatggccaccaccacagaggtgctgagcagcctgggccagaagctgctggcctttgctggcctgagcctggtgctgctgggcaccggcctcttcatgaagcgcttcctgggcccctgtggctggaagtatgagaacatctacatcacccggcagtttgtgcagtttgatgagcgggagcggcaccagcagaggccctgtgtgctgcccctgaacaaggaggagaggaggaagttcatcagcggcttccagagctag

SEQ ID NO: 149771 - DNA, 1401 bp, synthetic construct
  misc_feature 1..1401: note = Description of Artificial Sequence: Synthetic coding sequence
  source 1..1401: mol_type = other DNA
atgctgaagtggcccatccctggccaggtggccctcttccagatcctgcgctgccggggcaacagcaggaggaccaccgtgaccagcctgactgtgtcccaggtgggccagaacttcacctttgtgctgacagacatcgacagcaagcagcgcttcggcttctgccgcctgagcagcggggccaagagctgcttctgcatcctgagctacctgccctggtttgaggtgttctacaagctgctgaacatcctggccgactacaccaccaagaggcaggagaaccagtggaatgagctgctggagaccctgcacaagctgcccatcccagaccccggggtgtctgtgcacctgtctgtgcacagctacttcaccgtgcctgacacccgggagctgcccagcatccctgagaacagaaacctgacagagtactttgtggccgtggatgtgaacaacatgctgcacctgtatgcctccatgctgtatgaaagacgcatcctgatcatctgcagcaagctgagcaccctgacagcctgcatccacggcagcgctgccatgctgtaccccatgtactggcagcacgtgtacatccctgtgctgcccccccacctgctggactactgctgtgcccccatgccctacctgattggcatccacctgagcctgatggagaaggtgaggaacatggccctggatgatgtggtgatcctgaatgtggacaccaacaccctggagaccccatttgatgacctgcagagcctgcccaatgatgtgatcagcagcctgaagaaccggctgaagaaggtgtccaccaccactggagatggagtggcccgggccttcctgaaggcccaggccgccttcttcggcagctacagaaatgccctgaagattgagcctgaggagcccatcaccttctgtgaggaggcctttgtgagccactaccgcagcggggccatgaggcagttcctgcagaatgccacccagctgcagctgttcaagcagttcattgatggccgcctggacctgctgaacagcggggagggcttcagtgatgtgtttgaggaggagatcaacatgggagaatatgccggcagtgacaagctgtaccaccagtggctgagcacagtgaggaagggcagcggggccatcctgaacacagtgaagaccaaggccaacccagccatgaagacagtgtacaagtttgccaaggaccacgccaagatgggcatcaaggaggtgaagaaccggctgaagcagaaggacattgctgaaaatggctgtgcccccaccccagaggagcagctgcccaagacagcccccagccccctggtggaggccaaggaccccaagctgagagaagatagaagacccatcaccgtgcacttcggccaggccctgtag

SEQ ID NO: 149772 - DNA, 1680 bp, synthetic construct
  misc_feature 1..1680: note = Description of Artificial Sequence: Synthetic coding sequence
  source 1..1680: mol_type = other DNA
atgggcagccgcatcaagcagaaccctgagaccacctttgaggtgtatgtggaggtggcctaccccaggactggaggcaccctgagtgaccctgaggtgcagaggcagtttcctgaggactacagcgaccaggaggtgctgcagaccctgaccaagttctgcttccccttctacgtggacagcctgactgtgtcccaggtgggccagaacttcacctttgtgctgacagacatcgacagcaagcagcgcttcggcttctgccgcctgagcagcggggccaagagctgcttctgcatcctgagctacctgccctggtttgaggtgttctacaagctgctgaacatcctggccgactacaccaccaagaggcaggagaaccagtggaatgagctgctggagaccctgcacaagctgcccatcccagaccccggggtgtctgtgcacctgtctgtgcacagctacttcaccgtgcctgacacccgggagctgcccagcatccctgagaacagaaacctgacagagtactttgtggccgtggatgtgaacaacatgctgcacctgtatgcctccatgctgtatgaaagacgcatcctgatcatctgcagcaagctgagcaccctgacagcctgcatccacggcagcgctgccatgctgtaccccatgtactggcagcacgtgtacatccctgtgctgcccccccacctgctggactactgctgtgcccccatgccctacctgattggcatccacctgagcctgatggagaaggtgaggaacatggccctggatgatgtggtgatcctgaatgtggacaccaacaccctggagaccccatttgatgacctgcagagcctgcccaatgatgtgatcagcagcctgaagaaccggctgaagaaggtgtccaccaccactggagatggagtggcccgggccttcctgaaggcccaggccgccttcttcggcagctacagaaatgccctgaagattgagcctgaggagcccatcaccttctgtgaggaggcctttgtgagccactaccgcagcggggccatgaggcagttcctgcagaatgccacccagctgcagctgttcaagcagttcattgatggccgcctggacctgctgaacagcggggagggcttcagtgatgtgtttgaggaggagatcaacatgggagaatatgccggcagtgacaagctgtaccaccagtggctgagcacagtgaggaagggcagcggggccatcctgaacacagtgaagaccaaggccaacccagccatgaagacagtgtacaagtttgccaaggaccacgccaagatgggcatcaaggaggtgaagaaccggctgaagcagaaggacattgctgaaaatggctgtgcccccaccccagaggagcagctgcccaagacagcccccagccccctggtggaggccaaggaccccaagctgagagaagatagaagacccatcaccgtgcacttcggccaggtgcggcccccccggccccacgtggtgaagaggcccaagagcaacattgctgtggagggccgccgcacctctgtgcccagccctgagcagaacaccatcgccaccccagccaccctgcacatcctgcagaagagcatcacccactttgctgccaagttccccacccggggctggaccagcagcagccactag

SEQ ID NO: 149773 - DNA, 3030 bp, synthetic construct
  misc_feature 1..3030: note = Description of Artificial Sequence: Synthetic coding sequence
  source 1..3030: mol_type = other DNA
atgggcagccgcatcaagcagaaccctgagaccacctttgaggtgtatgtggaggtggcctaccccaggactggaggcaccctgagtgaccctgaggtgcagaggcagtttcctgaggactacagcgaccaggaggtgctgcagaccctgaccaagttctgcttccccttctacgtggacagcctgactgtgtcccaggtgggccagaacttcacctttgtgctgacagacatcgacagcaagcagcgcttcggcttctgccgcctgagcagcggggccaagagctgcttctgcatcctgagctacctgccctggtttgaggtgttctacaagctgctgaacatcctggccgactacaccaccaagaggcaggagaaccagtggaatgagctgctggagaccctgcacaagctgcccatcccagaccccggggtgtctgtgcacctgtctgtgcacagctacttcaccgtgcctgacacccgggagctgcccagcatccctgagaacagaaacctgacagagtactttgtggccgtggatgtgaacaacatgctgcacctgtatgcctccatgctgtatgaaagacgcatcctgatcatctgcagcaagctgagcaccctgacagcctgcatccacggcagcgctgccatgctgtaccccatgtactggcagcacgtgtacatccctgtgctgcccccccacctgctggactactgctgtgcccccatgccctacctgattggcatccacctgagcctgatggagaaggtgaggaacatggccctggatgatgtggtgatcctgaatgtggacaccaacaccctggagaccccatttgatgacctgcagagcctgcccaatgatgtgatcagcagcctgaagaaccggctgaagaaggtgtccaccaccactggagatggagtggcccgggccttcctgaaggcccaggccgccttcttcggcagctacagaaatgccctgaagattgagcctgaggagcccatcaccttctgtgaggaggcctttgtgagccactaccgcagcggggccatgaggcagttcctgcagaatgccacccagctgcagctgttcaagcagttcattgatggccgcctggacctgctgaacagcggggagggcttcagtgatgtgtttgaggaggagatcaacatgggagaatatgccggcagtgacaagctgtaccaccagtggctgagcacagtgaggaagggcagcggggccatcctgaacacagtgaagaccaaggccaacccagccatgaagacagtgtacaagtttgccaaggaccacgccaagatgggcatcaaggaggtgaagaaccggctgaagcagaaggacattgctgaaaatggctgtgcccccaccccagaggagcagctgcccaagacagcccccagccccctggtggaggccaaggaccccaagctgagagaagatagaagacccatcaccgtgcacttcggccaggtgcggcccccccggccccacgtggtgaagaggcccaagagcaacattgctgtggagggccgccgcacctctgtgcccagccctgagcagccccagccctaccgcaccctgcgggagagtgacagcgcagaaggagatgaggccgagagccctgagcagcaggtgaggaagagcactggacctgtgcctgcccccccagacagagctgccagcattgacctgctggaggatgtgttcagcaacctggacatggaggccgccctgcagcccctgggccaggccaagagcctggaggacctgcgggcccccaaggacctgcgggagcagcccggcacctttgactaccagaggctggacctgggcggcagcgagaggagccggggcgtgacagtggccctgaagctgacccacccctacaacaagctgtggagcctgggccaggatgacatggccatccccagcaagcccccagctgccagccctgagaagcccagcgccctgctgggcaacagcctggccctgccccggcggccccagaacagagacagcatcctgaaccccagcgacaaggaggaggtgcccacccccaccctgggcagcatcaccatcccccggccccagggcaggaagaccccagagctgggcatcgtgcccccaccacccatccccaggcctgccaagctgcaggccgccggggccgccctgggagatgtgtctgagcggctgcagacagaccgggaccggcgggccgccctgagccctggcctgctgcccggggtggtgccccagggccccacagagctgctgcagcccctgagccctggccctggagctgctggcaccagcagtgatgccctgctggccctgctggaccccctgagcacagcctggagcggcagcaccctgcccagcaggcctgccacccccaacgtggccacccccttcaccccccagttctccttccccccagctggcacccccacccccttcccccagccccccctgaacccctttgtgcccagcatgcctgctgccccacccaccctgcccctggtgtccaccccagctggcccctttggagcccccccagccagcctgggccctgcctttgccagcggcctgctgctgagcagcgctggcttctgtgccccccacaggagccagcccaacctgagcgccctgtccatgcccaacctgtttggccagatgcccatgggcacccacaccagccccctgcagcccctgggccccccagctgtggcccccagccgcatccgcaccctgcccctggcccggagcagcgcccgggctgctgagaccaagcagggcctggccctgcggcctggggacccccccctgctgcccccccggcccccccagggcctggagcccaccctgcagcccagcgccccccagcaggcccgggacccctttgaggacctgctgcagaagaccaagcaggatgtgagccccagccctgccctggccccagccccagattctgtggagcagctgaggaagcagtgggagacctttgaatag

SEQ ID NO: 149774 - DNA, 1590 bp, synthetic construct
  misc_feature 1..1590: note = Description of Artificial Sequence: Synthetic coding sequence
  source 1..1590: mol_type = other DNA
atgctgaagtggcccatccctggccaggtggccctcttccaggaggtgctgcagaccctgaccaagttctgcttccccttctacgtggacagcctgactgtgtcccaggtgggccagaacttcacctttgtgctgacagacatcgacagcaagcagcgcttcggcttctgccgcctgagcagcggggccaagagctgcttctgcatcctgagctacctgccctggtttgaggtgttctacaagctgctgaacatcctggccgactacaccaccaagaggcaggagaaccagtggaatgagctgctggagaccctgcacaagctgcccatcccagaccccggggtgtctgtgcacctgtctgtgcacagctacttcaccgtgcctgacacccgggagctgcccagcatccctgagaacagaaacctgacagagtactttgtggccgtggatgtgaacaacatgctgcacctgtatgcctccatgctgtatgaaagacgcatcctgatcatctgcagcaagctgagcaccctgacagcctgcatccacggcagcgctgccatgctgtaccccatgtactggcagcacgtgtacatccctgtgctgcccccccacctgctggactactgctgtgcccccatgccctacctgattggcatccacctgagcctgatggagaaggtgaggaacatggccctggatgatgtggtgatcctgaatgtggacaccaacaccctggagaccccatttgatgacctgcagagcctgcccaatgatgtgatcagcagcctgaagaaccggctgaagaaggtgtccaccaccactggagatggagtggcccgggccttcctgaaggcccaggccgccttcttcggcagctacagaaatgccctgaagattgagcctgaggagcccatcaccttctgtgaggaggcctttgtgagccactaccgcagcggggccatgaggcagttcctgcagaatgccacccagctgcagctgttcaagcagttcattgatggccgcctggacctgctgaacagcggggagggcttcagtgatgtgtttgaggaggagatcaacatgggagaatatgccggcagtgacaagctgtaccaccagtggctgagcacagtgaggaagggcagcggggccatcctgaacacagtgaagaccaaggccaacccagccatgaagacagtgtacaagtttgccaaggaccacgccaagatgggcatcaaggaggtgaagaaccggctgaagcagaaggacattgctgaaaatggctgtgcccccaccccagaggagcagctgcccaagacagcccccagccccctggtggaggccaaggaccccaagctgagagaagatagaagacccatcaccgtgcacttcggccaggtgcggcccccccggccccacgtggtgaagaggcccaagagcaacattgctgtggagggccgccgcacctctgtgcccagccctgagcagaacaccatcgccaccccagccaccctgcacatcctgcagaagagcatcacccactttgctgccaagttccccacccggggctggaccagcagcagccactag

SEQ ID NO: 149775 - DNA, 3063 bp, synthetic construct
  misc_feature 1..3063: note = Description of Artificial Sequence: Synthetic coding sequence
  source 1..3063: mol_type = other DNA
atgaggaggcctggggaccacggcctgcaggaccaggaggtgctgcagaccctgaccaagttctgcttccccttctacgtggacagcctgactgtgtcccaggtgggccagaacttcacctttgtgctgacagacatcgacagcaagcagcgcttcggcttctgccgcctgagcagcggggccaagagctgcttctgcatcctgagctacctgccctggtttgaggtgttctacaagctgctgaacatcctggccgactacaccaccaagaggcaggagaaccagtggaatgagctgctggagaccctgcacaagctgcccatcccagaccccggggtgtctgtgcacctgtctgtgcacagctacttcaccgtgcctgacacccgggagctgcccagcatccctgagaacagaaacctgacagagtactttgtggccgtggatgtgaacaacatgctgcacctgtatgcctccatgctgtatgaaagacgcatcctgatcatctgcagcaagctgagcaccctgacagcctgcatccacggcagcgctgccatgctgtaccccatgtactggcagcacgtgtacatccctgtgctgcccccccacctgctggactactgctgtgcccccatgccctacctgattggcatccacctgagcctgatggagaaggtgaggaacatggccctggatgatgtggtgatcctgaatgtggacaccaacaccctggagaccccatttgatgacctgcagagcctgcccaatgatgtgatcagcagcctgaagaaccggctgaagaaggtgtccaccaccactggagatggagtggcccgggccttcctgaaggcccaggccgccttcttcggcagctacagaaatgccctgaagattgagcctgaggagcccatcaccttctgtgaggaggcctttgtgagccactaccgcagcggggccatgaggcagttcctgcagaatgccacccagctgcagctgttcaagcagttcattgatggccgcctggacctgctgaacagcggggagggcttcagtgatgtgtttgaggaggagatcaacatgggagaatatgccggcagtgacaagctgtaccaccagtggctgagcacagtgaggaagggcagcggggccatcctgaacacagtgaagaccaaggccaacccagccatgaagacagtgtacaagtttgccaaggaccacgccaagatgggcatcaaggaggtgaagaaccggctgaagcagaaggacattgctgaaaatggctgtgcccccaccccagaggagcagctgcccaagacagcccccagccccctggtggaggccaaggaccccaagctgagagaagatagaagacccatcaccgtgcacttcggccaggtgcggcccccccggccccacgtggtgaagaggcccaagagcaacattgctgtggagggccgccgcacctctgtgcccagccctgagcacctggtgaagcccctgcggcactatgctgtgttcctgtctgaggacagcagtgatgatgagtgccagcgggaggagggccccagcagcggcttcacagagagcttcttcttcagcgccccctttgagtggccccagccctaccgcaccctgcgggagagtgacagcgcagaaggagatgaagctgagagccctgagcagcaggtgaggaagagcacaggccctgtgcctgcccccccagaccgggccgccagcattgacctgctggaggatgtgttcagcaacctggacatggaggccgccctgcagcccctgggccaggccaagagcctggaggacctgcgggcccccaaggacctgcgggagcagcccggcacctttgactaccagaggctggacctgggcggcagcgagaggagcagaggagtgacagtggccctgaagctgacccacccctacaacaagctgtggagcctgggccaggatgacatggccatccccagcaagcccccagctgccagccctgagaagcccagcgccctgctgggcaacagcctggccctgccccggcggccccagaacagagacagcatcctgaaccccagcgacaaggaggaggtgcccacccccaccctgggcagcatcaccatcccccggccccagggcaggaagaccccagagctgggcatcgtgcccccaccacccatccccaggcctgccaagctgcaggccgccggggccgccctgggagatgtgtctgagcggctgcagacagaccgggacagaagagctgccctgagccctggcctgctgcccggggtggtgccccagggccccacagagctgctgcagcccctgagccctggccctggagctgctggcaccagcagtgatgccctgctggccctgctggaccccctgagcacagcctggagcggcagcaccctgcccagcaggcctgccaccccaaatgtggccacccccttcaccccccagttctccttccccccagctggcacccccacccccttcccccagccccccctgaacccctttgtgcccagcatgcctgctgccccacccaccctgcccctggtgtccaccccagctggcccctttggagcccccccagccagcctgggccctgcctttgccagcggcctgctgctgagcagcgctggcttctgtgccccccacaggagccagcccaacctgagcgccctgtccatgcccaacctgtttggccagatgcccatgggcacccacaccagccccctgcagcccctgggccccccagctgtggcccccagccgcatccgcaccctgcccctggcccggagcagcgcccgggctgctgagaccaagcagggcctggccctgcggcctggggacccccccctgctgccccccaggcctccccagggcctggagcccaccctgcagcccagcgccccccagcaggcccgggacccctttgaggacctgctgcagaagaccaagcaggatgtgagccccagccctgccctggccccagccccagacagcgtggagcagctgaggaagcagtgggagacctttgaatag

SEQ ID NO: 149776 - DNA, 2385 bp, synthetic construct
  misc_feature 1..2385: note = Description of Artificial Sequence: Synthetic coding sequence
  source 1..2385: mol_type = other DNA
atgctgtaccccatgtactggcagcacgtgtacatccctgtgctgcccccccacctgctggactactgctgtgcccccatgccctacctgattggcatccacctgagcctgatggagaaggtgaggaacatggccctggatgatgtggtgatcctgaatgtggacaccaacaccctggagaccccatttgatgacctgcagagcctgcccaatgatgtggaggagcccatcaccttctgtgaggaggcctttgtgagccactaccgcagcggggccatgaggcagttcctgcagaatgccacccagctgcagctgttcaagcagttcattgatggccgcctggacctgctgaacagcggggagggcttcagtgatgtgtttgaggaggagatcaacatgggagaatatgccggcagtgacaagctgtaccaccagtggctgagcacagtgaggaagggcagcggggccatcctgaacacagtgaagaccaaggccaacccagccatgaagacagtgtacaagtttgccaaggaccacgccaagatgggcatcaaggaggtgaagaaccggctgaagcagaaggacattgctgaaaatggctgtgcccccaccccagaggagcagctgcccaagacagcccccagccccctggtggaggccaaggaccccaagctgagagaagatagaagacccatcaccgtgcacttcggccaggtgcggcccccccggccccacgtggtgaagaggcccaagagcaacattgctgtggagggccgccgcacctctgtgcccagccctgagcacctggtgaagcccctgcggcactatgctgtgttcctgtctgaggacagcagtgatgatgagtgccagcgggaggagggccccagcagcggcttcacagagagcttcttcttcagcgccccctttgagtggccccagccctaccgcaccctgcgggagagtgacagcgcagaaggagatgaagctgagagccctgagcagcaggtgaggaagagcacaggccctgtgcctgcccccccagaccgggccgccagcattgacctgctggaggatgtgttcagcaacctggacatggaggccgccctgcagcccctgggccaggccaagagcctggaggacctgcgggcccccaaggacctgcgggagcagcccggcacctttgactaccagaggctggacctgggcggcagcgagaggagcagaggagtgacagtggccctgaagctgacccacccctacaacaagctgtggagcctgggccaggatgacatggccatccccagcaagcccccagctgccagccctgagaagcccagcgccctgctgggcaacagcctggccctgccccggcggccccagaacagagacagcatcctgaaccccagcgacaaggaggaggtgcccacccccaccctgggcagcatcaccatcccccggccccagggcaggaagaccccagagctgggcatcgtgcccccaccacccatccccaggcctgccaagctgcaggccgccggggccgccctgggagatgtgtctgagcggctgcagacagaccgggacagaagagctgccctgagccctggcctgctgcccggggtggtgccccagggccccacagagctgctgcagcccctgagccctggccctggagctgctggcaccagcagtgatgccctgctggccctgctggaccccctgagcacagcctggagcggcagcaccctgcccagcaggcctgccaccccaaatgtggccacccccttcaccccccagttctccttccccccagctggcacccccacccccttcccccagccccccctgaacccctttgtgcccagcatgcctgctgccccacccaccctgcccctggtgtccaccccagctggcccctttggagcccccccagccagcctgggccctgcctttgccagcggcctgctgctgagcagcgctggcttctgtgccccccacaggagccagcccaacctgagcgccctgtccatgcccaacctgtttggccagatgcccatgggcacccacaccagccccctgcagcccctgggccccccagctgtggcccccagccgcatccgcaccctgcccctggcccggagcagcgcccgggctgctgagaccaagcagggcctggccctgcggcctggggacccccccctgctgccccccaggcctccccagggcctggagcccaccctgcagcccagcgccccccagcaggcccgggacccctttgaggacctgctgcagaagaccaagcaggatgtgagccccagccctgccctggccccagccccagacagcgtggagcagctgaggaagcagtgggagacctttgaatag

SEQ ID NO: 149777 - DNA, 1191 bp, synthetic construct
  misc_feature 1..1191: note = Description of Artificial Sequence: Synthetic coding sequence
  source 1..1191: mol_type = other DNA
atggctgctgccccccgggaggagaagcgctggccccagcccgtcttcagcaaccctgtggtgctgtggaagttcccagaagattttggagaccaggagatcctgcagagcgtgcccaagttctgcttcccctttgatgtggagcgggtgtcccagaaccaggtgggccagcacttcacctttgtgctgacagacatcgagagcaagcagcgcttcggcttctgccgcctgaccagcggcggcaccatctgcctgtgcatcctgagctacctgccctggtttgaggtgtactacaagctgctgaacaccctggccgactacctggccaaggagctggagaatgacctgaatgagaccctgcggagcctgtacaaccaccctgtgcccaaggccaacacccctgtgaacctgtctgtgcacagctacttcatcgccccagatgtgacaggcctgcccaccatccctgagagcaggaacctgacagagtactttgtggccgtggatgtgaacaacatgctgcagctgtatgcctccatgctgcatgaaagaagaattgtcatcatcagcagcaagctgagcaccctgacagcctgcatccacggcagcgctgccctgctgtaccccatgtactggcagcacatctacatccctgtgctgcccccccacctgctggactactgctgtgcccccatgccctacctgattggcatccacagcagcctcatcgagcgggtgaagaacaagagcctggaggatgtggtgatgctgaatgtggacaccaacaccctggagagccccttcagtgacctgaacaacctgcccagtgatgtggtgtctgccctgaagaacaagctgaagaagcagagcacagccactggagatggagtggcccgggccttcctgcgggcccaggccgccctgtttggcagctacagagatgccctgcgctacaagccaggagagcccatcaccttctgtgaggagagctttgtgaagcacaggagctctgtgatgaagcagttcctggagacagccatcaacctgcagctgttcaagcagttcattgatggccgcctggccaagctgaatgccggccggggcttcagtgatgtgtttgaggaggagatcaccagcggcggcttctgtggcggcaaggacaagctgcagtatgactaccccttcagccagtag

SEQ ID NO: 149778 - DNA, 1281 bp, synthetic construct
  misc_feature 1..1281: note = Description of Artificial Sequence: Synthetic coding sequence
  source 1..1281: mol_type = other DNA
atggactgcaggaccaaggccaacccagacaggacctttgacctggtgctgaaggtgaagtgccacgcctctgaaaatgaagatcctgtggtgctgtggaagttcccagaagattttggagaccaggagatcctgcagagcgtgcccaagttctgcttcccctttgatgtggagcgggtgtcccagaaccaggtgggccagcacttcacctttgtgctgacagacatcgagagcaagcagcgcttcggcttctgccgcctgaccagcggcggcaccatctgcctgtgcatcctgagctacctgccctggtttgaggtgtactacaagctgctgaacaccctggccgactacctggccaaggagctggagaatgacctgaatgagaccctgcggagcctgtacaaccaccctgtgcccaaggccaacacccctgtgaacctgtctgtgaaccaggagatcttcatcgcctgtgagcaggtgctgaaggaccagcctgccctggtgccccacagctacttcatcgccccagatgtgacaggcctgcccaccatccctgagagcaggaacctgacagagtactttgtggccgtggatgtgaacaacatgctgcagctgtatgcctccatgctgcatgaaagaagaattgtcatcatcagcagcaagctgagcaccctgacagcctgcatccacggcagcgctgccctgctgtaccccatgtactggcagcacatctacatccctgtgctgcccccccacctgctggactactgctgtgcccccatgccctacctgattggcatccacagcagcctcatcgagcgggtgaagaacaagagcctggaggatgtggtgatgctgaatgtggacaccaacaccctggagagccccttcagtgacctgaacaacctgcccagtgatgtggtgtctgccctgaagaacaagctgaagaagcagagcacagccactggagatggagtggcccgggccttcctgcgggcccaggccgccctgtttggcagctacagagatgccctgcgctacaagccaggagagcccatcaccttctgtgaggagagctttgtgaagcacaggagctctgtgatgaagcagttcctggagacagccatcaacctgcagctgttcaagcagttcattgatggccgcctggccaagctgaatgccggccggggcttcagtgatgtgtttgaggaggagatcaccagcggcggcttctgtggcggcaaggacaagctgcagtatgactaccccttcagccagtag

SEQ ID NO: 149779 - DNA, 1191 bp, synthetic construct; identical to SEQ ID NO: 149777
  misc_feature 1..1191: note = Description of Artificial Sequence: Synthetic coding sequence
  source 1..1191: mol_type = other DNA

SEQ ID NO: 149780 - DNA, 2268 bp, synthetic construct
  misc_feature 1..2268: note = Description of Artificial Sequence: Synthetic coding sequence
  source 1..2268: mol_type = other DNA
attgagaccaagacccgggccaacccagacaggacctttgacctggtgctgaaggtgaagtgccacgcctctgaaaatgaagatcctgtggtgctgtggaagttcccagaagattttggagaccaggagatcctgcagagcgtgcccaagttctgcttcccctttgatgtggagcgggtgtcccagaaccaggtgggccagcacttcacctttgtgctgacagacatcgagagcaagcagcgcttcggcttctgccgcctgaccagcggcggcaccatctgcctgtgcatcctgagctacctgccctggtttgaggtgtactacaagctgctgaacaccctggccgactacctggccaaggagctggagaatgacctgaatgagaccctgcggagcctgtacaaccaccctgtgcccaaggccaacacccctgtgaacctgtctgtgcacagctacttcatcgccccagatgtgacaggcctgcccaccatccctgagagcaggaacctgacagagtactttgtggccgtggatgtgaacaacatgctgcagctgtatgcctccatgctgcatgaaagaagaattgtcatcatcagcagcaagctgagcaccctgacagcctgcatccacggcagcgctgccctgctgtaccccatgtactggcagcacatctacatccctgtgctgcccccccacctgctggactactgctgtgcccccatgccctacctgattggcatccacagcagcctcatcgagcgggtgaagaacaagagcctggaggatgtggtgatgctgaatgtggacaccaacaccctggagagccccttcagtgacctgaacaacctgcccagtgatgtggtgtctgccctgaagaacaagctgaagaagcagagcacagccactggagatggagtggcccgggccttcctgcgggcccaggccgccctgtttggcagctacagagatgccctgcgctacaagccaggagagcccatcaccttctgtgaggagagctttgtgaagcacaggagctctgtgatgaagcagttcctggagacagccatcaacctgcagctgttcaagcagttcattgatggccgcctggccaagctgaatgccggccggggcttcagtgatgtgtttgaggaggagatcaccagcggcggcttctgtggcggcaaccccaggagctaccagcagtgggtgcacacagtgaagaagggcggggccctcttcaacacagccatgaccaaggccaccccagctgtgaggacagcctacaagtttgccaagaaccacgccaagctgggcctgaaggaggtgaagagcaagctgaagcacaaggaaaatgaagaagattatggcacctgcagcagctctgtgcagtacacccctgtgtacaagctgcacaatgagaagggcggcaacagcgagaagaggaagctggcccaggcccggctgaagaggcccctgaagagcctggatggagccctgtatgatgatgaagatgatgatgacatcgagcgggccagcaagctgagcagtgaagatggagaggaggccagcgcctacctgtatgaaagtgatgacagcgtggagaccagggtgaagaccccctacagcggggagatggacctgctgggggagatcctggacaccctgagcacccacagcagtgaccagggcaagctggccgccgccaagagcctggacttcttccgctccatggatgacatcgactacaagcccaccaacaagagcaatgcccccagcgagaacaacctggccttcctgtgtggcggcagcggggaccaggccgagtggaacctgggccaggatgacagcgccctgcacggcaagcacctgccccccagccccaggaagagggtgagcagcagcggcctgacagacagcctcttcatcctgaaggaggagaacagcaacaagcacctgggcgctgacaacgtgtctgaccccaccagcggcctggacttccagctgaccagccctgaggtgtcccagacagacaagggcaagacagagaagcgggagaccctgagccagatcagtgatgacctgctgatccctggcctgggccgccacagcagcacctttgtgccctgggagaaggagggcaaggaggccaaggagaccagtgaagatattggcctgctgcacgaggtggtgtccctgtgccacatgaccagtgacttccagcagagcctgaacatcagtgacaagaacaccaatggaaaccagacctag

SEQ ID NO: 149781 - DNA, 2328 bp, synthetic construct
  misc_feature 1..2328: note = Description of Artificial Sequence: Synthetic coding sequence
  source 1..2328: mol_type = other DNA
attgagaccaagacccgggccaacccagacaggacctttgacctggtgctgaaggtgaagtgccacgcctctgaaaatgaagatcctgtggtgctgtggaagttcccagaagattttggagaccaggagatcctgcagagcgtgcccaagttctgcttcccctttgatgtggagcgggtgtcccagaaccaggtgggccagcacttcacctttgtgctgacagacatcgagagcaagcagcgcttcggcttctgccgcctgaccagcggcggcaccatctgcctgtgcatcctgagctacctgccctggtttgaggtgtactacaagctgctgaacaccctggccgactacctggccaaggagctggagaatgacctgaatgagaccctgcggagcctgtacaaccaccctgtgcccaaggccaacacccctgtgaacctgtctgtgaaccaggagatcttcatcgcctgtgagcaggtgctgaaggaccagcctgccctggtgccccacagctacttcatcgccccagatgtgacaggcctgcccaccatccctgagagcaggaacctgacagagtactttgtggccgtggatgtgaacaacatgctgcagctgtatgcctccatgctgcatgaaagaagaattgtcatcatcagcagcaagctgagcaccctgacagcctgcatccacggcagcgctgccctgctgtaccccatgtactggcagcacatctacatccctgtgctgcccccccacctgctggactactgctgtgcccccatgccctacctgattggcatccacagcagcctcatcgagcgggtgaagaacaagagcctggaggatgtggtgatgctgaatgtggacaccaacaccctggagagccccttcagtgacctgaacaacctgcccagtgatgtggtgtctgccctgaagaacaagctgaagaagcagagcacagccactggagatggagtggcccgggccttcctgcgggcccaggccgccctgtttggcagctacagagatgccctgcgctacaagccaggagagcccatcaccttctgtgaggagagctttgtgaagcacaggagctctgtgatgaagcagttcctggagacagccatcaacctgcagctgttcaagcagttcattgatggccgcctggccaagctgaatgccggccggggcttcagtgatgtgtttgaggaggagatcaccagcggcggcttctgtggcggcaaccccaggagctaccagcagtgggtgcacacagtgaagaagggcggggccctcttcaacacagccatgaccaaggccaccccagctgtgaggacagcctacaagtttgccaagaaccacgccaagctgggcctgaaggaggtgaagagcaagctgaagcacaaggaaaatgaagaagattatggcacctgcagcagctctgtgcagtacacccctgtgtacaagctgcacaatgagaagggcggcaacagcgagaagaggaagctggcccaggcccggctgaagaggcccctgaagagcctggatggagccctgtatgatgatgaagatgatgatgacatcgagcgggccagcaagctgagcagtgaagatggagaggaggccagcgcctacctgtatgaaagtgatgacagcgtggagaccagggtgaagaccccctacagcggggagatggacctgctgggggagatcctggacaccctgagcacccacagcagtgaccagggcaagctggccgccgccaagagcctggacttcttccgctccatggatgacatcgactacaagcccaccaacaagagcaatgcccccagcgagaacaacctggccttcctgtgtggcggcagcggggaccaggccgagtggaacctgggccaggatgacagcgccctgcacggcaagcacctgccccccagccccaggaagagggtgagcagcagcggcctgacagacagcctcttcatcctgaaggaggagaacagcaacaagcacctgggcgctgacaacgtgtctgaccccaccagcggcctggacttccagctgaccagccctgaggtgtcccagacagacaagggcaagacagagaagcgggagaccctgagccagatcagtgatgacctgctgatccctggcctgggccgccacagcagcacctttgtgccctgggagaaggagggcaaggaggccaaggagaccagtgaagatattggcctgctgcacgaggtggtgtccctgtgccacatgaccagtgacttccagcagagcctgaacatcagtgacaagaacaccaatggaaaccagacctag
